United States Patent Application Publication US 2005/0196754 A1 - sequence listing, part 14

SEQ ID NO: 27329 - DNA, 507 bp, Homo sapiens
  SIMILAR (265)..(396): 951254mologous to Homo sapiens acidic ribosomal phosphoprotein (P2),accession number M17887,Smith-Waterman Score= 199.
atgaagccgcggatcctggcggtgttacagttcttaaagatggtgtgtccggagtttgttccttcagatgttcagatgtgcccagagtttattccttctggtgggttcacggtcttgctgtcttcaggagtgaagccacagacctttgcagtgagtgttacagctcttaaaggtggcgtgtccagagttgttcgttcttcctggtgggttcgtggtcttgctgacttcaggagtaaagccgcagaccttcacaacgccgcggcgatgcgctacgtcgcctcctacctgctggctgccctcgggggtaactcctcccccagcgccaaggacatcaagaagatcttggacagcgtgggcatcgaggaggattacgaccggctcaacaaggttatcagctctgcagcccctgctgctggttccgcccctgctgcagcagaggagaagaaagatgagaaggaggagtctgaggagtcggacgatgacatgggatttggcctctttgattaa

SEQ ID NO: 27330 - DNA, 585 bp, Homo sapiens
  SIMILAR (101)..(475): 411254mologous to Homo sapiens acidic ribosomal phosphoprotein (P2),accession number M17887,Smith-Waterman Score= 133.
atcccccccccccgccttttcctccctgtcgccaccgaggtcgcacgcgtgagacttctcccgccccctcccccgcagaacgccgcccgcgatgcgctcacgtcgccttcctaccttgcttgggcctcccctaggaagcaaactccctcccccccagcggccaaggacatcaaagaagatcttggaacaacgtgggtatccgaaggcggacgacgaccggcctcaacaaggttatccagtgaagctgaatggaaatatacattgaaagacgtcattgccccaggggtattggcaagcttgcccagtgtaccctgctggtggggctgtagccgtctctgcctgcccccaggctcttgcagccccctgctgcttgggttctgcccctgcttgcagcagaaggagaagaaaagatgaagaagaaggaggaagtcttgaaagagtcagaatgatgaccatgggatttggcccttttgaattaaaatccctgcctcccctgcaaataaaaggccttttttacacatctagataaacaacaaaaagaaaagtcttgcccgtcaaccggccggcaatttagtatagtagtaa

SEQ ID NO: 27331 - DNA, 399 bp, Homo sapiens
  SIMILAR (163)..(273): 861254mologous to Homo sapiens syntaxin 3,accession number U32315,Smith-Waterman Score=147.
atggctggagaatcccaaatagccataggatttcccagtaacaacttctgccgtggattcagggggatggtcgtgggtgaaggaaagaggcttctggtggcattcattgcccatggaattctaagtgttcgagagtgctatatcttggacttagagggtcagaggctgatgaagcttgtgaagaagcagaagcagctgacacaggatgatgatactgatgcggttgagattgctatcgacaacacggcttttatggacgagttcttttctgaggatttaaacaaggaagtgatgggctcagagtgtgttttagaaaattcactccgatggcagtttgtggagggtgcgaaagacctgaaatggaaagaccagcaagccagcgatggagccttgacctga

SEQ ID NO: 27332 - DNA, 398 bp, Homo sapiens
  SIMILAR (62)..(397): 1001254mologous to Homo sapiens syntaxin 3,accession number U32315,Smith-Waterman Score=556.
tgacctctggagctgtgagccggtcacatgctgggatgggtcatctcctctccaaccggtgaagcagctgacacaggatgatgatactgatgcggttgagattgctatcgacaacacggcttttatggacgagttcttttctgagattgaggaaactcggcttaacattgacaagatctcagaacatgtagaggaggctaagaaactctacagtatcattctctctgcaccgattccagagccaaaaaccaaggatgacctagagcagctcacgactgagattaagaaaagggccaacaacgtccggaacaaactgaagagcatggagaagcatattgaagaagatgaggtcaggtcatcggcagaccttcggattcggaaatcccagcactctgtcc

SEQ ID NO: 27333 - DNA, 705 bp, Homo sapiens
  SIMILAR (163)..(273): 831254mologous to Mus musculus syntaxin 3D-1,accession number D29800,Smith-Waterman Score=142.
atggctggagaatcccaaatagccataggatttcccagtaacaacttctgccgtggattcagggggatggtcgtgggtgaaggaaagaggcttctggtggcattcattgcccatggaattctaagtgttcgagagtgctatatcttggacttagagggtcagaggctgatgaagcttgtgaagaagcagaagcagctgacacaggatgatgatactgatgcggttgagattgctatcgacaacacggcttttatggacgagttcttttctgagttctggaggctgaaagtccgagaccaggattccagcatgatcgggttctgcaactcggatggaactagaggccattatcatcagcgaagtaacccaggaatggaaaatcaaataccatatgttttcactttgtcagtaggatgtacttcctctatgttctgggttgtggctgaaccaactttacttggtcaagatcatattttgcattctgatgaagcatctctgggaactggctgtcctgtaaccaatgtaactgcgaagggatatgagtttaattaccctgccactcagtgtgggattcagaaagagccatgtgaagatactggaagaaggcagctgtctacaagccaggaagagggtcctcctcagacatcagatttgccagtggacttcctagcctccagtactgtgagaaatatatcctgtgtttaa

SEQ ID NO: 27334 - DNA, 1449 bp, Homo sapiens
  SIMILAR (326)..(403): 501254mologous to Homo sapiens Light chain of human high molecular weight kininogen analogue,accession number Y93346,Smith- Waterman Score=47.
atggcagagaaggagcgggtaagggatgagaaattacctaatgggttcaagatgaatctcaacaatgagtgtggcctgcagggccctttgggagctgcttctttccaccagctgtcacctgcctatagggttcttcccctagatcttcctgtggcagtatcttcttgcattcagcacatcaccattataaaattatctgtttgtccgttgcttattggtcttcgtcttccaggatgtggcctgatagcagaggcttgtctgtcttgttcactgttttatccccagtatctagaacaacgtgtggacattgaggtgtgtaaatggacacaacccactggtgcacacggccacacacctttacacacaggcccagggatgttcacatggtcaccagagagcccacagggctacatcactggaggcacactagctgcttccagtcccagagaatcactcgacactgagacccagcacccacagcctcagcctcctggaaacacagaagctgggctccgcagactctgggggcgggggcagggagtggaatatggaggccaaggtcatcatgggatttcccatcccagctcaggggaaaggcatggctgtgcctttcatccccagatcagcctatggcgaggctgccgtcttttggacactccgtgaacgtgcccacctgcctgctctggcacatctgacaaggctggaaagagttgccattttcggggagggtctatgtcttcctccatatatccccactgtccctacccacaaccccaacccaattccaccccagttttcctctgattatgaaattggaagctcacttctcaaggacacacattcctacccaaattctgggcttactggggctcagggtgcagcctctgaagtgaagaggcacatggcatcgaggtgccagcaacaagagcacacagggattcttcctcaggtccccctctgggagaatcagcccttccagtccccctgcactgtttggaggcccagtttatgtgatccccgactgacggaaacagatggcagggaaggggacctgtttagaccttggaagcctcccaggcacctcctgatgagcttggtagaaacaggtgcagctatggctttcaggccgtcccagagccacttcccaccagacaccgtttccaggcccatggccaagggcatgttctggaactacaccggaagactctacagaccagatatccctcagagactctgtcagcaagtgagggagagactgcaaagagaaagaagagcagggcaaagacaactggatgtgctggcccggaagaggagcagccacacagggacagagagtggaaacctggagatgaacaacgcagcagagaacagccaccctcccttccctggggtctgggcactacgaggcaaggtggcattaggcatgatttagggcaacccatcttttaa

SEQ ID NO: 27335 - DNA, 328 bp, Homo sapiens
  SIMILAR (322)..(137): 981254mologous to Homo sapiens Human secreted protein, SEQ ID NO: 6403,accession number G02322,Smith-Waterman Score=302.
caaagttgttaatagtttcctccagatgacgacttgttcggctagcatccattgcagctctctgtaattccgtttctgcctgtgaaataacatgtcgatcagatgggtttcgctgacgtgttctttctaactgagttaattgcttagcttctcgattccttgctgtgagtgttgctttgaggtcatcccgtttcattttcacaatggtcccataagttttcaagggttcaactactttggcttcaagtctttcaacctctgcttgtcgataatcctgaagtttggcaaactcatctgcaaagttcatcaggcccagctttactcgtgc

SEQ ID NO: 27336 - DNA, 1155 bp, Homo sapiens
  SIMILAR (469)..(828): 851254mologous to Homo sapiens Human secreted protein, SEQ ID NO: 6403,accession number G02322,Smith-Waterman Score=500.
atggtgatagtgatggatggagaaagggatagaggacagatcctggatatatattttgaacgtagaaccaataggcaggtctataccgcaattgcttcttgcctggaccactacaagagcctctttttggtctcttcctccctcgctccttccagtatgttctccgcacgcagccagagtgatcatgccattgctcttactcaactccagtggctttgtgtcactttcaagacacagcctggtgtctcactgtggcctccaaggccctcacagccaggcccatggctgcctccccatcatcgttacttcatctctcccctgcctgctgtctcaggtcttgaaatccccttctttgggcccccgcaaggtccccggccgtgcgcgaggcagcatgatgaggcgcaccctggaaaaccactaacagcccgagcccagctgcccagggccgcccataatggagggctggggaacgctcaaacgaaacaactgcaaacagctgtttcaaatgtggagaagcattttggagaactgtgccaaattttcgctgcctatgtgcggaaaactgccaggctgagagacaaagcagacctcctggtgaatgaaattaacgcgtatgctggtacagagaccccgcatttaaagctgggcctgatgaactttgcagatgagtttgccaaacttcaggattatcgacaagcagaggttgaaagacttgaagccaaagtagttgaacccttgaaaacttatgggaccattgtgaaaatgaaacgggcagaaacggaattacagagagctgcaatggatgctagccgaacaagtcgtcatctggaggaaactattaacaactttgaaaggcagaaaatgaaggatataaagactatattttctgaatttatcacaatcgaaatgttatttcacggcaaagctttagaggtttacactgctgcctaccagaatatacaaaacattgatgaagatgaagatttagaggaagcaatgaaaaacatggaaaagaaagaatttaaagcacaagaaggaaaagtacgtacagattggcaaggacataaggataaagggttaagaaataattataacagagttgggactgaccaccagatacttttctatgcaaacatatcaggtcctcttgaataa

SEQ ID NO: 27337 - DNA, 278 bp, Homo sapiens
  SIMILAR (1)..(273): 981254mologous to Homo sapiens Human secreted protein, SEQ ID NO: 6403,accession number G02322,Smith-Waterman Score=454.
caactgcaaacagctgtctcaaatgtggagaagcattttggagaactgtgccaaatcttcgctgcctatgtgcggaaaactgccaggctgagagacaaagcagacctcctggtgaatgaaattaacgcgtatgctgctacagagaccccgcatttaaagctgggcctgatgaactttgcagatgagtttgccaaacttcaggattatcgacaagcagaggttgaaagacttgaagccaaagtagttgaacccttgaaaacttatgggaccattaaaaa

SEQ ID NO: 27338 - DNA, 501 bp, Homo sapiens
  SIMILAR (262)..(498): 791254mologous to Homo sapiens envelope protein precursor,accession number AF072506,Smith-Waterman Score=298.
gaatgggggaccccacgagggccatagtttcatcccctcagaatggcaggccaccgaagaaggaaaaatacttatgcctgcagctaaccaatggaaattacttaaaacccttcaccatatctttctcttaggcattaatagcacccatcagatggtcaaattattatttactagaccaggccttttcaaaactatcaagcagatagtcaaggcctgtgaagtgtgccaaagaaataatcccctgcattgcagcccatacatttcaatccctttatctttaacctccttgttaagtttgtctcttccagaatcaaagctgtaaaactacaaatagttcttcaaatggagccccagatgcagtccatgactaagatctaccatggacccctggaccggcctgctagcccatgctccgatgttgatgacatcgaaggcacccctcccgaggaaatctcaactgcacaacccctactacgccccaattcagcaggaagcagttag

SEQ ID NO: 27339 - DNA, 855 bp, Homo sapiens
  SIMILAR (205)..(423): 671254mologous to Homo sapiens Human secreted protein, SEQ ID NO: 6403,accession number G02322,Smith-Waterman Score=228.
atgcgtaagtacccggttgcccctaaaagattgcaagctctgtgggagcggaaactgtgtctcattcatctcctgcaggcactcaggaaggaggaagaaatggatgaagcctcttatgtcctaaggcctgctaagcgcgcacccaggcaccttagagtccccggctttggctcccctgggtcccctggttgtgcgccaggcaagatgttgagatgcacactggaaaaccggaacgctcaaaccaagcaactgcaagcagctgtctcaaatatggagaagcatttgggagaactgtgccaagtctttgctgcctatgtgcggaaaactgccagactgcgagacaaagcagacacagaattacaaagagctgcaatggatgcaacccgaacaagtcatcatctggaggaaactattgacaactttgaaaggcagaaaataaaggctataaagactatattttccaaatttatcacaatcaaaatgttatttcacagcaaagctttagaggtctacacagctgcctaccagaatatacaaaagattgataagcatgaagatttagatttacatgttttcctaaattccctgtatgcaccagattattcatctcgtttagatatgagggggatttggcagggtcatacgacaatagtggagggaagaatcaaagctgtaaaactaccaatcgttcttcaaatggagccccagatgcagtccatgactaagatctgccgtggacacctggactggcctgctagcccttgctctgatattaatgacattgaaggcacccctcccaaggacatctcaactgcacaacccctactacaccccagttcagcaggaagcagttag

SEQ ID NO: 27340 - DNA, 406 bp, Homo sapiens
  SIMILAR (103)..(2): 1001254mologous to Mus musculus brain protein 44-like protein,accession number AF181116,Smith-Waterman Score=186.
agagggcaaatgtcatccgcccactgataatctctggagactttttcatatcattgatggcagcaatgggaagaccccagttggctactgggccccagaagtgtttaaataatcacgtgaaactcgtgagaacaaatcttcgtttccatcttgcaggtttactgggttaattgatggttaacatttaggtattggattgtccaagtgttcctgtaggaatcagcagttcttacagctgagcccagagctagaaagggtatggcagcttcccaaggtccctactggtttccacactacaaccaagtcatctctgattgtcctatttagaacatttaaaaataaaaataagattcacttcttacacaatacattgttaatataattcaaaccctgttagaactattct

SEQ ID NO: 27341 - DNA, 1844 bp, Homo sapiens
  SIMILAR (985)..(1125): 571254mologous to Homo sapiens Human secreted protein, SEQ ID NO: 6252,accession number G02171,Smith-Waterman Score=118.
gaagttagcgggatgtttgcattgaatattctcaagttgatcaggtattctaaattaattttaacttctgagtctccaggaaagctttcagaatttatacttactacccaggtgagaagttgcagcacaatagaagtgaatctttcccaaacttgtggaatattagagttggaacaggccttagaaattccagtgcttcatttgccacatgagaaggctgatatgtgaaccaaacagataacttcagaacctctggataccaaacttgggaagctaaaacagaaatgtcaacttgggaattaaaggaaaatagtaatgcatgagacctggttttgaaaaaaaaggtttagatatttttgtgctccatgttttcctgcatatgtctcccttttctctgccaaactgcttttcacacccggtccttggactctttgagcacttccctgccatataattgactttcagaaattgaatgaagctggaaatgttgaagcaggactggccataagaatctcttaatatctggatagtccagtcacaaagatctttactgtcattcagctgacttttggctcactaaatatagctgaatatcacaaattctaattgtcaaaaccctccctcattttaatttgaactagaaaactagacaaaatttggtaagaataaatttcagcaaactgtagaattatgatctaaaatatctcaaaattttatcccattttactttgaataatgttagaaatatactatgctaggctgtcaagttggatccttttagtactacataagtaagttaataaattacttaaaattgctcctcaagtactttcagagaaagctaacattacccataattttggaaaaattagactgacctaaaagcagctcctctgctccttttcaaatctcctccctggttcagcctgcctgcctccacttctgcctccaccatgtccatcagggtgacccagcagccctacaaggtgttcaacttctggcccctgggccttcagcagctcctcctacatgagcaggcccagtgcccacatcagctccttgattgtctcccaattgggcagcagcagcaccagcttccagggtggcctgggtgccggcatgggtctgccactgcactccagcctggctaacctgtatgtggatttttatagaggttttattcataactgccaaaatttggaagcaaacaagatgtcctttggtaggtgaatggcaaaataaattgtggtacacctggttccaactacacaacgttctggaaaaggcaaaattatggagctagtcgaaagatcggtggttgcaagggttgaggtggggcacagaggatttttagagaggggtcttcccattgctgccatcaatgatatgaaaaagtctccagagattatcagtgggcggatgacatttggtaagaatgcagatttggataattgggccttgtcggccagcccaggtggaagcctgcagtgcaccagggaccaggagcagatactgcaggtgattcgagcaggaacaggccctgataaaaaccaaggcaacagtttggttcagtggacttttctggtactcccgaggagagaatatggagagatagaggccagtaaggtcattcctgctggccaaaacttggccaataggacacacccaaatgagacttcagtttggaagtgtcacaaggaagcaggctctctgtggaacatcccttttgccggtctacctgcagcttctgtgatggagaagcggtggttctttccagcagcagaagtccaggcattaactgggggacagcagcagtgagggcaggttcagtcccacagcatgga

SEQ ID NO: 27342 - DNA, 732 bp, Homo sapiens
  SIMILAR (498)..(268): 511254mologous to Homo sapiens HSPC040 protein,accession number AF125101,Smith-Waterman Score=113.
ttatgggaaaaggaaggtaaaatattttaattacttggtaaggccagcagaggagttggggtttaggaaactctccagctatttcctattaaaaaatagaatggtttagtaaaaaatagcattcaggtgtattttccttagggaagcctaattaataatgaaaatctgtgaactcagcagcaacctgggcaaaggctgtccccttcaaagaccttgttcttcccttttccccattggttaatgccagatgcccgttttaagtccatcctcgtgtttggaataagccgcccctccccctggatgaagctgggcctaacttcatttgttgcgtggcatgcaaaacaagaagcccaagttcccgaaggctgtaaccttgtaaggcaaaatctccatgaatgtcaaaagaatagcaaacagagggcaaaatgtcatccgccccactgaataatctcctggagactatttcatatcattgatggcagcaatgggaagaccccaagttggctactgggccccagaactgctacaaaaaatgatgaggaaaagaatgaatagaggaaaaagttaatacagaactataaacagctgaaatttcccttactttaaataatcacgtgaaactcgtgagaacaaatcttcgttttcatcttgcaggtttactggggtaattgatggttaacatttatgtattggattgtccaagtgtttcctgtaggaatcagcagttcttag

SEQ ID NO: 27343 - DNA, 2457 bp, Homo sapiens
  SIMILAR (304)..(1527): 331254mologous to Mus musculus ankyrin repeat-containing protein Asb-4,accession number AF155355,Smith-Waterman Score=543.
atggccctgcagaatgccctctacaccggggacctggcaaggttgcaggagctgttccccccgcacagcacagccgacctgctgctggagagccgggccgcagagcctcgctggagcagccaccagagggcttgcccaatagcctacaccttggcccaagaacacagtcatgtggagcccagaatagctcctgctggatgcgtggccaggctggtggagaagcccagcagagggtctgaggagcacctcaagtctggcccgggacccatcgtcacccgcacagcctcaggacctgcccttgccttctggcaggcagtgctggctggggacgtgggctgtgtctcccgcatcctcgcggactccagtactggcctggctcctgattccgtctttgataccagcgacccagagcgatggagggatttccgcttcaacatccgtgctctgagactctggtctctgacatacgaagaggagctgaccaccccactgcatgtggcagccagccgtggccacacggaagtcctgcggctgctgctgaggcggcgagcaaggccagacagtgcccctgggggccgcaccgccctgcacgaggcctgtgctgcaggccacactgcctgtgttcatgtgctgctggtggcaggagccgaccccaacatcgctgaccaggatgggaaacgccccctgcatctctgccgggggcctggcacccttgagtgtgcggagctgctcctcaggtttggagcgagagtggatggtcggtccgaggaagaagaggagacccctttgcatgtggccgcccggcttggccatgtggagctggcagatctgcttctaagacggggggcatgtcctgatgcccgcaatgccgaaggctggaccccactgctggctgcctgtgacgtccgctgccagtccatcaccgatgccgaggccaccaccgcccgctgcctgcagctgtgcagcttgctgctttcagctggagcagacgctgatgctgcggaccaggacaagcagcgacccctgcacctggcctgccgccgtggccatgcagctgtcgtggagctgctcctgtcctgtggtgtcagcgccaacaccatggactatgggggacacacgcccctgcactgtgctctgcagggcccagctgcagccctggcccagagccccgagcacgtggttcgggctctgctcaaccatggcgccgtccgtgtctggccaggggccctccccaaggtgctggagcgctggagcacgtgccctcggaccatcgaggtcctgatgaacacctacagtgttgtgcagcttcccgaggaggccgtcggcctggtgactcctgaaactctgcagaaacatcagcgtttctactcctccctcttcgccttggtgaggcagcccaggtcgctgcagcatttgagccgctgtgcgctccgctcccacctggagggcagcctgccccaagcgctgccccgcctccccctgccaccgcgcctgctccgctacctgcagctggattttgagggcgtgagccccgggatctgtgagcagtcacagctgcttggggtccagggatgtgtggaaggcaagagaagggttggggagggccctagccagaaccggcccgtccccgaaccaccagaagcctctgaatccaaacctctccttccagatgtccatggccttttgagagggcctgaaagcagatgccccagcctgcagagggcgcgcctctgcactaactcaggccaggtagccctggcagcaggaggcccagctccgcaggcaggtgtggatgctgcaattcccaatgcagagaagcggaccgacagcggcagccggccgttccagggcctgctgcgttcaggcaccgcgcacgggggcaaggactgccctccaggcccccaccaggtccgcttggcgggtagccggagcgcggcgcacaggaggaagcggcagttgtgcgctgctgccaccagagggcacccgcggccaggcccgacgctgcccaccatgagaggactttctctggccaatgagtggattggagcctctttcgccggccgccttaccaacaccttctgcgcggggctgggtcaggctgtgccctcgatggtggcgctgaccaccgcgctgcccagcttcgcggagccgcccgacgctttctacgggccccaggagctcgccgccgccgctgccgccgccgccgccactgccgcccgaaacaaccccgagccaggcggccgacgcccagagggtgggctggaagctgatgagctgctgccggcccgggagaaagtggcagagcccccaccacctccgcctccgcacttctcagagacttttccaagtctgcccggggtagacaagctacaaggatgggatttccgggggcaccaagatgggggtatgttgaagcagctgtcaattcagcaatggagggcacgttctggcttctaa

SEQ ID NO: 27344 - DNA, 408 bp, Homo sapiens; identical to SEQ ID NO: 20133
  SIMILAR (155)..(406): 941254mologous to Homo sapiens bA346K17.2 (A novel protein similar to the cell division control protein 91 (CDC91, YLR459W or L9122.2) from Yeast),accession number AL118520,Smith-Waterman Score =386.
  misc_feature (1)...(408): n = a,t,c or g

SEQ ID NO: 27345 - DNA, 1255 bp, Homo sapiens
  SIMILAR (1012)..(704): 691254mologous to Homo sapiens bA346K17.2 (A novel protein similar to the cell division control protein 91 (CDC91, YLR459W or L9122.2) from Yeast),accession number AL118520,Smith-Waterman Score =342.
tagacttcataacaaaaaacatttattaagtagccacaatctaacaagccctgctcacctgcctcttctccttcctgtctgggagggggctccttggtgtgcagagccacaaggtgggggtccaagttggggagctcccagttcttccccataggccttgctgtcagtcagccatgggtcccttttggtaccagagacttgtgaccctggactcgaacctcttctgcccaagcactcgcttgcttggcaaacttctgggcttggaggctttggccccagcttctggccccacagccccctgaggtccatgcagccctgtgccagccaggcctacttgagcacgagcatggcctctgtgccatccttggcggtcaagtagaggccatgtgtgaggtagtactcccgccgcaggaaggcatagaagtaatcagagatgagcaggatctgcccaacgttgaaggtcagtgtgatgccttaaaagaaattagagttggcacttcctgcataaatccagaggtgccacaggacagggaagagcagggaacagacgatgatgatgcaggtgaggacaaagatgtttctcaggaatctgtagagatggttccacacggggaagaaggccatgtagagcgccacgtcccccactgtcgggtaggacttaaagatggcgatgacagcgatctggataaacatgaagaagatggggtgctcctttagctttatggctaaggggatggtgtagaagaagacgttgatctgaaacacacatacaaagaagaggctgaagtgctcaaacatctctgcaaagaagtaccagaaaatgaccaatgtttggagtgagatctggaacagaaagtataaagccatagactgcggggatgaaatcccaagagctgagaaggaagaaggagaggcaaatgattaccactaggcttcccacatacatcatggcatactcccaagaaaagatccagaaggctttgctcttcattttcacaggtatgtactgccgggggtaatttcccctagtgtctgctactgtctttgaaagaaaataaaggcctcaaaccatccaagggaatccaaggctttaggaatcccaagcaaaaggaagatgggaactagaaacttcccagactgcaccatgagcatctcggtaagcctcgcctggtctccctcgaagccttacagcttcagcttctcggtcctgtgcactcggctttccttcactggagcctcctgcccctgagcatgt

SEQ ID NO: 27346 - DNA, 1737 bp, Homo sapiens
  SIMILAR (7)..(543): 991254mologous to Homo sapiens bA346K17.2 (A novel protein similar to the cell division control protein 91 (CDC91, YLR459W or L9122.2) from Yeast),accession number AL118520,Smith-Waterman Score =877.
tttcgtatggcggctcccttggtcctggtgctggtggtggctgtgacagtgcgggcggccttgttccgctccagtctggccgagttcatttccgagcgggtggaggtggtgtccccactgagctcttggaagagagtggttgaaggcctttcactgttggacttgggagtatctccgtattctggagcagtatttcatgaaactccattaataatatacctctttcatttcctaattgactatgctgaattggtgtttatgataactgatgcactcactgctattgccctgtattttgcaatccaggacttcaataaagttgtgtttaaaaagcagaaactcctcctagaactggaccagtatgccccagatgtggccgaactcatccggacccctatggaaatgcgttacatccctttgaaagtggccctgttctatctcttaaatccttacacgattttgtcttgtgttgccaagtctacctgtgccatcaacaacaccctcattgctttcttcattttgactacgataaaaggtaaggccctgcccaacgttgaaggtcagtgtgatggcataaaagaaattagagttggcacttcctgcataaatccagaggtgccacaggacagggaagagcagggaacagacgatgatgatgcaggtgaggacaaagatgtttctcaggatgtgggtctccatggtgccacagtcctgggtcttaggaacacgttttccattctccttaactggtgtcttaggacccctgcctcgctcttcaaacattcccaactctcccttcatcttagtttctgctgagaccccccaaggcatattctctgggccgattgccacgtagaggagcaggaccagcagcagcctggactgtgacaccaggtggtcccaagcgagctcacacttctgctgggaatgtggtctataaaggagctggaggagatagaggagtcctgggacaaacaaggtgagtgggtacagagactggtatgtcgctaaggcaagaaaaatagcactgaggaaagcactgcatctgtagagatggttccacacggggaagaaggccatgtagagcgccacgtcccccactgtcgggtaggacttaaagatggcgatgacagcgatctggataaacatgaagaagatggggtgctccataaagccatagactgcggggatgaaatcccaagagctgagaaggaagaaggagaggcaaatgattaccactaggcttcccacatacatcatggcatactcccaagaaaagatccagaaggctttgctcttcattttcacaggtatgtactgccgcatttccgaccgatccggtagccccgcgtagcgaacacttagcgagtcctgtgcctttctgcgcctgcgcaaaggtttcctgatgtaagaggtggcctcccatggccttgggcaacactgcccttggggctttgcagggtatagccccccaccggctgctttcatgggctggcgttgagtgtctatggcttttccagtctcatgctgcaagctgttggtggatctaccattctggggtctagaggacggttgccctcttctcacagctccactaggcagtgccccagtagggactctgtatgggcctccaacttcacatttcccctccacactgaccatttccgaccgatccggtagccccgcgtagcgaacacttagcgagtcctgtgcctttctgcgcctgcgcaaaggttt

SEQ ID NO: 27347 - DNA, 867 bp, Homo sapiens
  SIMILAR (496)..(798): 1001254mologous to Homo sapiens immunoglobulin variable chain lambda,accession number X14615,Smith-Waterman Score=543.
atgcatgcagaaaaagcacttggcaaaatccagcatcacttcatggttaaaagcctttgcaaaattgacatagaagagacataccttatggtttctcccctgaagttgctttctcagcaccagcccccaggagcaggttcaccttctgtgcccagagtggggcttgcacagctgagtggagaaggccagatttacaagaatgtcctgtgtctgcccatgttgctaagaactgatgggacgttcaccagggagagcatcccttggcagaaagggggccatgggcatccttgtcctgtatgggagacactgctcagcctgggggaacctctgttcatgaaggtatcctggagggaagagctccctatcgacccagcactgcagaatccacagaggaaggacagctctggccaccagggagcagccacacgagaggagaggacccggtgtccccacagaccaagaatcactgtgtctgtgtctctcctgcttccacggtcctgggcccagtctgtgttgacgcagccgccttcagtgtctgcggccccaggacagaaggtcaccatctcctgctctggaagcagctccgacatggggaattatgcggtatcctggtaccagcagctcccaggaacagcccccaaactcctcatctatgaaaataataagcgaccctcagggattcctgaccgattctctggctccaagtctggcacctcagccaccctgggcatcactggcctctggcctgaggacgaggccgattattactgcttagcatgggataccagcccgagagcttgcacagtgctccaggccaatggggaactgagacaagaacccccttcctcctccgccaggaggaaataa

SEQ ID NO: 27348 - DNA, 452 bp, Homo sapiens; identical to SEQ ID NO: 4972
  SIMILAR (23)..(211): 961254mologous to Homo sapiens MSTP030,accession number AF113210,Smith-Waterman Score=321.
  misc_feature (1)...(452): n = a,t,c or g

SEQ ID NO: 27349 - DNA, 428 bp, Homo sapiens
  SIMILAR (3)..(428): 771254mologous to Homo sapiens ribosomal protein L5,accession number U14966,Smith-Waterman Score=527.
  misc_feature (1)...(428): n = a,t,c or g
ccctgacaaattatgctgcagcgtattgtactggcctgctgctggcccgcaggcttctcaataggttaggcatggacaagatctatgaaggccaagtggaggtgnctggcaatgaatacaatgtggaaagcattgacggtcagccaggtgcctttacctgctatttggtcgcagaccttgccagaactaccactggcaataaagtgtttggtgccccggagggagctgtggatggaggtttgtctaaccctcacagtagcaaacgattccttggtttgtctatccctcacagtaccaaatgaatccttggttatgattctgaaaacaaggaatttaatgcagaagtacgccggaagcacatcatgggccagaagtttgcagatgacctgcactgcttaatagaagaagatgaaaatgcttccaaaaaa

SEQ ID NO: 27350 - DNA, 431 bp, Homo sapiens
  SIMILAR (214)..(2): 1001254mologous to Homo sapiens dJ924G13.1 (KIAA1221 (putative zinc finger protein)),accession number AL136109,Smith- Waterman Score=364.
gtataaatagactagactggcctccacttaaggcgttttcagatttgtcctttgacagttcttcaggcagagtcaacgtattatttttctgaaatgatgtttgacaatcttttggcttatgaactccgctctctttgtctgagataaaattgttgtcatctaggagttcttctttagcaccagtaatatcggtgtttatcttcaaatcatccatattgttggcaagcccatttaacacatttagtctagattttgtcttattaacatcttgctgcaagaacgatctcatccaaaattaaatcaaacagtttggtgccgtgtgcgtcaaaccggggcgacgttgggagcacgcggcgtccccgcgtcacacgccgctctgtacgctactcggctccagcggcccccctccgctccccgcttttcgcacgaaa

SEQ ID NO: 27351 - DNA, 1950 bp, Homo sapiens
  SIMILAR (1)..(1194): 971254mologous to Plasmid R100 transposase of Tn10,accession number AP000342,Smith-Waterman Score=2041.
atgtgcgaactcgatattgtacacgactctgtttaccaatactgccccgaattacacttaatacgactcaacagcttaacgttggctggccacgccttactggactgtacaactctcactcttaccgaacttggccgtaacctgccaaccaaagcgagaacaaaacataacatcaaacgaatcgaccgattgttaggtaatcgtcacctccacaaagagcgactcgctgtataccgttggcatgctagctttatctgttcgggcaatacgatgcccattgtacttgttgactggtctgatatccgtgagcaaaaacggcttatggtattgcgagcttcagtcgcactacacggtcgttctgttactctttatgagaaagcgttcccgctttcagagcaatgttcaaagaaagctcatgaccaatttctagccgaccttgcgagcattctaccgagtaacaccacaccgctcattgtcagtgatgctggctttaaagtgccatggtataaatccgttgagaagctgggttggtactggttaagtcgagtaagaggaaaagtacaatatgcagacctaggagcggaaaactggaaacctatcagcaacttacatgatatgtcatctagtcactcaaagactttaggctataagaggctgactaaaagcaatccaatctcatgccaaattctattgtataaatctcgctctaaaggccgaaaaaatcagcgctcgacacggactcattgtcaccacccgtcacctaaaatctactcagcgtcggcaaaggagccatggattctagcaactaacttacctgttgaaattcgaacaccccaacaacttgttaatatctattcgaagcgaatgcagattgaagaaaccttccgagacttgaaaagtcctgcctacggactaggcctacgccatagccgaacgagcagctcagagcgttttgatatcatgctgctaatcgccctgatgcttcaactaacatgttggcttgcgggcgttcatgctcagaaacaaggttgggacaagcacttccaggctaacacagtcagaaatcgaaacgtactctcaacagttcgcttaggcatggaagttttgcggcattctggctacacaataacaagggaagactcactcgtggctgcaaccctgcttactcaaaatctattcacacatgccccggttcccacggcgcaggcgcgctgctttcccgcctctgccgggctgcgggccgcgggggtggccagcgaggagctcccgggaagcttcgcgctggtggagcgtctgggccaattagacaaacgagggcagcggaaacagtgcaccactgttctcgggtgccagaaaccaaacaaggatgatagttcgtggaacaaacagagtatcatttgtcagattgcttatgcccgtacagagggggatatgatagtctgcacagcatatgtacacgaactgccaaaatatggtgtgaaggttgacctgacaaattatgctgcagcgtattgtactggcctgctgctggaccgcaggcttctcaataggtttgacatggacaagatctatgaaggccaagtggaggcaactggcgatgactacaatgtggtaagcattgatggtcagccagaagtacacaggaagcacatcatgggccacaatgttgcagattacatgtgctacttaatggaagaagatgaagatggttacaagaaacagttctctcaatacatgaagaacagtgtaactccagacatgatggaagagatgtgtaagaaagctcatgctgctatacgagagagtccagtctgtgaaaagaagcccaagaaagaagttaaaaagaagaagtggaaccgacccaaaatgtcccttgctcagaagaaagattgggtagctcaaaagaaggcaagcttcctcagagctcaggagcgggctgctgagagctaa

SEQ ID NO: 27352 - DNA, 990 bp, Homo sapiens
  SIMILAR (643)..(987): 851254mologous to Homo sapiens MSTP030,accession number AF113210,Smith-Waterman Score=493.
atggtaaaaccctatctctactaccgaaagaaaaaaaaaaaaaatcagccaggcatgatggcatgcacctgtagttccagtcccgccgctgccacagcccagaggcccgaaacccactcgggtcccagcgaatctgaccaaataacccctgaaactcacagtttggtgccgtgtgcgtcaaaccggggcgacgttgggagcacgcggcgtccccgcgtcacacgccgctctgtacgctactcggctccagcggcccccctccgctccccgcttttcgcctccagccccggttcccacggcgcaggcgcgctgctttcccgcctctgccgggctgcgggccgcgggggtggccagcgaggagctcccgggaagcttcgcgctggtggagcgtctgggccaattagacaaacgagggcagcggaaacagtgcaccactgttctcgggtgccagaaaccaaacaagagggggatatgatagtctgcacagcatatgtacacgaactgccaaaatatggtgtgaaggttgacctgacaaattatgctgcagcgtattgtactggcctgctgctggaccgcaggcttctcaataggtttgacatggacaagatctatgaaggccaagtggaggcaactggcgatgactacaatgtggtaagcattgatggtcagccagaagtacacaggaagcacatcatgggccacaatgttgcagattacatgtgctacttaatggaagaagatgaagatggttacaagaaacagttctctcaatacatgaagaacagtgtaactccagacatgatggaagagatgtgtaagaaagctcatgctgctatacgagagagtccagtctgtgaaaagaagcccaagaaagaagttaaaaagaagaagtggaaccgacccaaaatgtcccttgctcagaagaaagattgggtagctcaaaagaaggcaagcttcctcagagctcaggagcgggctgctgagagctaa

SEQ ID NO: 27353 - DNA, 1954 bp, Homo sapiens
  SIMILAR (218)..(337): 951254mologous to Homo sapiens Misshapen/NIK-related kinase MINK-1,accession number AB035698,Smith-Waterman Score=197.
  misc_feature (1)...(1954): n = a,t,c or g
gagagaacaaggatgaacaagcagcataactctaccttggccaagagcaggccaggcaacacggggcctgagcccctcatgccccaggcctccccagggcccccaggacccctttcccagactcctcctatgcataggccggtggagccccaggagggaccgcacaagagcctggcggcacaccgggtcccactgaagccatatgcagcacctgtaccccgatccacagtccctgcaggaccagcccacccgaaacctggctgccttcccagcctcccatgaccccgaccctgccatccccgcacccactgccacgcccagtgcccgaggagctgtataagaaagctcatgctgctatacgagagaatccagtctatgaaaagaagcccaagaaagaagttaaaaagaagaggtatgtcgtctttttttttgtcttttcaagaaaacggttgggaatggttcccacgtggggcagactgttggtgtaattgtgcaaactcgatcactagctctgcgtgatgtggcagaagcgaagggaaccaggtttgcaaaagtaactgtggggatggaatgtgttacctcagacataacggaggnggttctttctatcttagtacagtctaagtactggttactgcatttttttattggctgacaagttgctttttgttgaattttcatgttttgaatctttaaatggaatagaaagtaataattaatgaacatgtaagcataaagtgatgtgatggcccacaaatacaatgtatagtaattaaatcaatgtatttaacatatcacctcaaatacttaacactttgtggcaacaacatttgaaatttattctcttaattgtgaaatgtacgatattctatattcatcatgctgcgcaatagaactaaaaacaaaatcatactcctccctactcctcctgttggagattttatacttgactatcatctgcccattctttgcacccaccagcctctgtaaccaccattctgctctctgcttctgtgagttccattgttttagattctatatgaatatgaagtatttgtctttttgtgcctggcttatttncactgagcacaatattctccaattcattcatgttgcaaatgacagaatttccatcatttttaaagactgggtaataatccattatgtatatgtataccacatttcctttatccatttatctgttgctattaatatatagtgctgcaatgaacatgggagtgccactctcttggacaaactgatttcaaaacatttgggcaaatacctagaagtggtattactgaatctaacatgtcttctatttgacttttggccctatggtagtaggacatcacagaagttggggtttgggaaagttagcttaagatcatacataagtaaatgtatttgaacttggattatttaaccttctgattgcaaagtcttaaatattctctatcaaaattaaattttattaaaattttaaattaaatattctattctcttcagttatagtttaaaaaatatatattcctatcttttgtaggtggaaccgtcccaaaatgtcccttgctcagaagaaggatcgggtagctcaaaagaaggcaagcttcctcagagctcaggagcggggctgctgagaagctaaacccagcaattttctataaagatttttcagatatagataataaacttattgaacagccnnnnnnnnnnnnggggggggccctttaaaaagatccctgggggggcccaattttaccggggcttgcaaggttatagctctctccttatggggagccttattatatcctatctggggatttttgggaaggacccttactttgggggggggacatcttggtccaaccttcctcgggagattaatcgcttaggggaatcctaaatttttaaaggggttagggggataatatattgattttttctggggggg

SEQ ID NO: 27354 - DNA, 614 bp, Homo sapiens
  SIMILAR (309)..(614): 351254mologous to Homo sapiens inhibitor of apoptosis protein KIAP,accession number AF301009,Smith-Waterman Score=86.
catcctatcccgtgtggtggaattcccgctgactgctgaggtgccacccgagctgctggctgctgccggcttcttccacacaggccatcaggacaaggtgaggtgcttcttctgctatgggggcctgcagagctggaagcgcggggacgacccctggacggagcatgccaagtggttccccagctgtcagttcctgctccggtcaaaaggaagagactttgtccacagtgtgcaggagactcactcccagctgctgggctcttgggacccgtgggaagaaccggaagacgcagcccctgtggccccctccgtccctgcctctgggtaccctgagctgcccacacccaggagagaggtccagtctgaaagtgcccaggagccaggaggggtcagtccagccgaggcccagagggcgtggtgggttcttgagcccccaggagccagggatgtggaggcgcagctgcggcggctgcaggaggagaggacgtgcaaggtgtgcctggaccgcgccgtgtccatcgtctttgtgccgtgcggccacctggtctgtggctgagtgtgcccccggcctgcagctgtgccccatctggcagaagcccccgtcccgcagccgg

SEQ ID NO: 27355 - DNA, 444 bp, Homo sapiens
  SIMILAR (15)..(89): 1001254mologous to Homo sapiens 31-JUL-1998 DNA encoding a human inhibitor of apoptosis protein (HIAP3),accession number Z61210_cd1,Smith-Waterman Score=131.
  misc_feature (1)...(444): n = a,t,c or g
gtactgtcctgtattgtgcccccggcctgcagctgtgccccatctgcagagcccccgtccgcagccgcgtgcgcaccttcctgtcctaggccaggtgccatgggcggccaggtgggctgcagagtgggctccctgcccctctctgcctgttctggactgtgttctgggcctgctgaggatggcagagctggtgtccatccagcactgaccagccctgattccccgaccaccgcccagggtggagaaggaggcccttgcttggcgtgggggatggcttaactgtacctgtttggatgcttctgaatagaaataaagtgggttttccctggaggtaannnnnnnnnnnnnnnnnnnnnnnnnnnnnnnnnnnnnnnnnnnnnnnanannnnggggcgccgctatagataaaaagggcccattaaaccccgttaaacaacctcgggg

SEQ ID NO: 27356 - DNA, 1809 bp, Homo sapiens
  SIMILAR (1)..(1806): 1001254mologous to Homo sapiens neuronal acetylcholine receptor alpha-4 subunit,accession number X89741,Smith-Waterman Score=3225.
gccagcagccatgtggagacccgggcccacgccgaggagcggctcctgaagaaactcttctccggttacaacaagtggtcccgacccgtggccaacatctcggacgtggtcctcgtccgcttcggcctgtccatcgctcagctcattgacgtggatgagaagaaccagatgatgaccacgaacgtatgggtgaagcaggagtggcacgactacaagctgcgctgggacccagctgactatgagaatgtcacctccatccgcatcccctccgagctcatctggcggccggacatcgtcctctacaacaatgctgacggggacttcgcggtcacccacctgaccaaggcccacctgttccatgacgggcgggtgcagtggactcccccggccatttacaagagctcctgcagcatcgacgtcaccttcttccccttcgaccagcagaactgcaccatgaaattcggctcctggacctacgacaaggccaagatcgacctggtgaacatgcacagccgcgtggaccagctggacttctgggagagtggcgagtgggtcatcgtggatgccgtgggcacctacaacaccaggaagtacgagtgctgtgccgagatctacccggacatcacctatgccttcgtcatccggcggctgccgctcttctacaccatcaacctcatcatcccctgcctgctcatctcctgcctcaccgtgctggtcttctacctgccctccgagtgtggcgagaagatcacgctgtgcatctccgtgctgctgtcgctcaccgtcttcctgctgctcatcaccgagatcatcccgtccacctcactggtcatcccactcatcggcgagtacctgctgttcaccatgatcttcgtcaccctgtccatcgtcatcacggtcttcgtgctcaacgtgcaccaccgctcgccacgcacgcacaccatgcccacctgggtacgcagggtcttcctggacatcgtgccacgcctgctcctcatgaagcggccgtccgtggtcaaggacaattgccggcggctcatcgagtccatgcataagatggccagtgccccgcgcttctggcccgagccagaaggggagccccctgccacgagcggcacccagagcctgcaccctccctcaccgtccttctgcgtccccctggatgtgccggctgagcctgggccttcctgcaagtcaccctccgaccagctccctcctcagcagcccctggaagctgagaaagccagcccccacccctcgcctggaccctgccgcccgccccacggcacccaggcaccagggctggccaaagccaggtccctcagcgtccagcacatgtccagccctggcgaagcggtggaaggcggcgtccggtgccggtctcggagcatccagtactgtgttccccgagacgatgccgcccccgaggcagatggccaggctgccggcgccctggcctctcgcaacacccactcggctgagctcccacccccagaccagccctctccgtgcaaatgcacatgcaagaaggagccctcttcggtgtccccgagtgccacggtcaagacccgcagcaccaaagcaccgcccccgcacctgcccctgtcgccggccctgacccgggcggtggagggcgtccagtacattgcagaccacctgaaggccgaagacacagacttctcggtgaaggaggactggaagtacgtggccatggtcatcgaccgcatcttcctctggatgttcatcatcgtctgcctgctggggacggtgggcctcttcctgccgccctggctggctggcatgatctag

SEQ ID NO: 27357 - DNA, 3782 bp, Homo sapiens
  SIMILAR (2200)..(2568): 951254mologous to Homo sapiens livin inhibitor-of- apotosis,accession number AF311388,Smith-Waterman Score=641.
  misc_feature (1)...(3782): n = a,t,c or g
atgcggagggggcggggtcgaggctgcggcgcgtgtggagcgggcggagcgggggcgggggccaagcgcggggcacccgggggcctcctgtataggcgggcaccaatgggctcctgctccggccgctgcgcgctcgtcgtcctttgcgcttttcagctggtgagtggcgacccctccgcgagcctcctggagcccccggtgcccgacccacggcggctgtggggtcccgaagcgtccctccgccccggggcccgttcgctgggtcccgcgccagctccgaggggggatgcctcggaccccgggctgctacggccgaaggtggcgtcgcctgcggggcgtggggagtcgcggcgccgggtcccgtccccggtgtgcgtgcgcggggggcggccgcgggtcggagcggcggggacagccagcagccatgtggagacccgggcccacgccgaggagcggctcctgaagaaactcttctccggttacaacaagtggtcccgacccgtggccaacatctcggacgtggtcctcgtccgcttcggcctgtccatcgctcagctcattgacgtgtggagatgtggtcctgtggttgtggtcctgtgggaatgtggtcctgtggagacgtggtcctgtggggacacggtccgtggagacgtggtcctgtgggaatgtggtcctgtggggatgtggttctgtggggacgtggtccgtggagatgtggtcctgtgggttgtggtcctgtggggacgtggttctgtggggatgtggtccatggagatgtggtcggatgagaagaaccagatgatgaccacgaacgtatgggtgaagcagcgagccgttcaggactctctgtccgcctgcagcccccgccttccctggtacctccgcagagacccaagaggcgtccagaggggagcccaggcgcacggtccccagggaggggccccgccctcaggcccaggcttccacagggtcaagcggtctcaagccggcggctctccctggtggattcctgcagatgtagggcacagccgctggggtgatagtgggagacggaaaggttggctgagaggcctgattccttccacgcatcacaacctgaaaatcgccaaaggtcttccttgttggggaggagtgaatggcagcaccggaagccaaggcccctcaccaccaagaagccagcagctcatccccaccttctggaccaaagacacgaagcagagaccaagccgagccaaggtcactgacacagaaaagccctttgtcccagccagctggccgcctgctaatgacatccagcctgcaccttccaaggccacctctgcatccagaaaggacagtggcggctccagccggggaggaacaagggccacagcttccctggggtcaggggtggggagggtcaccttgccctctcccgtgttccccagccagacccccagtagagaggagacccctgcagttgtggatgtggctttccccagtgtccacgagacccctggagcctggcccctctgggcccgtagaagctcccatgagattctgatgcacagcgagggcctgagccctgggccagctcttgggggcagccctgggctcccatcgtttaatttgcttcctccgcgctggaagcccacgtttggtgatgtatgtgttatgatggccacgtgtccttcccccatcagcgacggggtctggggaggccggggaggctcctcattacgctcccagcacaaagcccaatcacagacatcgcacacggatacactagaccctgcctgcggggagagtggctgccagccggggcacccagacgtccctgcgtgccctgtgctggcgcaaggcagctcttccgtgcctccgtggtgcctgcgtctcattaaacgcagcaaacgtcttctggacgtgccgccagtcccacagaaaaccaaagcaaggcagactcaccgctcctgcatcccggagctcagagtgggacgaacaacgcccagtgctcagtgtgatattagaagagcccaagacagtggagggctcagcacagatgccgccatccgtccgcagaatcgcgctgagagcagctccttcaagggagcccgggacgtcccggggaagccaccctcagtgactggccccagacaaaggctgaacgggccgggctgggctgagggacactgccggggactcggagccagtgttccctccatgggacctaaagacagtgccaagtgcctgcaccgtggaccacagccgagccactgggcagccggtgatggtcccacgcaggagcgctgtggaccccgctctctgggcagccctgtcctaggcctggacacctgcagagcctgggaccacgtggatgggcagatcctgggccagctgcggcccctgacagaggaggaagaggaggagggcgccggggccaccttgtccagggggcctgccttccccggcatgggctctgaggagttgcgtctggcctccttctatgactggccgctgactgctgaggtgccacccgagctgctggctgctgccggcttcttccacacagctgcagaccatgtggtcagacctgagttcaggtcccagctctgccacttcctggctgaaggacagggcagcagggcccaccgagggctttacaaatactggcacagccatggtcattgtcagcagtgggctctggcggggcaccatcctggccatcaggacaaggtgaggtgcttcttctgctatgggggcctgcagagctggaagcgcggggacgacccctggacggagcatgccaagtggttccccaggtaccggctgcccctgcggggccccgggtctgatcatggctgtcagttcctgctccggtcaaaaggaagagactttgtccacagtgtgcaggagactcactcccagctgctgggctcctgggacccgtgggaagaaccggaagacgcagcccctgtggccccctccggagccagggatgtggaggcgcagctgcggcggctgcaggaggagaggacgtgcaaggtgtgcctggaccgcgccgtgtccatcgtctttgtgccgtgcggccacctggtctgtgctgagtgtgcccccggcctgcagctgtgccccatctgcagagcccccgtccgcagccgcgtgcgcaccttcctgtcctaggccaggtgccatggccggcgcgggtgggctgcagagtgggctccctgcccctctctgcctgttctggactgtgttctgggcctgctgaggatggcagagctggtgtccatccagcactgaccagccctgattccccgaccaccgcccagggtggagaaggaggcccttgcttggcgtgggggatggcttaactgtacctgtttggatgcttctgaatagaaataaagtgggttttccctggaggtactgaacctgaatgaatgcttatgaataaaaataaagaggaatttacctgaaagtgcggggcccttttattttaaagggccccttaaaacccctttaaaccccccgggggggttttttttggccccccccnnnnnnnnnnnnnnnnnnnnngggtttttttttggcnnnnnnnnnnncccccccctgtttttttttnnnnnnnnnngaaaaaatcgcccccttttcggggagggggttttcttttattttatgggggtncccccattttnttnaaaaaannnnnnnnnnnnnnnnnnntcataatnatttcatattcaaccatattatcaataacaaataaataaatntcttncctttttanaatcaatataatatcg

SEQ ID NO: 27358 - DNA, 452 bp, Homo sapiens; identical to SEQ ID NO: 26567
  SIMILAR (283)..(191): 701254mologous to Homo sapiens Human secreted protein, SEQ ID NO: 5576,accession number G01495,Smith-Waterman Score=118.
  misc_feature (1)...(452): n = a,t,c or g

SEQ ID NO: 27359 - DNA, 427 bp, Homo sapiens
  SIMILAR (50)..(385): 671254mologous to Homo sapiens neutral protease large subunit,accession number M27826,Smith-Waterman Score=368.
aactggtagttttgaaatagcaaaggatgtgcttgatttgttctgcagccccttcttaatcaatacggaggctaaccactccacattaccttcttttcaagggcctgtttcccttccctccataactgttgtgagtattgacagccaggcttctaaacctcttaaaactccccaactctggtgccaacttagacaatactcttttaagcactcctttttagttgtccccacctgcccagttcccttattaggctgagacactttaactaaattatctgcttccctgactattcctggactacagccacatctcattgccacccaccttaacccacaagtagaagatacctctattccctccttggcaacctatcatgcaccccttaccatctcattaaaacctaatcactcttacccctctcaatgc

SEQ ID NO: 27360 - DNA, 377 bp, Homo sapiens
  SIMILAR (212)..(343): 421254mologous to Human T-cell lymphotropic virus type 1 Gag,accession number S74562,Smith-Waterman Score=109.
agacaaaagagacacattttatccgtggacccaaaactccggcgccagtcacggactgggaaggcagccttcccttggtgtttaatcattggagggacgcctctctgattatacacccacgtttcaagggtgtcagaccacgcagggacgcctgccttggtccttcacccttagcggcaagtcccgcttttctggggaaggggcaagagcttgctacaagtgccagaaatctgaccaccaaggcaaggaacgcctgcagcccaggattcctcttaagccgtatcccatctgtgcgggaccccactggaaatcggactgttcaactcacctggcagccactcccagagcccctggaactctggcccaaggctctctga

SEQ ID NO: 27361 - DNA, 184 bp, Homo sapiens
  SIMILAR (1)..(132): 541254mologous to Bovine leukemia virus gag,accession number K02120,Smith-Waterman Score=140.
atgcccgaaccgcagcggccaggcgttcctccagaacctcctcccccaggagcttgctacgcgtgccggaaatctggccactgggccaaggaatgcccgcagcccgggattcctcctaagccgcgtcccatctccccctggaccatcacggacgccgagcttcgggtaactctcacagtggaag

SEQ ID NO: 27362 - DNA, 381 bp, Homo sapiens; identical to SEQ ID NO: 12907
  SIMILAR (87)..(146): 501254mologous to Homo sapiens Human secreted protein, SEQ ID NO: 5576,accession number G01495,Smith-Waterman Score=64.

SEQ ID NO: 27363 - DNA, 437 bp, Homo sapiens; identical to SEQ ID NO: 442
  SIMILAR (315)..(434): 401254mologous to Simian T-cell leukemia virus gag,accession number Y07616,Smith-Waterman Score=100.
  misc_feature (1)...(437): n = a,t,c or g

SEQ ID NO: 27364 - DNA, 1485 bp, Homo sapiens; identical to SEQ ID NO: 245
  SIMILAR (784)..(933): 761254mologous to Homo sapiens calbindin D28K,accession number S46006,Smith-Waterman Score=195.

SEQ ID NO: 27365 - DNA, 3762 bp, Homo sapiens
  SIMILAR (1969)..(3162): 341254mologous to Baboon endogenous virus strain M7 gag-pol precursor polyprotein,accession number D10032,Smith-Waterman Score= 597.
atggtggcagctgctcacaaaatggctgcaagccctttgttctctgacctggggttcttggcctcatggattccaaggaatggaaccttgggccatgcgtgtacaatggcccctgcttttgctaggatgtctctccctaacaaaggatttgggctttcaggcataattagaaaagcatgtgaagacagcaaagttctccagtcacaacttagtggctgggagaagtatctagtgactgcctgtcgtgggacgcctcagatagtgacagatctggaggacagttgtccaagacaaaagaagacaaaggagacacgttttatccatggacccaaaactccggcaccggtcacggactgggaaggcagccttcccttggtgtttaatcattgcagggatgcctctctgattatacactcacgtttcaagggtgtcagaccacacagggacacctgccttggtccttcacccttagcggcaagtcccgcttttctggggaagggacaagctgctcattgccaggccgagctaagtcccaattcttcctcagcctccactcctccaccctataatccttctatcacctcccctcctcacacccggtccggcttacagtttagttccgcgactagctcttccccacctgcccaacaatttcctcttagagaggtggctggagctgaaggcatagtcagggtacatgtacctttttctctatcagacctttctcagatcagtcaatgtttaggctctttctcatcagaccccactaaatatacacaggaattccaatgtctaactctgtcctacaacttaacctggagtgacttaaatgtcatcctgacttctaccctctccccagatgaatgggaaagagtttcttctctagcccaatctcatgctgataaccgccggcttcacgagccagacctccaggaaggcattagagcagttccccgagaggatccccaatggaaccatcaggcaaattccccaggtatagctaggcgagattacatggtttcctgcctagttgaagggcttaaaaaagcagcttacaaagctgttaattatgacaaacttaaagaaactacccaaggtgaagatgaaaacccagcccaggtcgtggcccgcttagcagcaacccttagacgctttaccgccctagacccagaggggccagaaggccgccttattctcaatatgcattttatcacccagtcagctcctgacattacaaaaaaacttcaaaaattagaatctggccctcaaaccccacaacaggaattaatcaacctcaccttcaaggtgcacaataatagggaggaagcagccagacggcaatgcatttctgagttacagttacttgcccctactcatgggcttctaaaacctataaactctccttacaattcccccattttacctgtccaaaaaccggataagtcttacagattagttcaggatctgcgtcttatcaaccaaattgttttgcctatccaccctgtggtgcccaacccgtacactcttttgtcctcaataccttcctccacaactcactattccatgcttgatcttaaagatgcttttttcactattcccctgcacccctcgtcccagcctctctttgctttcacctggactgaccctgacacccatcagtcccagcagcttacctgggctgtgctgccgcagggtttcagggacagccctcattacttcagccaagctctttctcatgatctactttccttccacccctccgcttctcaccttattcaatatattgatgaccttcttctttgtagcccctcctttgaatcttctcaacaagacacacttctgctccttcagtgtttattctccaaaggatatcgggtatccccctccaaagctcaaatttcttctccatccgttacctacctcggcataattcttcataagaacacacatgctctccctgccgatcgctggccatcatgtctccgtgcagccgctgctgctgccctaatacttgtagaggccctcaaaatcacaaactatgctcaactcactctctacagctctcataatttccaaaatctattttcttcctcacacctgacacatatactttctgctccccggctccttctgctatactcactctttgttgagtctcccacaattaccattgttcctggcctggacttaaatgcggcctcccacattattccggataccacacctgaccctcatgactgcatctctctgatccacctgacattcacatttccccaaatttccttcttccctgtttctcaccctgatcacacttggtttattgatggcagttccaccaggcctaatcaccactcaccagcaaaggcaggctatgctatagtatcttccacatctatcattgaggctaccgctctgcctccctccactacctctcagcaagccgaactagttaccttaactcaagccctcactcttgcaaaaggactacgcatcaatatctatactgattctaaatatgcctttcatattctgcagcaccatgcagtcatatgggctgaaagaggtttcctcactacacaagggtcctccatcattaatgcctctttaataaaaactctgctcaagaccactttacttccaaaagaagctggggtcattcactgcaaggggcatcaaaaggcatcagatcccattgctctaggcaatgcttatgctgataaagtggctagacaagcagctagctctccaacttctgtccctcacagccagtttttctccttcgcttcagtcactcccacctactcccccacggaaacttccacctatcaatctcttcccacacaaggcaaatggttcttagaccaaggaaaatatcttcttccagcctcacaggcccattctattctgtcatcatttcataacctcttccatgtaggttacaagccgctagaccgtctcttagaacctctcatttcctttccatcatggaaatctatcctcaaggagatcacttctcagtgttccatctgctattctactacccctcagggattgttcaggccccctcccttccctacacatcaagctcggggatttgcccctgcccaggactggcaaattgactttactcacatgcctcgagtcagaaaactaaaatatcttagtctggacataattcctcggtttggccttcccacctctatacagtctgataacggaccagcctttactagccaaatcacccaagcagtttctcaggctcttggtattcagtggaaacttcatatcccttaccatcctcaatcttcaggaaaggtagaacggactaatggtcttttaaagccacacctcaccaagctcagcctccaacttaaaaaagattggacagtacttttacctcttgctcttctcagaatcagagcctgtcctcgagatgctacagggtacagtccatttgaacttttatatggacgcactttcttgcttggccccagcctcatcccagacaccagccctctaggtgactatcttccagtcctccagcaggctagacaggaaattcaccaggcttctaatcttctcttacctactccagatcgccagccatatgaagacaacctagctggacgatcagttgttgttaagaatctgacccctcaaactctacaacctcgatggacgggaccctacttagtcatctatagtccccgactgccgtccgcctgcaggatcctccccactgggttcaccattccagaataa

SEQ ID NO: 27366 - DNA, 441 bp, Homo sapiens; identical to SEQ ID NO: 12926
  SIMILAR (249)..(383): 521254mologous to Human T-cell lymphotropic virus type 2 gag polyprotein,accession number AF139382,Smith-Waterman Score=146.

SEQ ID NO: 27367 - DNA, 692 bp, Homo sapiens
  SIMILAR (467)..(601): 431254mologous to Murine leukemia virus gag p10 protein,accession number X14576,Smith-Waterman Score=97.
cgggaatctgaagacctgagctttggctccagttctgctaagacccgttttgttacaatgacaatccactcagctactctaagctttggtgtctgaaaagccaggatgatggagaagacattctctaagtttccttccagttctaaaattctctttctcctttcaatcttggcgccacacttcaatctctcccttctcttaatttcaattcctttcattttctggtagagacaaaggagacacgttttatccgtggacccaaaattccggcgccggtcacggactgggaaggcagccttcccttggtgtttaatcattgcagggacacctctctgattatacactcacgtttcaagggtgtcagaccacacagggacacctgccttggtccttcacccttagcggcaagtcccgattttctgaggaagggacaaagggggatgtgtcagggtcacaagacaattgtggggagagggtcagccgacaaacacgtgaacaaaggtctttgcatcatagacaaggagcttgctacacgtgccggaaatctggccactgggccaaggaatgcccgctgcccaggattcctcctaagctgcgtcccatctgtgtgggaccccactgaaaatcggactgttcgactcacctggcagccactcccagagcccctggaactctggcccaaggctctctga

SEQ ID NO: 27368 - DNA, 2910 bp, Homo sapiens
  SIMILAR (1915)..(2232): 641254mologous to Pseudomonas aeruginosa fumarate hydratase,accession number AE004520,Smith-Waterman Score=362.
atggcatgggcagcagaagtggagttctattctcagggaactccacaacaagctctagagctcaaggagagcccaacaggggaccacaagggtgccacatgtgagctcaggggtcaacagacacttcatacaggagagctccggctgcatctggtgggtgcccctctgggacgaagcttccagaggacggaacaggcaacaatctttgctgttctgcagcctctgctggtgatagccaggcaaacagggtctggaatggacctccaacaaacgccagcagaccggcagcaaaggggtctgactgttaaaaggaaaagtaacaaacagaaaggaatagcatcaacatcaacaaaaaggacattcacacgaaaactccatctgaaggtcaccaacatcaaagaccaaagacatttgtcacaggagttggaggagaggtctggggtgaacaaggcctctgaagatggggaagatctggacagggatgtgagtgttgccagcaatatagagccttggactgggtggtgtagggctgctcctctccaggccgatctaggtcccaattcttcctcagcctctgctcctccaccctataatccttttatcacctctcctcctcacacctggtccggcttacagtttcgttccgtgactagccctcccccacctgcccagcaatttactcttaaaaaggtggctggagccaaaggcatagtcaagcatgctttaaaaagattaaagcctgttatcactcgcctgctacagcatggccttttaaagcctataaactctccttacaattcccccattttacctgtcctaaaaccagacaagccttacaagttagttcaggatctgcgccttatcaaccaaattgttttgcctatccaccccgtgctcggcataattgggctcacttcctccgtccgtcgggatgccgggcaggacctgaagcgtgaccgcgcggaatttcttcttggtgatgaagttcatcacccgcaccgtcggcggatagccgaagcgcgccgcctcctgctcgggcagcacttcgatccgctccatcgcctcatagggcaggttctggaactcggcgaagcccgatatgcgccgcccgttgagcagcatcaccggctcgcccccgctcgccgaactggtcagcgacttcacccgcttgagcagttcggccaggctgggcgcgcccagcgccgcaatcgcctcggcatcgagcaccgcgaccggctcgaccgccccgatgacggagccgggaatgcgcttgccggtgacggtgacttccgcagggggtgcctgttcgccgggatcggaattcgccctcggtactgtcggtatcgccagtcccaagacgaccgccgaccatcccacgccgcccctcggccgcgcgcgctccccataccgcatcgtccagccactcccatcgccgacgtgatggtgatgtttagtgtggcaatcatgtcacaattaaggctcgtgcttcgccatatcgacggaatatcgcggtggccgcctgccgtggttttcataactgacgtgaagatatggcttgtttacccgtccgacgattgtcgaataaggtcaaacgatcgcgacgacatgcagggagaagcgcccgcgatgagcatgaatgccgccgccagagtgggcgatccgatcggccacagctttagccagggcctgttcggcgaggcgctggatggtttgttctttgcccgtcgcagcgaggtggacatgcgcgcgggcaatctcggccggctgatcgcgcgcgggctgagcggcggacgctggacgccggccgatggccagctgacgctcggatcgcgcgacgtcttcatcaatggcccccccgccaccatgacgatccggtcgaccggccaatgccgccagcatagcggtctgcgcaccgtcacccgcaccgaaaccgattcgatcggcccgatcgaagtccccgccgacgcctattggggcgcgcagaccgaacggagtcttgagaatttccccttcggcgcgcgcgagcagatgccgatcggcatcgtccatgcgctcgccatcgttaaaaaggccgcggcacggatcaatcgcggccatggcctcgcgggcgaaaaggccgatgcgatcgaatcggcggcgcatgatgtgatcgaggggcggcatgacgaccagttcccgctggtcatctggcagaccggctccggcacccagtccaacatgaacgccaatgagtcctccaacgataccttcccgactgcgctccatgtcgctgccgctctggcggtgacgaagcagcttttctccgcgctcgaccggcttcacgccgcgctcgatgccaaggccaaggaatgggattcgatcgtcaagatcggccgcacccatttgcaggacgcgaccccgctgactttgggccaggaattctccggctatgtccagcaactcgccaatgcccgcgaccggatcgaggggacgcttcaccgcaacatcctgccgctcgcgcaagggggcacggcggtcggcaccggtctgaacgcgccgcatggttttgccgaggcgatcgcagccgagatcgccgacgcgaccgggctcgacttcgccaccgcgccccacaagttccaggagcaggcgagcaatcacgggctggtcgatcgtgcacggcacgctcaacgtgctcgcggccttttcctagacgtatttgttctgagcatggtggcctctggggacgaaaagcactgggtcaccctccttgctgctgctactgtgacaagctggcacaaagagaaaggcagtccatggggatctggactaattcactgtggcaatccagcaaacgttgtcagaaaggatttcagcttccctgttggctgtgatcctgaatcaaggaggaaagccactgagtgctcagagtga

SEQ ID NO: 27369 - DNA, 1542 bp, Homo sapiens
  SIMILAR (767)..(1030): 461254mologous to multiple sclerosis associated retrovirus element gag polyprotein,accession number AF123880,Smith-Waterman Score=174.
ctggttgtcctgatgtctgctctgctctggctgatctcagggcttttatgggcctcagaggggaggaagtgtgtgccgattggtccatgggtggccatgggagtggggagtgcaggagggggactggtgggcagagggctgtggttcctaaatctccagttcaagaaaaaggcaaagagcccttgagtcttctacagtatttcatggtggatgaaaaagaaagatttctcagaattacctcagaacatgaagacaatgataatagcaacaatagtagtaatcatagcagtatcaatgagacaaaagagacatgttttatccatgaacccaaaactccggcgccggtcacggactgggaaggcagccttcccttggtgtttaatcattgcagggatgcctctctgattatacactcatgtttcaagggtgtcagaccacacagggacgcctgccttggtccttcacccttagtggcaagtcccgctttcctggggcaggggcaagtacccctcaaccccttctccttcacccttagcggcaagtcccgctttcctagggggcaagaaccccccaatcgcttatttccgccgcaccccaacctcttatctctgtgccccaatcacttatttctgcaccctgacctcttatctctgtgccccaatcccttatttccctgccccaaccccttctctgctttcctggagggcaagaaccctccgccccttctccctgtctctactcttttctctgggcttgctccttcactatgggtaagcttccaccttccattcctccttcttctcccttagcctgtgttctcaaaaacttaaaacctcttcaactcacatctgacctaaaacctaagcgtcttattttcttctgcaacaccgctgggccccaatacaaactcgacaatgattccaaatagccagaaaacggcactttcgagttctccatcctacaagttctagataattcttgtcataaaatgggcaaatggtctgaggtgcctgacgtccaggcattcttttacacattggtccctccctagtctctgctcccaatgtgactcatcccaaatctttcttctttctctcctttctgttccttcggtctccaccccaagttccgagtcctctgaatccttcttttctatggactcatctgacctccccccttctccccaggctgctcctcgccaggctgagccaggtcccaattctcacttagcctctgctcccccaccctataatccttttatcacctcccctcctcacacctggtccagcttacagtttcgttcctcgactagctctccccgatctgcccaacaatttcctgttaaagagatggctgactatcctgacttcatcagagcaggctggtgcctggccttcctggaatgagtgggtgttctgacaggcccccagtttgtcccatctgcaccgccaagaggtctccgggcggccagaggagcaaagttgccttccaagtgcctgttggtgcctgggagaacacagcaggagtgtcgtgcggcccaca

SEQ ID NO: 27370 - DNA, 974 bp, Homo sapiens
  SIMILAR (584)..(877): 501254mologous to Homo sapiens neutral protease large subunit,accession number M27826,Smith-Waterman Score=187.
cctacctgcacccaggtgaaataaacagctttattgctcacacaaagcctgtttggtggtctcttcacacggacgcgcatgaaatttggtgccatgactcggatcgggggacctcccttgggagatcaatcccctgtcctcctgctctttgctctgtgagaaacatccgcctacgacctcaggtcctcagaccgaccagcccaagaaacatctcaccaatttcaaatccggagcttgctacatgtgccggaaaatctggccactgggccaagcgaatgcccgcagcccgggattcctcctaagccgtatcccatctgtgtgggaccccacttgaaaattcggacttgttcaactcaccttgggcaagccactcccagagcccctggaactccggcccaaggctctctgactgactccttcccagatcttctcggcttagcggctgaagactgacactgcccgatcgcctcggaagccgcctagaccatcacggacaccgagcttcgggtaactctcacagtggaaggtaagcccgtccccttcttaatcaatacggaggctactcactccacattaccttcttttcaagggcctgtttcccttgcctccataactgttgtgggtattgacgggcaggctttctaaacctcttaaaactccccaactcatggtgccaacattagacaatacgtcgttttaagcactcctttttagttatccccatcgtgccaggttcccttattaggctgaggacactttaactaaattatctgcttccctgactattcctggactacagctgtatctcattgccacccttcttcccaatccaaagcctcctttgcgtcctcctcttgtatccccccaccttaacccacaagtataagatacctctactccctccttggcgaccgatcatgcaccccttaccatctcattaaaacctaatcacccttaccccactcaacgccaat

SEQ ID NO: 27371 - DNA, 1610 bp, Homo sapiens
  SIMILAR (257)..(289): 811254mologous to Homo sapiens Human secreted protein, SEQ ID NO: 5210,accession number G01129,Smith-Waterman Score=49.
  misc_feature (1)...(1610): n = a,t,c or g
tttggtgccgtgactcggatcaggggacctcccctgggagatcaatcccccgtcctcctgctctttactccatgagaaagacccacctacgacctcaggtcctcagaccaaccagcccaagaaacatctcaccaatttcaaatccggtaagcggcctctttttactctcttctccaacctccctcactatccctcaacctctttctcctttcaatcttggcgccacacttcaatctctcccttctcttaatttcaattcctttcattttctggtagagacaaaggagacatgttttatccgtgtacccaaaactccggcgccagtcacggactgggaaggcagccttcccttggtgtttaattattgcagggacggcctctctgatcattcagccacatttcaagggtgtcagaccatgcagggatgcctgccgttggtccttcacccttagcggcaagtcccgctttcctggggcaggggcaagctgctcctcgccaggccgagctaggtcccaattcttcctcagcctctgctcctccaccctataatctttttatcacctcccctccctcacacctggtccggcttacagtttcgttccgtgacttagccctcccccacctgcccagcaatttactcttaaaaaggtggctggagctaaaggcatagtcaaggttagtgctcctttttctttatcccaaatcagatagcgtttaggctctttttttatcaaatataaaaacccagcccagttcatggctcgttcggcagcaatcctgagacgttttacagccctagaccctaaaaggtcaaaaggccatcttattctcaatatacattttattacccaatctgcttcccgacattaaataaaactccaaaaattaaattccggccctcaaacccccacaacaggatttaattaacctcgccttcaaggtgtacaataatagagtagaggcagccaagtagcaacatatttctgagttgcaattcctccttgcctccactgtgaggacnaaccccagccacatcttccagcacacaagaacttccaaacggctggaccggcagcagccaggcggttcctccagaacctcctcccacaggagcttgctacacgtgccggaaatctgggcactggcacaagggaatgccggcagcccgggattcctcttaagccgcgtccccatctgtgtgggaccccactgaaaatcggactgttcaacttcacctgggcagccactcccagagccccgtggaacctctggcccaaggctctcttgacttgactccttcccaagatctttgggcttagcaagctgaagactgacacttgcccgatccgccttcggaagccccggagaccatcacggatgcccgagctatggggtaactctcacagtggaaggtaagccctttcccttcttaatcaatacggaggctacccactccacattacctttttttcaagggcctgtttcccttgcctccataactgttgtaggtattgacggccaggctcgnacgcgtgggcggacgcgtgctcgtcccggnnttgcnttctntagggcttcgaggacttacggattttnnccccttgcaaccg

SEQ ID NO: 27372 - DNA, 452 bp, Homo sapiens; identical to SEQ ID NO: 11662
  SIMILAR (52)..(285): 301254mologous to Bordetella bronchiseptica pertactin (P.68),accession number AJ250087,Smith-Waterman Score=81.
  misc_feature (1)...(452): n = a,t,c or g

SEQ ID NO: 27373 - DNA, 681 bp, Homo sapiens; identical to SEQ ID NO: 11664
  SIMILAR (237)..(311): 501254mologous to Homo sapiens Truncated pro-alpha1(III) chain,accession number W12842,Smith-Waterman Score=52.

SEQ ID NO: 27374 - DNA, 1593 bp, Homo sapiens; identical to SEQ ID NO: 11665
  SIMILAR (1133)..(1159): 1001254mologous to Homo sapiens microtubule-associated proteins 1A/1B light chain 3,accession number AF183417,Smith- Waterman Score=43.

SEQ ID NO: 27375 - DNA, 1567 bp, Homo sapiens
  SIMILAR (622)..(452): 271254mologous to Homo sapiens Human high mobility group protein HMGI-C mutant fragment 9,accession number Y21425,Smith- Waterman Score=45.
ctggggttgagctcgggttgggttcctcctggggcaggagggaaaggcgggagccagggcgtcagggcctgcggacgatgtgtgtgtgaaagggcgcgtcagccataagaagccatatgcgtgcgagccggtccccaccgtccccgcggcgttgtcaccatcatcatgaggccactggagcagcctcaggcgctgctgccggggggccgggcgcggggtgcgtcgggctctgcaggttggcactcacacccagcacgaatcatggcaggcaagaatagcacatttcaaacctacaagaaagaagtgtgcctcccccgtcattcgatgcaccctggcccctgggcgatccctgctgtgaatgccagaccagattcgggggccgcctgcctgtgtccagggtggaagcagcactgccttactgggtccctctgtccctgagaccccgaaagcagcacccctgctggatgcatgctgctggcacaactgctggcggatctgcggtgatgagtgcctgttgtccaagttccagcagctcccaggcccccctaccaggaccagctaccggctcctgcagcgcgtctgctggccctcggcctcctgaccctcctccaggccatcccgagggtcatcatggccattcgccagtgttttggggtttgaagttgggaatcttcagctactggtccaaaacagccccacaaaaatgtgtcacgattccaagatctttgagagtccacccaatcaggaggcgtctgtgacagtcagctgtcttctcagaacagaatccacacccaggattcaacccaaatgatttctcatcaggtgattcttggttgtagcaaagttcatgtgaatgtgggtgagtttctgttatgaatgtggtcaataaatgttatttgtgaaactctaaactggccacctcttaaatgatgacctctgatttcccttcattaaggggggacttgtccccatgtccgtgtccctgggggagggcagctatttccgagtgtctcttcagggacagcagacccactggatgagggcccgaaaatggtttcagcacctgtgtcagggcttcctgcatcacctcccccagaaaacacttgcgctcaatccttgcctcaggctctgcttttggggtgaactcaagataagacaaggtgagcagatcccatctcaccagtcagggaggaagcgccatcggagcagagacctgaagacaattccaggaaacctggcaatgaaagtggcaagggaggacaggtcaaggcagcggccacagcagcccgtgaccacaggctgcattttggagaaaccactccagctgaagagtgttggatggaatagagtggcaagagtggacacgggaaaccagcttggaggctgcagcaggaaacctggtgggggacgatggtgtctggacctcggtggtggtggcagtggctgtgttccagtcagagctgtagccatcgaatcaaatgacggaggccggaagtcgccgaccagaactgccaggttactcctggtgtctgacgatcctgttacgggctacaatagatcaagttaa

SEQ ID NO: 27376 - DNA, 1892 bp, Homo sapiens
  SIMILAR (1560)..(1285): 551254mologous to Homo sapiens HSPC274,accession number AF161392,Smith-Waterman Score=174.
  misc_feature (1)...(1892): n = a,t,c or g
ctgcaactcagctgatggcatgttcaagcttccagttgcccaagtcccaaaaacctacagagtttagggaaaagttgaagtgtgaccccacaatgccagctacctagaaactaaggtagatcctaggtactgggattaaagatatcataaaatcattaaaatgttttctgaaatgtttgaagtttaactcattttatttctaggatttggatttcaacattttaatttctttggaatataagtcactttttgcaagctaaaaaatagaatcaaactaaggtgatctagtcctctaggcatccaggctgatccttcggaatcatcgagcagaatgatcgacatactacaaggtgctagcaatacggctataaactctaaataataaccacctacatgtttcattagggaaacagccaaaagtccggcccgttaaagggaataatctggcaggaacatcttgatttacaaggggacaaaatggatggcaaattatatggctggtcccacctactggggtgaactgggatccaggaatgggtcccaagggacctgttttaaaccgaggggaggtattttaccatttttggaaaaactttgctctgcagggataaaaaaaattcctgggttggctgtcagtaagaaagccagtaaaaaaaatattaccagatggaactcactgatccttggattttactaaggtcttccactggaacatgaaggtagggataagtgtacaggataatatactcagatatttttaaaataaactacttaataataagaaattaagccaggccacattgttccattagctacaagagcaagataggcaatgaaggctatgtaaaagaaatgctcagctttacagagggtggtggcagggcaacaacttttccattacaagaataaaccctctattccttccatgatacatattccctgtgggaaaaaacttgtccagggccccccnggatgaaaaaaatagagcttgtccctaaattagctaaactgtaggttcaacttaaacatctttggggaaggaccccaaaaaatctggcccattattttccttaaaacatcctgcaagctgcaagaaattcccttagtccctccagctaatagtttctgcctagatatccttaaagctgggaacagttcccactgtgaactcctcctcagctatggggtgggtgctagtcattcaaaagtctggaatgttcatccataggaataaaccacggtaaccctttggaatgccataattaaccgaatgccgccaggtgggtaaaatcccgggtaggaacaccagaatgcccaatgatcagcaactggaacggcccggtctgccccccctttgctgatgtagcctgacagcaggagggagccctataataatgaagaaaggcgcccaatcaaaaacagcacagtggcaagtgcgatggcccttataagggatccttaaggaggggttttcctttaaactgaaaggtcaaatgttacccatcgtctgtgctggagagccttgaaatatttcactttactactggggattccagtagcccaggttggtacgggacggcatcataacacgctgacacaggttattctcctacccgtcttcagaccttgcccagggagagaaataagaaccgacgcgaatttagacgtaaaacaaacaaaacgggcttctggaaagaggccaactgtgccaggggggacgaatgccccacacggatgactcggagcttgatttcggcggggagcgcggtctcggacacgcccagagcccgagaggacggttctgtccccgccctgccgcacacacgccttaccggcagcgccgcgccaggccgcccgcacacccagagctcgcccacggttggcagacgaaa

SEQ ID NO: 27377 - DNA, 1751 bp, Homo sapiens
  SIMILAR (168)..(719): 631254mologous to Homo sapiens p40,accession number U93567,Smith-Waterman Score=589.
atgaggaaaagccagcgccaaaaggctgaaaattccaaaaaccagaatgcctcttctcctccaaaggatcacaactcctcaccagcaagggaacaaaactggatggagaatgagtttgataaattgacagaagtatgcttcagaaggtgcataataacaaactcctctggaggaagctaaaggagcatgttctaacccaatgcaaggaagctaagaaccttgaaaaaaggttcaatgaattgctaactagaataacaagtttagagaagaacataaatgacctgatagagctgaaaaacacagcacgagaactttgtggagcatatacaagtatcagtagccaaatcaatcaagtggaagaaaggatatcagagattgaagatcgacttaatgaaataaagcaagaagacaagattaaaaagaatgaaaaggaaaaacaaagcctccaagaaatatgggactatgtgaaaagaccaaatctacatctgattggtgtacctgaaattgatggggagaatggaaccaagttgggaaacactcttcaggatattctccaggagaacttcctcaacctagcaagacaggccaacattcaaattcaggaaatacagagaataccacaaagatactccttgaggagagcaacctcaggacacataaccatcaggtttaccaaggttgaaatgagggaaaaaatgttaagggcagccaaagagaaagaaatacaaactgccatcagagaatactataaacacctctacacaaataaactagaaaatctagaagaaacggataaattcctggacacatgcactctcccgagtctaaaccaggaagaattcgaatccttgaatagatcaataacaagttctgaaattgaggcagtaatagactaccaaccaaaaagagtccaggaccagatggattcacagccgaattttaccagagggatgcaagactggttcaacatttgcaaatcaataaatgtaatccatcacataagccgaaccaatgacaaaaaacacatgattatctcaatagatgctgaaaaagcttttggtaaaatccaatatctcccaacatactgcagtatgtttactgtggcaggagcctgtgggcctcctgccactgttgacggtgcccaggctgttcctgccaagaggcacctgcaggccagcgccaagctgccctcagcagcaccccctccagcctccctcccttgcttactggtgcccaaagcccagagggggctgaggggctccacggagcgcacagccacacctgcatctcccctactacagccggcatcacagtccagatgggtttcagctgccatcaattacactgggcctttgaatttttgcagaggagaccacagaggttcatgggtatatgtgcaggtttgttatacaggtaaactgcgcatcacaggggtttggagtacagataatttcatcatccaggctgaaaattccaaaatccagaatgcctcttctcctccaaaggatcacaactcctcacgagcaagggaacaaaactggatggggaatgagtttgacgaattgacacaagtaggcttcagaaggtgggtaataacaaactcctccaagctaaaggagcatgttttaacccaatgcaaggaagctaagaaccttgaagaaaagatagaagacttcctaactaaattaatcagtttagagaagaacataaatgacctgatggagctgaaaaacagcacgagaactttgtga

SEQ ID NO: 27378 - DNA, 1238 bp, Homo sapiens
  SIMILAR (105)..(248): 591254mologous to Homo sapiens Human secreted protein, SEQ ID NO: 7791,accession number G03710,Smith-Waterman Score=150.
aaaggaatagcatcgacataaacaaaaaggacgacaacgcaaaaaccccaactgaaggtcaccaacatcaaataccaaaggtagagaaatccatgaagaggaggaaaaaccagcgcgaaaaggctgaaaattccaaaaaccggaattcctcttctcctccaaaggatcacaactcctcaccagcaagggaacaaaactggatggagaatgagtttgacaaattgacagtaggcttcagaagaaaaagcccacggattctcataaagaaaggcttttttaagacggtcaggctccaatgtgcccgatcctttgcagatgattggacctgcatagggaacttcatcatcatcaagtttgtgtcatcagaaaaattaaatgaacaccggccccatctgaaagcaggtgaagtgatgtatcccctcaacggcgtgctctgccaagcagggcaccgcacgcacacctacgtggcttgcattccacgagacatgttgacccccagcttgatcttcaggttcgacctctatgttccagacctagagagccaactctttactgcatccaccaccgatatgttccttgccattgtacatgtccatgtctgcatctccatcttctctgccctctgctccttcttattttccttgaatgaggtcagcatccacccaactggcaaggtccaagcacacgcctcgggaatctcctggtgtgctttccccaacaccaagctgaacatgatgaaaatgggcatcaaagctgctttcctgggatctgagcctccccaaggtcctccatgggaccctaagtccaccagcgaccacacctgcctagaggccaattgcaacagacagggcagtcccatcaaaccttggtcaggccacctcactcctcgactcaaaccttccagtcacgtcatctctctggaggaatcatcaagggatgccatcaccctcaccctcctcatgccatcacaggagttcctacgatgtaactggaaatataccagacactcacattgtggagccaaagtaaaaatcaacagttacccctgtttgtatgagcgtgggaagtgtttctaccttgccatcgagtcatcatcactgactctacacaccgtgtccttacctctagactcccactcaggaccgtatcggttgaaccagatcaatagtgcccttgggttgctgggcctgacgtgcaaagccgtcggctctgataggcttcctgttcccatgcagtag

SEQ ID NO: 27379 - DNA, 5180 bp, Homo sapiens
  SIMILAR (5180)..(1023): 991254mologous to Homo sapiens insulin receptor,accession number A18657,Smith-Waterman Score=7441.
taaatatggtacaaatatattctcaaaactctgtcatctcagttctttttttttttcctttttccattttgttttttctttctttttcttttttttttttttaatgtcctagcttggtttggtcttgaaaagattcataatcactccaaatgaaatgctcctcccttggccaccaatgtgaagggagggtagaaacctgaggctagacttctgacacaagaagaatctgtcgagagcacagtctcccagtcaataagaaggaaggagagagggggatgagctcgcacccttgagaagaaccttcatgagccaattcccaaagcatcaactccgcatggatactttgcacacacgtcagccgtgtctaatggacacacacacgtgcatacacacgtgagcacacgccgggaccacagacccttatccaaaatatgaaagcagcagctattggtcaatttgaggaactcattttgtaaagaaaaaaaaaatccttcagcctggatgagagaaaaaaaaaaaaccaaaaaaaccatcttgaagctcaacctgtaaaacttgaaattctcctggaacagggctgggtgtttttgttttgttttttctttcgaacttttgttccacaaacaggaagttttgtcttttatactgaagctcagacaccagcaaaaaaaaaaaaaaaaaaaaagaatttgtaaaaacaggtgctttctttccatctgctgggggcgggtggggggaacgaaaaaacacaaaatcctggtttgaaaccgtcgttgccccaaaggagcagcaactgtggaaaccccttgccctccaggttcacagttaaatcctctgcaggactagttaaattggtaaccaaacgagtccaccttaagatgaacagaaatgtataggaacgatctctgaactccattggacatggtagagtcgtgagaatcctgagttttccagaggctttcaaaccagaggaaagcgaaaatgggaacccctgcccgcccccgccacggtaggcactgttaggaaggattggaccgaggcaaggtcagaatccgcccgtttttcttgcctccgttcatgtgtgtgtaagggatgtgttcctcgtagctccgcttgaaacccagcgaggaccctccatcccggccccccgcctcctccctctgacagtgcgaggaacggtccaggggcacattctccatgtcctcaaactccatctccagctcctcactctcgggagccttgttctcctcgctgtggaagaacgacacctctggaaagctggggtgcaggtcgtccttgagcaggttgacaatctccaggaaggttggcctcatgttggggttgaattgccagcacatgcgcatgaggtcagtgactctctctggacagttgtcgggttgatccagataccctccatccatgacaaatttcaacacctgttcattagacaggccttggtaaggctgttctgccaagctggtgatttcccaaaggaccacgccaaaggaccacatgtcagaagaagtggtgaagaccccatccttcagggactccggtgccatccaccgtacagggagcagacccttgccccctttccggtagtaatccgtttcatagatgtctctggtcattccaaagtctccaattttgacagtaaaatcatgggcgaccatgcagtttctcgctgccaggtcccgatgcacaaacttcttggcgttcaggtaggccatcccgtcagcaatctctgccgccatctgaatcatctcttgaagggtagggggagggcggccaggattattctcagcctctggccgcagagaacggaggtagctcttcaggtctccgtgagccatcagctccatcaccaccagcgtgggctggcccttggacaccactcccaggaggcgcaccacgtgatggcaggtgaagcccttcatgaccgaggcctcattgaggaactcaatccgctctcggagactggctgactcgttgaccgtcttcaccgccacgcgggtctctgcctcacccttgatgatgtccctggcattgccctcatacaccatgccgaaggagccctgccccagctctcgaaggagggtgatcttctctcgagacacctcccactcgtccggcacgtacacagagcatggaaacacatcactggcactgagatactcagggtttgaagaagcgtaaagcggtcccagcggcccatctggctgcctctttctcaggaatagataaatacttccaatcacaacactgaagagaaagacaaagatgagggggccgatgataatttttgcaatatttgacgggacgtctaaatagtctgtcacgtagaaataggtgggttccgtccaagagccgttgcccgcaagggaggtggcccggattcgcacgctgtagttccccggtgacagcccacgcagcctgcagccccgttccagagcgaagtgcttgcgggagacgcagagatgcagctcctcatcaccatatcgccgataactcacttcatacagcacgatcagaccattgggctccttcggctcctgccacatcaagtggacgacgttgttctcaaagatttcatgcgtcacagggccaacaatgtcatcagccttggcttcaggcatggtcctcgcactgacgtaggctgccacactgcaccgttcctcaggggtgtcctggttgcaagcctgcagctcgatgcgatagcccgtgaagtgtcgcaagccggagatgaccagcgactccttgttcaccaccttctcaaaaggcctgtgctcctccggactcgtgggcacgctggtcgaggaagtgttggggaaagctgccaccgtgggcacggccaccgtcacattcccaacatcgccaagggacctgcgtttccgagatggcctggggacgaaaaccacgttgtgcaggtaatcctcaaacgtcttcctaaacgaggactcctccagctccttcaggatctgagagtctgtctttggacaggagcagcattcgccggccgaatcctcatactcactctggttgtgcttctgagaatcttcagactcgaatggtggagaccaggtcctcgagggcagcttcagccctttgaggcaataatccagctcgaacagctcactgtcttccgcctgcctctcccagaaaaccaggtagtgggtgatgttgccattggggtcggagggtggtttccacttcagaataatctgggatgatgagttagacactgagattggatccaggggcacagaggggttggtggcatctgtctggacataaatgatgtcactcttggccccataggtccggcgttcatccgaaaaggtgaccagggtcttcacaaagatggcatactgggtccagggcttgagaccccgcatcagccaccctgggtggttctgtgatttggggtcgttggacctcaggggtgggtcaatgtctaccaccgtccaactgttggaaccacatgcatcctgcccgtcgaactccgtcacattctgataaggggcctctttgtagaacagcatgaaccccaagaggtctcggaagtcggggggccagtacggctcccatctcagcaagatcttgtcaaaagatgtccgaatgtaagaaaatttaagtaactcattttcacaggatgcctggtccccattggtcttcagggcaatgtcgtttctctcctggcgccccttggttcctgaaacttcttccatcttgtggatttctgacaagcagagtttggggttatagtggaagaagagtttcccctgagtgatggtgaggttgtgtttgctccagtcccagagctgccttaggttctggttgtccaaggcatagaaggagtagttcccaatttccaaggtctctcctcgaatcagacgtaacttccggaagaaggaaagtgacaccagagcgtaggatcggcggatttttagataccctgaaatttcttcaatgaggccgaggttggcttctagctcagctgccagattgttgcctcctcgaatgttgatgatcagactcccgttgatgacggtgcatcctcggagctcctgggcagacgtcaccgagtcgatggtcttctcgccttctaggaggtggcacaccttgggacagggacccaggcatggggtgcacagcaagttgctggaattcatcgtgtacccggagggacactcagggatgcacttgttgttgtgaatgacgtactggtggcagccctgcctccgcgagttcttgcatttgtggtgcaggtcctggcagaagctgaagttcacacagcgccagtcctggaagtggtagtacgggggcgggcaggtctccacacacctgccgtccaggtagaagttgcggcaggccacgcacttggtggggtcgtcgggctgagaacagttgcccaggcactcgctgtggcaacagaggccttcggcggtgcagccgtgtgacttacagatggtcgggcaaactttctggcagtgactatgagtccaacatcgttcgacaaactgcccgttgatgacggtggcggggcagttggtcttgcccttcgcggtacccggacagatgtctccacactcctcgttgtcatctttgttcaacacgatgtaattatcctccacggaatccaggatacgggaccagtcgatagtggccaagtaacagagctcattgttcttctcgatgcggacagaaccccgggtgatgttcatcaggttgtagaggccgagttccttgaggtgaaccatctcgaagatgaccagcgcgtagttaaagaacagtcgtgatccccggatgaccgtgaggttggggaacaggtccttcaggctctcgagcccatagacccggaagagcagcaagtaatcagtgatcatgatgagtttggggaaactgaggtctcggaaatcttcgggcctcgttttgaacatcaagagtatctgcaagtgtccttcgatgacagagcaattctccagctcatgcaacctagtgaggttgttccggatatccatgccgggacacacctctccggggtacaggtggcccgcggcgcccagtagcagcgcggccaccgccaccagcagcggcgcggccgccgccccccgccggcccccggtgcccatggctgcgggagcgcggggtctcctcggatcagagcgcgcgctcccggt

SEQ ID NO: 27380 - DNA, 6242 bp, Homo sapiens
  SIMILAR (5959)..(1814): 1001254mologous to Homo sapiens insulin receptor,accession number M32972,Smith-Waterman Score=7430.
ctgtggtggttctttttgcaaagagaagaaacggtggattcacgcccattcggaagttcttggtggtgtgtaaggtctttttcacggtttctcctccagactctactctcttagggattgcaacactgtaagcacctgagcattcagctcaggcaccacacctggcccagatgaggtcaccgggctcagagcagcttccgggagttcagtactgaggaccgtcaaatgctttcagggtggaggggacccaagacgtactctcagtgcacctctcttttatattgcttagatgttcccaaagtccatccaggttgttgtgctttgggatctgacgttcttgggtttgcacaataacggttaggatgttcacacccgggagaggaaacgccacaagaggtacacacagagaatcagaggatgaaacacaggtgttcttgaaggcaggctcagagctaggtagctaccagcttatccgaacaggaaccttccagcagacctggtacctgaaccagaccatccataaaacctagtctctcacacactccacgtggcctcacaacatccaaaagtgttagcagcgaacatggcttcattcccagaaatggatgcctttaagaccaaacaaagaggccacttgtgcctgactccctccccttcccggccccacaacaggcagaccaactcatgtccccactccccgccaaccccggggaatagtcaataacttatgaggctaataccagagactttaaaaattaaatatggtacaaatatattctcaaaactctgtcatctcagttctttttttttttcctttttccattttgttttttctttctttttcttttttttttttttaatgtcctagcttggtttggtcttgaaaagattcataatcactccaaatgaaatgctcctcccttggccaccaatgtgaagggagggtagaaccttgaggctagactttctgccaccagaaagaatctttcggagagcacagtctcccagtcattaggaaggaagttagagagggggatgagctcgaacccttgagaagaaccttcatgagcccaattcccaaagcaatcaactccgcatggatactttgccacacacatcagccggtgtctaattggacacatcaccacgtgccatacaccacgtgaagcacacgccggggaccacagaccctttttccaaattttggaaaggcaggcagcttttgggtcaatttggagggaactcatttttgtaaagaaaaaaaaaaatccttcagcctgggatgagagaaaaaaaaaaaaaaaccaaaaaaaccatcttgaagctcaacctgtaaaacttgaaattctcctggaacagggctgggtgtttttgttttgttttttctttcgaaattttgttccacaaacaggaagttttgtcttttatactgaagctcagacaccagcaaaaaaaaaaaaaaaaaaaaaaaaaaaagaatttgtaaaaacaggtgctttctttccatctgctgggggcgggtggggggaacgaaaaaacacaaaatcctggtttgaaaccgtcgttgccccaaaggagcagcaactgtggaaaccccttgccctccaggttcacagttaaatcctctgcaggactagttaaattggtaaccaaacgagtccaccttaagatgaacagaaatgtataggaacgatctctgaactccactggacatggtagagtcgtgagaatcctgagttttccagaggctttcaaaccagaggaaagcgaaaatgggaacccctgcccgcccccgccacggtaggcactgttaggaaggattggaccgaggcaaggtcagaatccgcccgtttttcttgcctccgttcatgtgtgtgtaagggatgtgttcctcgtagctccgcttgaaacccagcgaggaccctccatcccggccccccgcctcctccctctgacagtgcgaggaacggtccaggggcacattctccatgtcctcaaactccatctccagctcctcactctcgggagccttgttctcctcgctgtggaagaacgacacctctggaaagctggggtgcaggtcgtccttgagcaggttgacaatctccaggaaggttggcctcatcttggggttgaattgccagcacatgcgcatgaggtcagtgactctctctggacagttgtcgggttgatccagataccctccatccatgacaaatttcaacacctgttcattagacaggccttggtaaggctgttctgccaagctggtgatttcccaaaggaccacgccaaaggaccacatgtcagaagaagtggtgaagaccccatccttcagggactccggtgccatccaccgtacagggagcagacccttgccccctttccggtagtaatccgtttcatagatgtctctggtcattccaaagtctccaattttgacagtaaaatcatgggcgaccatgcagtttctcgctgccaggtcccgatgcacaaacttcttggcgttcaggtaggccatcccgtcagcaatctctgccgccatctgaatcatctcttgaagggtagggggagggcggccaggattattctcagcctctggccgcagagaacggaggtagctcttcaggtctccgtgagccatcagctccatcaccaccagcgtgggctggcccttggacaccactcccaggaggcgcaccacgtgatggcaggtgaagcccttcatgaccgaggcctcattgaggaactcaatccgctctcggagactggctgactcgttgaccgtcttcaccgccacgcgggtctctgcctcacccttgatgatgtccctggcattgccctcatacaccatgccgaaggagccctgccccagctctcgaaggagggtgatcttctctcgagacacctcccactcgtccggcacgtacacagagcatggaaacacatcactggcactgagatactcagggtttgaagaagcgtaaagcggtcccagcggcccatctggctgcctctttctcaggaatagataaatacttccaatcacaacactgaagagaaagacaaagatgagggggccgatgataatttttgcaatatttgacgggacgtctaaatagtctgtcacgtagaaataggtgggttccgtccaagagccgttgcccgcaagggaggtggcccggattcgcacgctgtagttccccggtgacagcccacgcagcctgcagccccgttccagagcgaagtgcttgcgggagacgcagagatgcagctcctcatcaccatatcgccgataactcacttcatacagcacgatcagaccattgggctccttcggctcctgccacatcaagtggacgacgttgttctcaaagatttcatgcgtcacagggccaacaatgtcatcagccttggcttcaggcatggtcctcgcactgacgtaggctgccacactgcaccgttcctcaggggtgtcctggttgcaagcctgcagctcgatgcgatagcccgtgaagtgtcgcaagccggagatgaccagcgactccttgttcaccaccttctcaaaaggcctgtgctcctccggactcgtgggcacgctggtcgaggaagtgttggggaaagctgccaccgtgggcacggccaccgtcacattcccaacatcgccaagggacctgcgtttccgagatggcctagggtcctcggcaccagtgcctgaagaggtttttctggggacgaaaaccacgttgtgcaggtaatcctcaaacgtcttcctaaacgaggactcctccagctccttcaggatctgagagtctgtctttggacaggagcagcattcgccggccgaatcctcatactcactctggttgtgcttctgagaatcttcagactcgaatggtggagaccaggtcctcgagggcagcttcagccctttgaggcaataatccagctcgaacagctcactgtcttccgcctgcctctcccagaaaaccaggtagtgggtgatgttgccattggggtcggagggtggtttccacttcagaataatctgggatgatgagttagacactgagattggatccaggggcacagaggggttggtggcatctgtctggacataaatgatgtcactcttggccccataggtccggcgttcatccgaaaaggtgaccagggtcttcacaaagatggcatactgggtccagggcttgagaccccgcatcagccaccctgggtggttctgtgatttggggtcgttggacctcaggggtgggtcaatgtctaccaccgtccaactgttggaaccacacgcatcctgcccatcgaactccgtcacattctgataaggggcctctttgtagaacagcatgaaccccaagaggtctcggaagtcggggggccagtacggctcccatctcagcaagatcttgtcaaaagatgtccgaatgtaagaaaatttaagtaactcattttcacaggatgcctggtccccattggtcttcagggcaatgtcgtttctctcctggcgccccttggttcctgaaacttcttccatcttgtggatttctgacaagcagagtttggggttatagtggaagaagagtttcccctgagtgatggtgaggttgtgtttgctccagtcccagagctgccttaggttctggttgtccaaggcatagaaggagtagttcccaatttccaaggtctctcctcgaatcagacgtaacttccggaagaaggaaagtgacaccagagcgtaggatcggcggatttttagataccctgaaatttcttcaatgaggccgaggttggcttctagctcagctgccagattgttgcctcctcgaatgttgatgatcagactcccgttgatgacggtgcatcctcggagctcctgggcagacgtcaccgagtcgatggtcttctcgccttctaggaggtggcacaccttgggacagggacccaggcatggggtgcacagcaagttgctggaattcatcgtgtacccggagggacactcagggatgcacttgttgttgtgaatgacgtattggtggcagccctgcctccgcgagttcttgcatttgtggtgcaggtcctggcagaagctgaagttcacacagcgccagtcctggaagtggtagtacgggggcgggcaggtctccacacacctgccgtccaggtagaagttgcggcaggccacgcacttggtggggtcgtcgggctgagaacagttgcccaggcactcgctgtggcaacagaggccttcggcggtgcagccgtgtgacttacagatggtcgggcaaactttctggcagtgactatgagtccaacatcgttcgacaaactgcccgttgatgacggtggcggggcagttggtcttgcccttcgcggtacccggacagatgtctccacactcctcgttgtcatctttgttcaacacgatgtaattatcctccacggaatccaggatacgggaccagtcgatagtggccaagtaacagagctcattgttcttctcgatgcggacagaaccccgggtgatgttcatcaggttgtagaggccgagttccttgaggtgaaccatctcgaagatgaccagcgcgtagttaaagaacagtcgtgatccccggatgaccgtgaggttggggaacaggtccttcaggctctcgagcccatagacccggaagagcagcaagtaatcagtgatcatgatgagtttggggaaactgaggtctcggaaatcttcgggcctcgttttgaacatcaagagtatctgcaagtgtccttcgatgacagagcaattctccagctcatgcaacctagtgaggttgttccggatatccatgccgggacacacctctccggggtacaggtggcccgcggcgcccagtagcagcgcggccaccgccaccagcagcggcgcggccgccgctccccgccggcccccggtgcccatggctgcgggagcgcggggtctcctcggatcagagcgcgcggcgctggcccgcgggggtcatgctccgaggcggccacccaagaggcgctgggggccgcgcgtccttctcttccacgcccgcgacccgcgggccgcagcccccctgccggggagggcccagaggcagccccgggaagggcgcgcgcggcttcgccagctacaaatactgagcggaggcccttgcggtggtggccccgaccccccggccgctgcggcccgggccccgtcccaggatctcggggcc

SEQ ID NO: 27381 - DNA, 570 bp, Homo sapiens
  SIMILAR (287)..(415): 391254mologous to Homo sapiens Human secreted protein, SEQ ID NO: 6191,accession number G02110,Smith-Waterman Score=64.
ttagggataagtctgctcagcaggaaccaagcagactgcctggtgggagaaggccagggtggacgggcctgctgtcctgctctcagtcacttctgctggatgagagcttctgagctgccgcttttgttcaggaccaataagcacagtgagaaaaggtgatgagtgaacaggcggaaggggcatcagcttcccataggagtgaacctctttgggtcccctccctttgtatgggagctctgttttcactctattaaatcttgcaactgcccactcttctggtccctgtttgttacggcttgaactgagctttcgttcaccgtccaccactgctgtctgccgccatcgcagacctgccactgacttccatccctctggatccagcagggtgtccgctgtgctcgtggaaagccataatggaacaaaatggcagatcaaatctgagttattcttgttggcactactgtggcatgcatacagtggtccccccttatccgcaggggataattccaagacccccactggaggccattccccaaacactcctgggtgcttcttcacatttctagccat

SEQ ID NO: 27382 - DNA, 500 bp, Homo sapiens
  SIMILAR (444)..(497): 721254mologous to multiple sclerosis associated retrovirus element unknown protein U5/1,accession number AF123880,Smith- Waterman Score=63.
ctgcacaacccctaccatgccccatttcagcaggaagcaggtagagcggtcgtcagtcaacctccccagcagcacttggggttttccctgttgagagggggtacctgagagacagggactagctgggatttccctaggccgactaagaatcccctaagcctagctgggaaggtgaccgcgtcccacctttaaacacggggctggtaactcagctcacacccgaccaatcaggtattaaaaaaagggctcactaaaataccaatcaggctaaaagcaggaggtaaagaaatagtcaatcatctatcgcctgagggcacagggggagggacaatgatcaggatataaacccagggcattccagccagcaacggctaccctctttgggtcccctccctttgtatgggagctctgtttccactctattaaatcttgcaactgcactctcttctggtccgtgtttgttacggcttgagctgagcttttgcttattgtccaccatt

SEQ ID NO: 27383 - DNA, 444 bp, Homo sapiens
  SIMILAR (250)..(441): 841254mologous to Homo sapiens heat shock protein 10,accession number X75821,Smith-Waterman Score=259.
atggtggacacccctctcccagccaggctgccgccttgccattcaatcttggacagctgtgctagcagtgagcaaggctccgtggccgtgggacccactgagccaggcacgggatataatctcctggtatgccatttgctaggactgttggaaaagcacagtattcgggtggcaatgtcccgtttttccagctacctcgctggctttgagcacaacccaggaagaagtttgaaaccaagaaaatggtgtgccgccaaaactgtaaccaaaggagccattatgcttctggaaaaatctcaaggaaaagtattggcagccacagtagtagctgttggatcaggctctaaaggaaagggtggagagattcaaccagttcgtgtgaacgttagagataatgttcttcttccagaatatggaggcaccaaagtagatgacaaggattag

SEQ ID NO: 27384 - DNA, 633 bp, Homo sapiens
  SIMILAR (55)..(624): 551254mologous to Homo sapiens RFPL1L,accession number AJ010228,Smith-Waterman Score=575.
atgactctttacgtctgtacccgtattgcctggtacaagggatataacatagtagtggatatgacgttcgatgtggacacagccaacaactatctcatcatttctgaagacctgaggagtttccgaagtggggatttgagccagaataggaaggagcaagctgagaggttcgacactgccctgtgcgtcctgggcacccctcgcttcacttccggccgccattactgggaggtggacgtgggcaccagccaagtgtgggatgtgggcgtgtgcaaggaatctgtgaaccgacaggggaagattgtgctttcttcaaaacacggcttcttgactgtgggttgcagagaaggaaaggtctttgctgccagcactgtgcctatgactcctctctgggtgagtccccagttgcacagagtggggattttcctggatgtaggtatgaggtccattgccttttacaatgttagtgatgggtgccatatctacacattcatcgagattcctgtttgcgagccctgtcgttcattttttgctcataaacgtggaagtcaagatgatcagaacatcctgagtatctgttctgggatcaatccatccgctgccagtgccccaattttttttggaggaagataa

SEQ ID NO: 27385 - DNA, 1257 bp, Homo sapiens
  SIMILAR (394)..(1239): 581254mologous to Homo sapiens RFPL1L,accession number AJ010228,Smith-Waterman Score=884.
atgctgttggtggccaccatattggacagcccgggtctagaccctttttaccacttcaactctatgtcgaataatgaacgatattcttcattccagctagcatgtgaaattcagaagtcagcagccatgactcttcacgtctgtacccgtattgcctggtacaagggatatcacatagtaggtaaaaacctgtccaatagtaacaatctcaatgatggcagaatgaaatcagaatctgattggattaaaaaggagggaaagggtgtggctaaggtgggtggagacaccctctggtataaaagcccctggcaggcagctctcactccagatctgagctgtccgcagaagcagctggaggccaggggagaaactccagaaggagagacatttgccatggctgagcacttcaaacagatcattagatgtcctgtctgtctaaaagatcttgaagaagccgtgcaactgaaatgtggatatgcctgctgcctccagtgcctcaattcactccagaaggagcccgatggggaaggtttactgtgccgtttctgctctgtggtctctcagaaggatgacatcaagcccaagtacaagctgagggcgctggtttccatcatcaaggaactagagcccaagctgaaatctgttctaacaatgaacccaaggatgaggaagtttcaagtggatatgacgttcgatgtggacacagccaacaactatctcatcatttctgaagacctgaggagtttccgaagtggggatttgagccagaataggaaggagcaagctgagaggttcgacactgccctgtgcgtcctgggcacccctcgcttcacttccggccgccattactgggaggtggacgtgggcaccagccaagtgtgggatgtgggcgtgtgcaaggaatctgtgaaccgacaggggaagattgtgctttcttcagaacacggcttcttgactgtgggttgcagagaaggaaaggtctttgctgccagcactgtgcctatgactcctctctgggtgagtccccagttgcacagagtggggattttcctggatgtaggtatgaggtccattgccttttacaatgttagtgatgggtgccatatctacacattcatcgagattcctgtttgcgagccctggcgtccattttttgctcataaacgtggaagtcaagatgatcagagcatcctgagtatctgttctgtgatcaatccatccgctgccagtgccccagtttcttctgagggaaagtaa

SEQ ID NO: 27386 - DNA, 408 bp, Homo sapiens; identical to SEQ ID NO: 1530
  SIMILAR (204)..(281): 421254mologous to Homo sapiens SEQ ID NO 472 from WO9922243,accession number Y19754,Smith-Waterman Score=58.
  misc_feature (1)...(408): n = a,t,c or g

SEQ ID NO: 27387 - DNA, 398 bp, Homo sapiens; identical to SEQ ID NO: 1531
  SIMILAR (188)..(265): 421254mologous to Homo sapiens SEQ ID NO 472 from WO9922243,accession number Y19754,Smith-Waterman Score=58.
  misc_feature (1)...(398): n = a,t,c or g

SEQ ID NO: 27388 - DNA, 740 bp, Homo sapiens
ttttgtcagtttaggaaggtcacatttatagacaaatccaaacaaggtactttgctatcctctcttttgttcacagacagacaagataaacctaggcagagagaaaacttgcctcaatcttggattaaatgcagaggtctgcttgaacattccaaggtcaaactaaaagtctacaagagcaggagacttgattcaaaacagctcggctctgactgggtttcatgtgggcagaggggactctctcgacactaagatgaccacagctcacatagaggtgtcagctgaaatatggaggattaccactactgtagaagatgtcctggatcccttggcccatggtctctcacaggctacagtaaaggtagccctcagttccttgccatgtgggcctctccgtggtgcagctctcaggatggcagcagaatttatcagagcaggtaagtgaataaagccagaaaaagagtatgagcaagacaaaatccacagtctttgtcacctaatctcagtgacattccatcatgtttgccataccctatttgtcagaagcaagtcgtttgctccatcccacactcaaagggaggggattgcacaaggctgcgtattcctggagatggggtcattgagggccatttcagaagctgcctgccatacttccctccacatgtacctgcccattcatgtgtgacccaatagagatagttgacctgcacactctaatgaagttacatgggtacttactt

SEQ ID NO: 27389 - DNA, 2745 bp, Homo sapiens
  SIMILAR (700)..(1449): 301254mologous to Homo sapiens Type III procollagen (prior art),accession number R28916,Smith-Waterman Score=218.
atgatgtcattcaatggagttggaaagcaacgtacagaagcacatggttatacagtgcatccaccacacagatgcagcaaatccccacctccgaatgccatcacattggggattagggcttcaatgcatgaatttggaaggacagtccataacacactctctgccttgtcatcaagtaggggaagtgagagtgagagggaaggagccaggactgagagtgccaatgagcaggtgatacgggacattggcagtgtctgcaacaagctacttcagaatcctgaggggagctggccctgtgggtcttggtggactggatgcatggacagcattcctggagggatctggatcacagtagtgttttttctaagtgtggcatatggatcacaggtggtacaaaagaatttgcacggaaataataacaacaaagcaaatgcaataaaggggtctcttttcaatgcagataggaactataagggttggctatttgcagaagaggtcactggaggagcaggtcattatgttttaatatcacacagaaatgcagtaaaggagtctggcatgtcagggagaatcatcaggaatgcttccaagaagccgggagaattcggaggctccatcccggaggcactggggtccgggacgcgggaaaggcttggaaatgtgcgacgcggctgtgtgcgaacgcgtggactaggtcttggctcgctgggagggaagggctgggccggcgctggggaggaggaagggagggaacgggtaggaggaggggaagcgcagtataaaagtcccggccggactgagcgtccgctactccgagtcacttcggtttctaaagcagcccaggcaccaccccacccacccacagccccgagcctcagtgtgcacaagggctctacccgcgcccgtcacagcgacctcggcagcgggcacttggtacagcccggcaggctgacgctgccgccgagggcgccccggctaccgccaaaccgtgacaacctcgctgcggcgccgcggccacatctggggcgcccatgtgcgctcgggggctcggctgcgcccgccccgccgccgaccccgcagccccctgccagcagggtggcctccggcccggcccgggtcccgggctgtcccgggacccagtctccgtctccgccgccgccgccgccaggcagcgccggggcttgctccgcagccggcttggacacccccggcctcgcggtggctccgccgtggtgcggcggcggcggcggcggcggcgccggcagctcctgctcccccggccccgcacaccccgccgcgcccagcgccagccccgcgggcccgggaagcggagccctggcgggagccgaggcgggagccgcgctgccgggctcccgggctcctactcctcctcccccggcgtcaccgccgccgccgccggccgccgcgccgggtcctaaagccgcgcgtctcaaaaggatggtgcgcctggcggccgagctgctgctgctgctggggctgctgctgctcacgctgcacatcaccgtgctgcgcggctcgggagccgccgacgggcccgacgcggccgcgggcaacgccagccaagcccagctgcagggcctgcttctaggaaaacccacactaagtgaaccacacccaaatggtagtcatggtaataatggatactcctctaggaggaaggggaagaaaaagtcaggagttagccatggaaccaagaagatccaggagaaggttgaggggatgttcagagaagtggaaaatgagagattgattatcatggaggaaaagcccgagaagaagggagtgtttgtctattaccacatctccagtgtaggcactggtgattcatctgcaggtcagaaagagagccctgttagccagtttaggaaggtcacatttatagacaaatccaaacaagaacttccatgggtccggaattcagacacagcttacctggatcccttggcccatggtctctcacaggctacagtaaaggtagccctcagttccttgccatgtgggcctctccgtggtgcagctctcaggatggcagcagaatttatcagagcagagatcaatccagtcatttttggcctgcaaagccctggggatttctttcacccagtagttgaatggtggacctttttggagaggctggcaatggtggtgttggtcctttctctgtattctgagcactctctttacactgagattgttggaagaggtattcactctccccgacagctgtttacacccctagaccctcacaggaggacaaacccaagggaagtcctgctcacaagccgtggttctccatactggttccggcttgtcagtgcattagaccaacatccggataggggcctcttaaagaagggagacacagaatcactgcaggagatgttcgccttctggtgtcctgttcgacacccgttccctctggtcgtaggaggacttagatacttgggccttttaggtgcactaatgatctggtgcctcttcaaattgggtcctggaaaccgagtcctagacagttaccactctgttttctttgccggtaatggagaaagcacaacttggaaaatcaccaataatccacactcattaaatatttgctcaaagtttgacttaaaggggtggctgaactctaacagggctgaagaggagggatggaagccccctggtggccactggtggcctggcctttatagccctgagctggttagctgcagcctggaaggctga

SEQ ID NO: 27390 - DNA, 747 bp, Homo sapiens
  SIMILAR (82)..(318): 921254mologous to Homo sapiens ferritin heavy subunit,accession number M12937,Smith-Waterman Score=376.
atgaaagaccaccccaaggcccccaccgccgctccagcgccacgcagccaccgccgccgcagcctctccttagtcattgccatgatgactgcatccaactcgcaggtgcgccagaactaccaccaggactcagaggccgccatcaaccgccagatcaacctggagctctacgcctcctactttaacctctccatgtcttactactttgaccgtgatgatgcggctttgaagaactttgccaaatactttcttcaccaatctcatgaggagagggagcatgctgagaaactgatgaaactgcagaaccaacaaggagggagcactggaatgtttaattcggacaatgccaatacaagtttacagagaagagagaactttccattgggttttgaaggttctgctgattttcaatgggcagaggtggaggaacagtctgagcagagagaacatcataaacaaaggagtgaatgtgagaaaggctgctcagtcaacctggtcactgtgatatcctcagtgctaaggacactggaagcgggagtcagaaagcatttacctggaagcagtctggagccacaaactctagagcccacaagatccacacagggagtacgagtgagtggaatggtccaggggatggtggatgagtcctcccagaaagcaatatcaggagagcagcagcctcacctgtgtttcaattgtgtctttactcagcaactagaacagtgccatctacatagtccatcataa

SEQ ID NO: 27391 - DNA, 2183 bp, Homo sapiens
  SIMILAR (418)..(143): 481254mologous to Homo sapiens Human secreted protein, SEQ ID NO: 7878,accession number G03797,Smith-Waterman Score=198.
catcaaaagaatgaagaacataagaaaaggtaactacatcagtaaatatattgcttttttcttcttatttaaatgctttaaaagagaattgattgtttaaataaaaatatcaatgtaggctacatgcagtggctcacacctataatcccagcactttgggaggctgaggtgggtggatcacttgaggtcagaatgttcaagaccagcctggccaacatggtgatctttgtgtctattaaaaaatacaaaaataagccaggcgtggtggcgggcacctgtaatccagctactctaaggctgaggcaagagatcacttgaatccaggaggcagaggctgcagtcagccaaaattactccactgccctccagcctaggcaacagagtgagaatctgtctcaaaaataaaaataaaaataaatcaatgtagtatcagacttatatgtagaaattaaatatttgacaaaataacatgaaattataaggagagaaattaaaatttattattttaaggttcttaatatacaaactagtatattatcagttgaagatagtctgcaataatttaaagctatatactataaacactaaagcaaccattaatatagcaaaattgaaaatatgaagttaatagggcaacaaaggagataaaatgtaattttaagaaatatacaaataattacaaaaagacagcataatagtaaaagagaatgaacagataaaacaattataaaacaaacaccaagctgagagacttaaacctaatcacacgataatcacactaaatgtaaatggtccaaatacccccatcaaaaaggagagactttcaaatagataatgaaaattcaagacctaaccacaaaaaaaacacacttagaatataaagtcacagatagggtaaaagtggaagaatgacaaaagaagagacattcttcaccaagagtcctcggggtttcctgcttcaacagtggcttggacggaacccggcgctcgttccccaccccggccggccgcccatagccagccctccgtcacctcttcaccgcaccctcggactgccccaaggcccccgccgccgctccagcgccgcgcagccaccgccgccgccgccgccgctctccttagtcgccgccatgacgaccggggtccaccttgcaggtgcgccagaactaccaccaaggactcagaaggccgccaatcaaccgcacagatcaacctggaagctctacgcctcctcacgtttacctgtccatgtcttacttactttgaccgcgatgaatgtggctttgaagaactttgccaaatactttcttcacccaatctcatgaggagaagggaacatgctgagaaaacttgatgaaagcttgcagaaccaacgaaggttggccgaattcttccttcaggattatcaaagaaaccaagacttgtgatgactggggaagagcggggctgaattgcaattggagtgtgcattagcattttggaaaaaaaatgttgaatcaagtcactactggaacttgcacaaacttggccacttgacaaaaattgaccccccatttggtgtgactttcattggagacacatttaccttgaatgagcagggtgaaaggccatcaaaagaatttggggtgaccacgtgaaccaaacttttgcgcaaagatgggaagcgccccgaatcttggctttggcgaatatctcttttgacaaagcacaccctggggagacagtgataatgaaagctcaccctggggctaaatttccccatagcccgtggggtgacttccctggtcacccaaggcagtgcatgcatgttggggtttcctttaccttttctataagttgtaccaaaacatccacttaagttcttttgatttgtaccattccttcaaataaagaaatctggtacccaggtgttgtctttgaggtcttggatgaatcagaaatctatccaggctatcttccagattccttaagtgccgttgttcagttctaatcacactaatcaaaaagaaacgagtatttgtatttattaaactcattagtttgggcagtatactaaggtgtggctgtcttggattcagatagaactaagggttcccgactctgaatccagagtctgagttaaatgtttccaatggttcagtctagctttcacagtttttatgaataaaaggcattaaaggctg

SEQ ID NO: 27392 - DNA, 547 bp, Homo sapiens; identical to SEQ ID NO: 27025
  SIMILAR (546)..(265): 1001254mologous to Homo sapiens HSPC102,accession number AF161365,Smith-Waterman Score=492.

SEQ ID NO: 27393 - DNA, 825 bp, Homo sapiens
  SIMILAR (726)..(133): 941254mologous to Homo sapiens Human secreted protein fragment encoded from gene 21,accession number Y07872,Smith- Waterman Score=986.
  misc_feature (1)...(825): n = a,t,c or g
gggggttcccatatcttttattaacagtctcccctccagaagcagtgagtgccacagagaaataaaactgagactgaatctccagcagccagatgggcccaggtgtctcatcttctccaggcctgggtgtcagcccagcttgataaacagcagcaaagtggcaagaattcctggcaactgtatcactgcagctcccagagagctcccactcagggtgaagctctgagtcttggtgatttttaggagtttatcgaaacagcccttctggtggatgacgtttggagacacatcgcgtccgtcacaggacacacttccgatggatttacagcaactcctggggtaggtgtggcccgttgtcatttcgaaggaagagccagaaaaatctgtgtagttattcaccccacagcactttagcttctccatgaccaagttccactgtgtagaatagtcgtctggctcgttgtaacctctgtaattcttcctcagggtcacgaaggtgtgttccaaggccacatctccaacaaacaagagcgtgcctctgctctctntagtcgctccataccacccggcacagccaagcagtaccgtgatgcatcccatcaccaggcacaggttgccaacgtgaaggatgtatgcggaggacagnccgatgacattcgtcagagaagcccctgcacatttaccaccgatgcgcagccnanctaggatgatgccagacacagccacgcaagccattgagtaaacgatacagtntcttccaggacgaatacngagtgtggatttcagacatgctgaacagactggggcaccctngaccattaagta

SEQ ID NO: 27394 - DNA, 570 bp, Homo sapiens
  SIMILAR (522)..(316): 981254mologous to Homo sapiens Human secreted protein, SEQ ID NO: 7497,accession number G03416,Smith-Waterman Score=334.
ctagttggcctgggcattggtggtaaatgtggaggggcctctctgacgaatgtcctcgggctgtcctccgcatacctccttcacgttggcaacctgtgcctggtgatgggatgcatcacggtactgcttggctgtgccgggtggtatggagcgactgtcccggatctcctgggccagcagctgcaggcagcgagtggtgcgggcccgctgcatctcctcactgtcacgcagggtcttctccagcccctgaaggccttgggtcagggccccatacagctcctgccggccctgctccatgccccacttgtgctcctccttctctccctggcggcctgtggggctcagcacctcttcaagctgctgaatcttgatttgctgcaagcagctctccttctccaacatggtcactgagtggttcaggaactcgaaagccttggtctgggcctgtaactggctcttgagtgactcaagttcacatcgcaggagcttctgggagtcgggaatcatcacaatggtcttggctgaggtcaggagttcgagaccagcctggccaacatggagaaaccccat

SEQ ID NO: 27395 - DNA, 1014 bp, Homo sapiens
  SIMILAR (1)..(471): 1001254mologous to Homo sapiens GTP-binding protein,accession number AF081353,Smith-Waterman Score=819.
atggcatcagctggagacacccaggcaggcccacgggatgcagcagatcagaacttcgactatatgttcaaactgctactgataggcaacagcagtgtgggcaagacttccttcctgttccgatacgcggacgactccttcactcccgccttcgtcagtactgtgggcatcgatttcaaggtcaagaccgtctaccgccatgacaagaggatcaagctgcagatctgggacacagcgggccaggagcgctaccgcaccatcaccacggcctactaccggggagccatgggcttcctgctcatgtatgacatcgccaatcaggaatcctttgccgctgtgcaggactgggccacgcaaatcaagacctactcctgggacaacgcccaggtcatcctggtggggaacaagtgtgacctggaggacgaacgtgttgtgcctgctgaggatggccggaggctcgccgacgaccttgccgcatctacagcctcgcgcgtctcctggcggcggcccgtggaagcgcggccctacgtgccggggctgggccaggactctccctgccaaacacgtccaaatgtgcccgggtgccccagggaccccgcccagccgctaaagtgctgtggggtgaataactacacagatttttctggctcttccttcgaaatgacaacgggccacacctaccccaggagttgctgtaaatccatcggaagtgtgtcctgtgacggacgcgatgtgtctccaaacgtcatccaccagaagacctgcggcaagtccttcaagaggaagaaccacctggaggtacatcggcgcacccacaccggcgagacccccctgcagtgcgagatctgtggctaccagtgccggcagcgcgcgtcgctcaactggcacatgaagaagcacactgcggaggtgcagtacaacttcacgtgcgatcgctgcgggaagcgcttcgagaagctggacagcgtcaagttccacacgctcaaaagccacccggatcacaagcccacctga

SEQ ID NO: 27396 - DNA, 974 bp, Homo sapiens
  SIMILAR (89)..(775): 1001254mologous to Homo sapiens tetraspanin TM4-B,accession number AF133424,Smith-Waterman Score=1197.
ctcagatccctatcatcttgggaaacagtagcccagaggttcaggaagatgttaacttaaattttcggggtgccccagtctgttcagcatggctgaaatccacactccgtattcttccttgaagaaactgttatctttactcaatggcttcgtggctgtgtctggcatcatcctagttggcctgggcattggtggtaaatgtggaggggcctctctgacgaatgtcctcgggctgtcctccgcatacctccttcacgttggcaacctgtgcctggtgatgggatgcatcacggtactgcttggctgtgccgggtggtatggagcgactaaagagagcagaggcacgctcttgttttgcatcctgtcaatggttattgtcctcatcatggaagttacagctgccacagtggtccttcttttctttccaattgttggagatgtggccttggaacacaccttcgtgaccctgaggaagaattacagaggttacaacgagccagacgactattctacacagtggaacttggtcatggagaagctaaagtgctgtggggtgaataactacacagatttttctggctcttccttcgaaatgacaacgggccacacctaccccaggagttgctgtaaatccatcggaagtgtgtcctgtgacggacgcgatgtgtctccaaacgtcatccaccagaagggctgtttccataaactcctaaaaatcaccaagactcagagcttcaccctgagtgggagctctctgggagctgcagtgatacagttgccaggaattcttgcccctttgctgctgtttatcaagctgggctgacacccaggcctggagaaaattagacccctgggcccatctggctgctggagattcagtctcagttttatttctctgtggccctccctgcttttggaggggagactgttaataaaagatttgggaaacccctgaaaaaaaaaaaaaaaaaaaa

SEQ ID NO: 27397 - DNA, 411 bp, Homo sapiens
  SIMILAR (152)..(388): 381254mologous to Hordeum vulgare pZE40,accession number X68600,Smith-Waterman Score=103.
atgggcttctctagccctggcccttcccgcgggacgtccagcctcctcctctcggcgtggctgattgctcttcctccttcgtctgttgcacgtggaaggtcggagggcgtggctgtgaagctcccgttcctcctcatggcattgattgctgtccccttcgcacccgctgaccgcgcccccgccgcgcccgccgcgcccgccgccgaccagggctcctggtgcctgtgccagctcaatggggccgccgacctcgaagtttccgaaggacctcaccctgcccggggacgcggccctcgggtgcgggactcccgcgactggaggagagggcgcgtcttcgcgggccagaagcgagactcagagagcccgggcaccgaccccggggcggtcctggggcagggctggctctgctag

SEQ ID NO: 27398 - DNA, 888 bp, Homo sapiens
  SIMILAR (334)..(615): 981254mologous to Homo sapiens ELOVL4,accession number AF279654,Smith-Waterman Score=499.
atgagccccacaagagaagcaccttatcttacactctattgtaccctcagtgcttatggcagtgcctggcccatggtgggcctcagtaaatacctgcagaaggagaaattcctgaatgaacacagagaggactttagcaacgcattcggccttggagaagataaaggaggaaattttctaaggctctcacctccctctagcggccgccaaggacatcacacacgccgagcggaagccctgctgggcggtgctgccggctccaaccccggaaaggccacgtccgagagagctcacctactttctcctggaggggctgcgctggtaagtgaagagtctaatgctgataagcgtgtggaaaattggcctctgatgcagtctccttggcctacactaagtataagcactctttatctcctgtttgtgtggctgggtccaaaatggatgaaggaccgagaaccttttcagatgcgtctagtgctcattatctataattttgggatggttttgcttaacctctttatcttcagagagttattcatgggatcatataatgcgggatatagctatatttgccagagtgtggattattctaataatgttcatgaagtcaggattcaattccatgtgaccattgggcacacggcactgtctctttacactgactgccccttccccaaatggatgcactgggctctaattgcctatgcaatcagcttcatatttctctttcttaacttctacattcggacatacaaagagcctaagaaaccaaaagctggaaaaacagccatgaatggtatttcagcaaatggtgtgagcaaatcagaaaaacaactcatgatagaaaatggaaaaaagcagaaaaatggaaaagcaaaaggagattaa

SEQ ID NO: 27399 - DNA, 1203 bp, Homo sapiens
  SIMILAR (259)..(1200): 1001254mologous to Homo sapiens ELOVL4,accession number AF279654,Smith-Waterman Score=1716.
cactgtgctggcggctgggccttctccacctcctcgtctttctgccgggaaccttgacgacgccttccgcttggccctgccttctgccgcatccccgccgccgcggcgccttgaggagcaggagaagacgcagccgggccgccgccgttagaggggttcccggccgccgctcgccccgtcggccgccaccgcctccggggtcagccctctctctgggtctccgctttctcctgccgccagcgcccgctcatcgccgcgatggggctcctggactcggagccgggtagtgtcctaaacgtagtgtccacggcactcaacgacacggtagagttctaccgctggacctggtccatcgcagataagcgtgtggaaaattggcctctgatgcagtctccttggcctacactaagtataagcactctttatctcctgtttgtgtggctgggtccaaaatggatgaaggaccgagaaccttttcagatgcgtctagtgctcattatctataattttgggatggttttgcttaacctctttatcttcagagagttattcatgggatcatataatgcgggatatagctatatttgccagagtgtggattattctaataatgttcatgaagtcaggatagctgctgctctgtggtggtactttgtatctaaaggagttgagtatttggacacagtgttttttattctgagaaagaaaaacaaccaagtttctttccttcatgtgtatcatcactgtacgatgtttaccttgtggtggattggaattaagtgggttgcaggaggacaagcattttttggagcccagttgaattcctttatccatgtgattatgtactcatactatgggttaactgcatttggcccatggattcagaaatatctttggtggaaacgatacctgactatgttgcaactgattcaattccatgtgaccattgggcacacggcactgtctctttacactgactgccccttccccaaatggatgcactgggctctaattgcctatgcaatcagcttcatatttctctttcttaacttctacattcggacatacaaagagcctaagaaaccaaaagctggaaaaacagccatgaatggtatttcagcaaatggtgtgagcaaatcagaaaaacaactcatgatagaaaatggaaaaaagcagaaaaatggaaaagcaaaaggagattaa

SEQ ID NO: 27400 - DNA, 1365 bp, Homo sapiens
  SIMILAR (875)..(1006): 471254mologous to Lycopersicon esculentum cell wall hydroxyproline-rich glycoprotein,accession number M11759,Smith- Waterman Score=102.
ctagtcaaacacctccagcctgtggctgcctgcactcaatccggtagggtctgggactcctccaatgtctgctgacctaagtgttggctcatctctggggctgttgccaacctgtctctgatcaaggctcttcccactacaactgtactgctccccaccctcatcttttgccactgctgcccaagctgcagcgtcttgctcggggcctgcctcatcactgctgacagctgctgttgccgcgactgctcctggtaatggatctgctctcttgctgctggaaggagccaactctcctgctcccgccgtccctccgctgaagaccgtgcgccccggagtgggtctaacgcaaccctgagctcgggttctgcagaggaccgggtcccctgcccctgcctgcaggtctccagctccctcagtccacagcatcattatcttgtctgcagctgggtagtctggctcttcatttattcttccaaacatggctagcatcacagatcccttgcagttgtacagggcctcacactcagaagggcccaggtttgttttaatactctgccgtgctatcttgaaagtcttaattttacttttgaacctatgatttgtaggtgatgtctgctgggacaatggcgcacaagcagaggagatattcatcagctgtacatctgctgttccttgctgccccacaagcccagaattctggttgtggcttccagcctcctcagatcccagcacacagccccgccggacttcccccggagcggtctccaagagtgggcactgcgtgatctgattcactccaaatctggctgtcccccgggagtggggtttggccgtaggggctccccggcagcgccaggcagagtctgagcagcagccgccgcctgcacgcagagttaggagccagcctccgccgccgcctcctccgtcctgtactcgagtgacgcacagacaccccccgcccacagcccagacgccccctccctcgctgccaccccgacccgtctcggagctggactgggtgccgacttcttcgcagaagggtgagtgctgtgctgggttgggtgaggaggatctgaaaaaatgtggtggccggtccacttgccgtgatgtgtaagtcttgtatgggaaacgtttattcatggctgtgcagttgaccatactcattgctggatcagggtgtattcttgtcttcagacaatcaagcaggtaaaaaccagtcgagactaagcagttggactgactcaatttctctttttcgtctctgttgagaaatgttttaactgtgtttcttgcccctacttcttggtctaccaagcagttaagcagttttgttgttttagtgccgctgaacgtgaactggtgcat

SEQ ID NO: 27401 - DNA, 401 bp, Homo sapiens
  SIMILAR (168)..(380): 971254mologous to Homo sapiens Similar to KIAA0121 gene product,accession number BC000763,Smith-Waterman Score=358.
gcggaggcgacttccatctcccgggcaggatgcgtgcggttttctgccgtccccgggagcacatgacgcctgggaagcagtggccgggaggtgattcatccgggcgagcggggcctggaaaacaatgtctgtcttgaagctccgggaaccaggaaaatgagctggaaatgaacaagactgccaatggagactgccgcagagacccccgggagcggagccgcagccccatcgagcgcgctgtggcccccaccatgagcctgcacggcagccacctgtacacctccctccccagccttggcctggagcagcccctcgcactgaccaagaacagcctggacgccagcaggccagccggcctctcgcccacactggaccccgggggagcggcagcagaaccggcc

SEQ ID NO: 27402 - DNA, 504 bp, Homo sapiens
  SIMILAR (26)..(187): 491254mologous to Homo sapiens Human secreted protein, SEQ ID NO: 4573,accession number G00492,Smith-Waterman Score=106.
aattttactttcagtttgggggtacatgtgcaggtttgttatataggtaaacttgggttgtgggtgtttgttgtgcagattatttcatcacccaggaattaagcctagcacccattatttatttttcctgatcctctcccacctcccaccttccaccctctgataggccccagaatgtgcttttcccctggtttagctctgtgtccccacccaaatctcatcttgaattgtagctcccataattcctacgtgttgtgggagggaccaggtgggaaataatttgaatcatggggtcggtttccccatgatactgttcttgtgatagtgaataagtctcacaagatctgatggttttatcaggggtttccgcttttgcatcttcttcattttctcttgccaccaccatgtaagaagtgcctttcacctccctggtcatgattctgagatctccccagccacatggaagtatatgtccaatgaaacctctttttcttcccagtctca

SEQ ID NO: 27403 - DNA, 402 bp, Homo sapiens
  SIMILAR (187)..(107): 461254mologous to Homo sapiens Secreted protein encoded by gene 151 clone HNHED86,accession number W88684,Smith-Waterman Score =52.
tttttttttttagtttataaaggaaagaggtttaattgattcacaggtttgtagggctggggatgcctcaggaaacttacaatcatgacagaaggggaagcaaacatgtccttcacatagtagcaggaaggagaagtgccaagcaaagggggaaaattcctttataaaactgtcagatcttatgagaactcactatcatgagaacagcatgggggtaactgccccctgtgatttaattaactcccattgagtccctcccacaacacgtggggattatgggaactacaattaaagatgagatttgggtggggacacagtcaaaccatatcaccatacatctggcaaagggttaatatcccaaatatataagggactcaagtaacccaatagcaataaaacaac

SEQ ID NO: 27404 - DNA, 855 bp, Homo sapiens
agcttactaatggtactcaacaagagactatcaaatactctaaaagctcaatgtgacagtgaaaaatatcctggaggggaccagcatccccagaagatgttaaaatggattttatttgaattattgctggaccagggaactcagaacactcctgaacttgtggcgtttgtggcccatcaggaaataaggattaagatgctcataaaatatttgttggccacctactatgaggactgcattgcccaatgcatcttgggggatgcacaagactgccccctgctgccagtccagagagcacgtgcactgccccatgacacccactgctccggggttccaggaacaaggttaaggttctactacaaagacagtcatggccaaggcggctgggcttttggggtcaacatcagagagagggagaagaggaggaggaaaactggagagctcagagttccaggaaatgccaccaaccttccgtcaggttccctgtggccctcaggaacatctgtcagccctggggtccacatatctcctagccagctggacaacaggggtcatctggaatccctcttctacattcagggccagatctcggccaggtaccactttggctctgtggcattgggtataaaggaaacagcactggacttggggcaagacgctcccaattttggatccgggctctaccagccaccagctctctgtgggctagctcgtttctcaggactcagtttccccgcaggaaaatacatctctccattttaccaccaaccatacagaggttatcaaggatacataaaacaactggaaagcacagacccagaacctggcaccgagcagggcctcaggaaatgttaa

SEQ ID NO: 27405 - DNA, 491 bp, Homo sapiens; identical to SEQ ID NO: 19991
  SIMILAR (180)..(28): 471254mologous to Homo sapiens Human secreted protein encoded by gene 20,accession number Y36243,Smith-Waterman Score=106.

SEQ ID NO: 27406 - DNA, 1350 bp, Homo sapiens
  SIMILAR (709)..(1347): 951254mologous to unidentified cloning vector chloramphenicol acetyltransferase,accession number U13846,Smith-Waterman Score= 1103.
atgctgaagtactacagcacgcatttaccaccgtctccccgggacctggtggaggcgtctgtcacagtccctggtgaaggacacctggagtgccttcatggggcctgtagccccagccctggtcccacccccacccgcgaagctgctctcaggggagaacccagaatacagaccctgccggtggcctctgccctcagcagtcaccgcaccggccctcccccaatcagccccagcaagaggaagttcagcatggagccaggtgacgaggacctagactgtgacaacgaccacgtctccaaaatgagtcgcatcttcaacccccatctctccagcgtcctcgcattccgctcgttccagtcagcttggactgttgtgttcagtcataagacactgacagagaaaagtcttaagaagatgaatgtctgtttggaagttgaaaagtactctgtgtttggaaagagtggattaaaggatgggaagaggtggagtgggattcatcttgtggaaaaatcactcctcactctggatttcagctgcgtggcactctattacctgcatgcatcaaagctcatccaaccagtcccctgtgtttggacattttggcaatttcaggctttgcagaactttcagcggtataccggcatacagcatgtgcatcgcataggaatggcggaacgtatgtggtgtgaccggaacagagaacgtcacaccgtcagcagcagcggcggcaaccgcctccccaatccagaacattttgaggcatttcagtcagttgctcaatgtacctataaccagaccgttcagctggatattacggcctttttaaagaccgtaaagaaaaataagcacaagttttatccggcctttattcacattcttgcccgcctgatgaatgctcatccggagttccgtatggcaatgaaagacggtgagctggtgatatgggatagtgttcacccttgttacaccgttttccatgagcaaactgaaacgttttcatcgctctggagtgaataccacgacgatttccggcagtttctacacatatattcgcaagatgtggcgtgttacggtgaaaacctggcctatttccctaaagggtttattgagaatatgtttttcgtctcagccaatccctgggtgagtttcaccagttttgatttaaacgtggccaatatggacaacttcttcgcccccgttttcaccatgggcaaatattatacgcaaggcgacaaggtgctgatgccgctggcgattcaggttcatcatgccgtttgtgatggcttccatgtcggcagaatgcttaatgaattacaacagtactgcgatgagtggcagggcggggcgtaa

SEQ ID NO: 27407 - DNA, 451 bp, Homo sapiens
  SIMILAR (391)..(287): 621254mologous to Homo sapiens Human secreted protein encoded by gene 81,accession number Y00337,Smith-Waterman Score=118.
ctgggtaatttgtaaaggaaaaaagtttactgtgactcacagttcagcatggctggggagacctcacaatcatggcagaaggcgaaggaggagcaaaggcacatattacatggcggcaggcaaaaggcacgtcttacgtggcagcaggcaggagagtgtgtgcacagaaactcccctttataaaaccatcagatcttgtaaagacttattccagtacccatgaagaacagtatgggggaaaccaccccccatgattcaattatctcccactgggtccctcccacaacatgtgggaattatgggagctacaattcaagatgagatttgggtggggacacagacaaaccatatcactgtagtatgaagtgccttggctatgtggcagttgggcagagccaaaggaagatgacacctcttagacaggatgatgtgtctgtcctgatgaagtcct

SEQ ID NO: 27408 - DNA, 3583 bp, Homo sapiens
  SIMILAR (489)..(740): 391254mologous to Hordeum vulgare pZE40,accession number X68600,Smith-Waterman Score=111.
cgtgtgcgcgtgtgcgagtgtgaagtgcagcgctggagtgcaacatgctgtaatgggaggaaacccagcggcgtcggagcgcccgggaccgccgcggccgttctgagcgcagtggcgccgagcagcccctcccgcagccggtgtgacctgtcccttcaggctccaaccaggaatggagacgccattggatgttttgtccagggcagcatctctggtgcatgctgatgacgaaaaacgcgaagctgctctcaggggagaacccagaatgcagaccctgccggtggcatcatgccctcagcagtcaccgcaccggccctcccccaatcagccccagcaagaggaagttcaagcatggagccaaggtgacgaggacctagactgtgacaacgaccacgtctccaaaatgagtccgcatctttcaaccccccatcttgaacaagactgccaatggaagacttgcccgcagagacccccgggagcggagccgcagccccatcgagcgcgctgtggcccccaccatgagcctgcacggcagccacctgttacacctccctccccagccttggccttggagcagcccctcgcactgaccaagaacagcctggacgccagcaggccagccggcctctcgcccacactgaccccgggggagcggcagcagaaccggccctccgtgatcacctgtgcctcggctggcgcccgcaactgcaacctctcgcactgccccatcgcgcacagcggctgtgccgcgcccgggcctgccagctaccggaggccaccgagcgccacctgtgtctgactgcctgccttcctgcttgcctgcagctgccaccacctgtgaccccgtggtggaggagcatttccgcaggagcctgggcaagaattacaaggagcccgagccggcacccaactccgtgtccatcacgggctccgtggacgaccactttgccaaagctctgggtgacacgtggctccagatcaaagcggccaaggacggagcatccagcagccctgagtccgcctctcgcaggggccagcccgccagcccctctgcccacatggtcagccacagtcactccccctctgtggtctcctgaagggagcgcctcctccaacaacacgtggatctgcatggtttgcctgagctttgaacagtcagtacttaaaaaaaaaaaaatcatgggggtggggtggggggaagggaagggatggtttatttgcaaaaaccatgttgttgggatttgtgttctgtttttgtacttgcttggtatccgtacaagggggccctcaaacatgatagcaggaactacgcgtggaacatctgtctaatgtagcatccttacttcctgcctcagttaccaaagaaacctctgatgcaggtctgctgccccgacggggccaggactccacagcgctttctcagtcacaagccatgatgaattggtgactcagacgctttgtgctttttcctttgcttcttgagaccggggtgtgtgtggctcagcttccacggcgtgtttggttcggtccatgtgtgtgcgtgtgtatacttgaagagaactgtcgtgtctgatttgcactattggaggaggactaaagttgcgtgacaactttatgtgttatgccagaactctgagggcaaactgctgaaaaacaaagggtttaaggatgacatttctgaccatttgtgtgtttgttgttgttactgtttttgttttttttaatgtagacaatacagctttggaaggggaagtctcatacaggttataggtctttctctctctagatttcaggtgcttgcaactggactgcagactctaccaatcacgggcattttatcttctctgaacactgcagtttgttagactagagctgaggttggaggattccatagtgctttaaacgtgatgcatgttttaatggagaaaaaatagctggtttctattaattatatagacagtaaacaaaaaccttaatacttactatcttcttttcagaattagtttatttttgtcagttacagtcctagatatacttactgctggtacagttgtactctaagattggtatttgatattcactttactcacaagtagtgcgggaggccagctcctggcaggccctcgcgatgagcagtgggtcagctgcggtgtgggatgctggagtttggctgcaggctgacatcatttatttttgcatccctgtctgctttgttacaagctcccaggggaggtggggtttgtgtcttccaacttccctacatgcagaaactgctccctttgaactctcttggctgaacagcagattactgacagacaatctgtgatatggtgttttatacgcttcctcgtacgctggggccaaggcagtatacattcctctgactttatactgttattactgcatttattatttgctatattaatagctactaactagaaattagatgaagcaagcatgacagacacagctgtggaggtcacagctgctcctttttggtcaatgagcgtttctatcccctccccctggggtgtgctgtgtcccacctggcccaccagaggctcacgacgatggcacctgaccaggtgacgtgggcgtggtcacctcacctgcaaggctttgtggactctgcacaccgtatgacccccggttttacagtttttagctgttgaattttggaaattggcactgggtgaaaaggtcggaggactggctcttgtagtcacagagtggctgcaggcctttgaaaagtggaggaaagaaaagcccttctccttgccccgcacacatttcactcccactgtactgggcttccaagctttggcattcaggcccctatattttctgtaggaaaaatcgttgagaacacttttctatatgggtgattttgagaccatcgttacgctgtgcgtaaagaatgtacagagaaatttgtaggtattttttgaagaacattaatttgttaatgatatgtagctatttaatttttccctttcctattgtaatcattcattttttttgttgttcggaaaaaaaaagttgatctttttttttgtcgtagatttgtctgtaaaagtgcaggaacagttattctatgagaacactgcatctgcattcatagccacgagtttgttattgctacaggctactgagcgtcgtaacaggaaaaccacccacagctgaccggctcggtggaggacactcctgggacaggtctctttgtcagtgaacaagggcgtcactctgggaggggtcggcggtgctggcggccgggtccctggtgcactgacctatctgggataggcagtaccctggaggggggcctggggcagaggaggcagcagaaaaccaaacatttcactgagaaagccccctccctgctctaagaaggggctccgtgaagttcttcccagagccgcgctgcctgcagtgcgctctgaccttctcttcatgtgtgtaaatctgtaatataccattctctgtggcctgtttttcctggaagaagaaaaaaaaaggtttggcaggccatctttttttgtacttaaaagtagccttaagaacaataataaagtgctcttaaacc

SEQ ID NO: 27409 - DNA, 1689 bp, Homo sapiens
  SIMILAR (305)..(853): 331254mologous to Cucumis sativus expressed in cucumber hypocotyls,accession number AB029147,Smith-Waterman Score=158.
atggccatgctgtgtccggagttggttccttctggtgggttcttggtctcgctgacttcaagaatgaagctggggaccttcgcgcaagctgagatgctgaagtactacagcacgcatttaccaccgtctccccgggacctggtggaggcgtctgtcacagtccctggtgaaggacacctggagtgccttcatggggcctgtagccccagccccggtcccacccccacccggctggaccatgggaaggcggctggcattcaggcagttgtgaccatgctccggaacaagactgccaatggagactgccgcagagacccccgggagcggagccgcagccccatcgagcgcgctgtggcccccaccatgagcctgcacggcagccacctgtacacctccctccccagccttggcctggagcagcccctcgcactgaccaagaacagcctggacgccagcaggccagccggcctctcgcccacactgaccccgggggagcggcagcagaaccggccctccgtgatcacctgtgcctcggctggcgcccgcaactgcaacctctcgcactgccccatcgcgcacagcggctgtgccgcgcccgggcctgccagctaccggaggccaccgagcgctgccaccacctgtgaccccgtggtggaggagcatttccgcaggagcctgggcaagaattacaaggagcccgagccggcacccaactccgtgtccatcacgggctccgtggacgaccactttgccaaagctctgggtgacacgtggctccagatcaaagcggccaaggacggagcatccagcagccctgagtccgcctctcgcaggggccagcccgccagcccctctgcccacatggagtctgtcctgaagacacacctccactatacgaaaggatattatcccctgctgcatgatctcttacaggaaaagactgggaacaggcccaagaggccctcagcggggaaccagctgactaaaccatttgatgcacatccacacctggactactgtggccctgaaacacaccccctgctgccagtccagagagcacgtgcactgccccatgacacccactgctccggggttccaggaacaaggttaaggttctactacaaagacagtcatggccaaggcggctgcgagacgctactcagcgacagaaaggcaccaagcgctgacacacgcaatgatgcaggtgaacctccaggcggctgtgcagggcaggacaggccagacagacctgctcgatgtcgccgaactgtgctggttccacaagcgagaacatctgtcagccctggggtccacatatctcctagccagctggacaacaggggtcatctggaatcccacactgggacctatgccctcttccctccacctttccctggcctcttctacattcagggccagatctcggccaggtaccactttggctctgtggcattgggtataaaggaaacagcactggacttggggcaagacgctcccaattttggatccgggctctaccagccaccagctctctgtgggctagctcgtttctcaggactcagtttccccgcaggaaaatacatctctccattttaccaccaaccatacagaggttatcaaggatacataaaacaactggaaagcacagacccagaacctggcaccgagcagggcctcaggaaatgttaa

SEQ ID NO: 27410 - DNA, 1779 bp, Homo sapiens
  SIMILAR (864)..(1193): 341254mologous to Mus musculus proline-rich protein,accession number M12099,Smith-Waterman Score=99.
atgctgaagtactacagcacgcatttaccaccgtctccccgggacctggtggaggcgtctgtcacagtccctggtgaaggacacctggagtgccttcatggggcctgtagccccagccctggtcccacccccacccgcgaagctgctctcaggggagaacccagaatacagaccctgccggtggcctctgccctcagcagtcaccgcaccggccctcccccaatcagccccagcaagaggaagttcagcatggagccaggtgacgaggacctagactgtgacaacgaccacgtctccaaaatgagtcgcatcttcaacccccatctccccctgctgccagtccagagagcacgtgcactgccccatgacacccactgctccggggttccaggaacaaggttaaggttctactacaaagacagtcatggccaaggcggctggtctggcagtctagaagaagggggggctgtgcagggtacccagccaaggcagagtccagaggaagtcaaggaagagtatgaatgtccctcccacaacacgtgggaattatgggagctacaattcaagatgagattgggtggggacactgccaaaccatatcagatgtccaacatcgtcagccatcaaggaaatgcgaatcaataccacaaagagataccactaacacctgttaggatggctatgatcaaaagacaatacaaaagtgttagcaaggatgtggagaagctggaacacgtgtacgctgctgttccactccacgatacctgcctttcttacacggtcacccatatgctgcttctcttcattcacccgttaagtctctgtgcacccctggtagcaagcgtaatgagacaggagggactcgacgccctcagaggctgccgtgtgaacaagactgccaatggagactgccgcagagacccccgggagcggagccgcagccccatcgagcgcgctgtggcccccaccatgagcctgcacggcagccacctgtacacctccctccccagccttggcctggagcagcccctcgcactgaccaagaacagcctggacgccagcaggccagccggcctctcgcccacactgaccccgggggagcggcagcaggcagaacctggctctctggccattgccactgctgttggggagtccctgaaggacacgggaacatctgtcagccctggggtccacatatctcctagccagctggacaacaggggtcatctggaatcccacactgggacctatgccctcttccctccacctttccctggcctcttctacattcagggccagatctcggcccaggtacccactttggcctcctgtggccattgggttataaaaggaaaacagcactggaacttggggcaaagacgctccccaattttggatccgggctcctaccagccaccagctctctgtgggctagctcgtttcctcaggactcagtttccccgcaggaaaatacatctctccattttaccaccaaccatacagaggttatcaaggatacataaaacaactggaaagcacagacccagaacctggcaccgagcagggcctcaggaaatgttaagcctgagttttaatctgaggtcacagggcagatgatgaagtgtggagtgagagccctcttgggattgactgaggagttcgtgttgcatgtgtagtttgttttataatcactctcattgtgacccctggatctttgagagaaaatgggaactgagactaagaaatcaggaaggaaaatggggctctatgaaggaagtc

SEQ ID NO: 27411 - DNA, 366 bp, Homo sapiens
  SIMILAR (160)..(354): 951254mologous to Homo sapiens similar to rat olfactory receptor OR18; similar to S29710 (PID:g423702),accession number AC004908,Smith-Waterman Score=311.
ggggtggaggacgagctggtgcctccagagtcgcagtggctggtgctcccgctgccgctggggctcccgctggcggagggtggcgactgtgaggacagggacggggagctgtgctggtttatgcactgggccacggcgaagcctgcaagacaaagtaccagtctctccttcattgacttaggagcctgctctgtcacttctcccaagatgatttatgacctgttcagaaagcgcaaagtcatctcctttggaggctgcatcgctcaaatcttcttcatccacgtcattggtggtgtggagatggtgctgctcatagccatggcctttgacagttatgtggccctattaagcccctccactatctga

SEQ ID NO: 27412 - DNA, 1730 bp, Homo sapiens
  SIMILAR (792)..(1727): 1001254mologous to Homo sapiens similar to rat olfactory receptor OR18; similar to S29710 (PID:g423702),accession number AC004908,Smith-Waterman Score=1612.
atgaagtttcatgacagaggccaaatccagcccaaacccagcccagcagaggctgtcaactcagcgccccagcgagagccggaaggttccatcctcagagctgcagaccctctcgtgtgggctgcaaaggccatgtctgcatcccgggcgccctgggcccgacccctactacgcctctgcctcgacgcgaacgcggagcccgagcgcgcgtcacgccgtgtggggccgaagaggctgctacccagaggcggagtgcgggctcgcgagggtccccaccccactctcgctcccgccagcacctacggactcgcgtccccgccgcgcgccgactcgggagcagcaccgcccccggcacaggagcctcacgcgcctcttacctaacaggaagttgggtggaagcagcgcggacccacggcacaccgaacgcactccaacagaacccgacgcagacacgggcccctctgctgtttgcctgtgtacagcctagggacttggtgctctgtgtcccagctgctccagccacagctaaaaggggtcaaggtacagctcaggccatggcttcagagggtgcaagcctcaagctttggcagcttccatgtggtgttgagcctgtggattcacagaagtccagaatcgaggtatgggaacctccacctagatttcagagaatgtatggaaatgcctggatctccagacagaagtttgctgcagggatacttgtgaaaggatattgtggaggaggagctgggggtattctcataattttagccacagcccagttggctggaccaatggatggagagaatcactcagtggtatctgagtttttgtttctgggactcactcattcatgggagatccagctcctcctcctagtgttttcctctgtgctctatgtggcaagcattactggaaacatcctcattgtgttttctgtgaccactgaccctcacttacactcccccatgtactttctactggccagtctctccttcattgacttaggagcctgctctgtcacttctcccaagatgatttatgacctgttcagaaagcgcaaagtcatctcctttggaggctgcatcgctcaaatcttcttcatccacgtcattggtggtgtggagatggtgctgctcatagccatggcctttgacagatatgtggccctatgtaagcccctccactatctgaccattatgagcccaagaatgtgcctttcatttctggctgttgcctggacccttggtgtcagtcactccctgttccaactggcatttcttgttaatttagccttctgtggccctaatgtgttggacagcttctactgtgaccttcctcggcttctcagactagcctgtaccgacacctacagattgcagttcatggtcactgttaacagtgggtttatctgtgtgggtactttcttcatacttctaatctcctacgtcttcatcctgtttactgtttggaaacattcctcaggtggttcatccaaggccctttccactctttcagctcacagcacagtggtccttttgttctttggtccacccatgtttgtgtatacacggccacaccctaattcacagatggacaagtttctggctatttttgatgcagttctcactccttttctgaatccagttgtctatacattcaggaataaggagatgaaggcagcaataaagagagtatgcaaacagctagtgatttacaagaggatctcataa

SEQ ID NO: 27413 - DNA, 1617 bp, Homo sapiens
  SIMILAR (778)..(1071): 981254mologous to Homo sapiens F16601_1, partial CDS,accession number AC005595,Smith-Waterman Score=526.
atgggcttttgtcacctgacactgcagggtgtgctgctggcagctgtggccacgtgctttccagacgagcccccgcaaccccacgagtcctcccagagggctgccctgacaggtgccttggcagctcccatcgtggctactggcccagctcaggccggcactgagggtcccacagtggtccagctgcggcctctgctccctctgagccggtggctccctggggacagtgcgcaggccctgggtgaacactacatggccacatctgggtgtgcttcccgcacagctgcagccatggggtctgaggaccacggcgcccagaaccccagctgtaaaatcatgacgtttcgcccaaccatggaagaatttaaagacttcaacaaatacgtggcctacatagagtcgcagggagcccaccgggcgggcctggccaaggtgggtgacatcctggccccagcgcggccctccatcagcctgcgccgcgggcctgcggacatcctgggtcccagctcagccagccccacaggcgtggcctgtgcacgtggaatgtgtttcggggccactcccagctcgtttaccagcgcctgtttgtggagttccaacaatgtgccaggcaccattctaggcactggagttgagaagtggccggtgcaggccctggctccagggagctggcagggggtgactaggatcatgggcgagtttcctctaatagcactgaagaggcgaattcacggcttcccctcggccagcggctttggcgtggatttggagccgggccagatcatccccccgaaggagtggaagccgcggcagacgtatgatgacatcgacgacgtggtgatcccggcgcccatccagcaggtggtgacgggccagtcgggcctcttcacgcagtacaatatccagaagaaggccatgacagtgggcgagtaccgccgcctggccaacagcgagaagtactgtaccccgcggcaccaggactttgatgaccttgaacgcaaatactggaagaacctcacctttgtctccccgatctacggggctgacatcagcggctctttgtatgatgaccagccggcccacagcgtgttacaaacacgtgtactttcccagtccctgccgctcgtcttcctggcactgtggagcctcgagtcctcagcccgccaggccacctgctggattcggctccaacccggtcctgacttgggctcagggcccggagacactggggtgaggggatctcccatcccgagcctggtctgctggagcgtcctcttgtccacacagcctgggctctccatgagggcagctggccggcatccccagagtcccagcctcaggcataaggtcccccaggccccgctggacgccagaagtgggcctgcgtggcgggtgtgtgtggaacagcagcaggaagctgtgactgccctgaggccacggccagccttggctctgccctgcttagtggaccttgtctgcgctgtggcccgcaggggactgggtttgctctctgagccgagggcgccggtttatgacacggaggattctgttcaggctggaagtgagcccgccctggagaacctgagggagacgcccccgacatggagccaggcataa

SEQ ID NO: 27414 - DNA, 571 bp, Homo sapiens
  SIMILAR (374)..(463): 731254mologous to Homo sapiens reverse transcriptase,accession number L27428,Smith-Waterman Score=115.
atgggtaacgacttcatgtctaaaacaccaaaagcaatgacaagagaagccaaaattgacaaatgggatctaattaaactaaagagcttctgcacagcaaaagaaatcatcatcagaatgaacagacaacctacagaattggagaaaatttttgcaatctatccatctgatgaagggcaatatccagaatctacaaagaacttaaataaatgtacaagaaaaaacaaacaaccccatcaaaaagtgggaaagaatatgaacagacacttctcaaaagaagacatatttgcagccaacaagctattaaaaagctcatcatcactggtcattagagaaatgcaaatcagaaccacaatgagataccatctcatggacatggatgaagctggaaaccatcattctcagcaaactaccacaagaacagaaaaccagaaactgcatgttctcactcataagtgggagttgaacaatgagaacacatggacacacggaagggaacatcacacaccagggcctgtcaaggagtttggggctaggggagggataacattaggcgaaatacctaatgtag

SEQ ID NO: 27415 - DNA, 469 bp, Homo sapiens
  SIMILAR (463)..(371): 641254mologous to Homo sapiens Fragment of human secreted protein encoded by gene 3,accession number Y36366,Smith-Waterman Score=88.
cataagccagacacaattaaatatgtttttcattgtaagtaccatcattactgatttaatagcaattaatattttctttctaatttaaaaatcctcagaaagcaaaaaggcttcaagaaaaagctatagaagcctccagataccataaacgaccacaaaatgcaatatttcaccaaacacatattaaaggccttaacacaatggtaagattctttctccataacattttcttaatagacattaaatttagagtgtttgaacaactgtgcaaatatactgaaaaccattgaattttacccattaaatggatggattgtgtggtattgaattatatctcaataaaactgttcaaaaaaaattttaaatttaaaaattagaagttaaaacaattaataaaaaaaaaaaccccgggcggccgctctagagtatccctcaaggggcccaagcttacgcgtacccagctttcttg

SEQ ID NO: 27416 - DNA, 1152 bp, Homo sapiens
  SIMILAR (727)..(1149): 801254mologous to Bos taurus xenobiotic/medium-chain fatty acid:CoA ligase form XL-III,accession number AJ132751,Smith- Waterman Score=607.
atggatgaagctggaagccatcattgtcagcaaactaacacaggaacagaaaaccaaacactgcatgttctcactgataagtgggagttaaacaatgataacacatggacacagggaggggaacatcacacaccagtgcctgtcaaggggtgctttacaggcttggtgtcacataatcctttcaatgatcccatgcaacaaatcttattaacaaatcctgcttcattttacaaatgtcaagaccaagctttgaaaggaaaatggttcacccaagagctttcttacctccagagcccaggctcttatccattaggctacactgactctcagctgtcatttaagggagactatggtgatgtagggctgggaagggggagcagggacctagttcagctacgtcctaaacagtaccagtggctaatgaggttccggaccctctggggcatccacaaatccttccacaacatccaccctgccccttcacagctgcgctgccggtctttatcagaatttggagccccaagatggaatgactatgaagtaccggaggaatttaactttgcaagttatgtactggactactgggctcaaaaggagaaggtatgtcaagaaaaaccaagccctgtgtcttccagaggttatgtgtttctgcagaaaaccccaagtgcttggtttgtcttctcacaagacacagaccaagagagaagcagtagtgacattaggagtcaggagggcaagagaggtccaaatccagctttttggtgggtgaatggccaaggggatgaagtaaagtggagcttcagagagatgggagacctaacccgccgtgtagccaacgtcttcacacagacctgtggcctacaacagggagaccatctggccttgatgctgcctcgagttcctgagtggtggctggtggctgtgggctgcatgcgaacagggatcatcttcattcctgcgaccatcctgttgaaggccaaagacattctctatcgactacagttgtctaaagccaagggcattgtgaccatagatgcccttgcctcagaggtggactccatagcttctcagtgcccctctctgaaaaccaagctcctggtgtctgatcacagccgtgaagggtggctggacttccgatcgctggttaagtga

SEQ ID NO: 27417 - DNA, 1227 bp, Homo sapiens
  SIMILAR (942)..(151): 991254mologous to Homo sapiens similar to AAC79150 (PID:g3924667),accession number AC005061,Smith-Waterman Score=1392.
ctagcccttcctggtggatcctgtttcagggccttcactcaggctgccctggggatgatgacatcccacactctcggactcctggctcagccttctcagctcactcagtgctttccccaggaaggtgtccgtaaagctgtactccccaccctgaatatagtgaaattctctccatgtcaaagagtcactcacagatggaatagatgtcacagccaacagagccagtattgccagtcccacaattcccagagacacataaatctccattctccaaacatcatgctcaatccaggcatcttctttattttgttggacctgttgatatgcccagtttagcaacttgtatctgtaggatcgcctcattgcgtaagacagagtataaattgcatgcagtacagcaaaaaacaaactgagaagcccaaactgctttcttgttaacatccacttatccaaccaatgtggaaacttcttatacttggttccattatgaacttggacaattgctgctatcacacctggtaggtaaaccaatgccaagagagtgatggaaaccattggcaagactttgttgatgaccaggattggaattttataaaaatattgttgatgggaagttgctaaagggtgaattacttccctcagaagagtgtaaagaaaagtcagagatgccataacagcagctattttaattggcaagtgccactgtggaaagagttcctgtgcgtgctgaagttctgaagggcagtcaaattcatcagcatgggctgtttgctgcaaatgcaaaagcacaggtctttttagcatgctggtctctcccgtgtccttatgcaaataatcgttgtcttctaaatttctcctaggcttcattttccaaatttcttcttggtttgtgatgtcttttctgctttccattaattctataaaatagtatggcttcagccacctgctggcgccccgcgtccgcagggttcgggaacgtccttggaggctaagactccccaagtcgcactccggcctctcccagtttcctctcaaatgccgtctgccctgcccttgaggtccgtttcgcgccctccaacccctcgccttttgtttaatctccactaaggaacgtttgtgcgtttctctagagcagtggttctcagacttcagcgtgtataagattacccgggggcatattaaaacaccgattgttgggctgtccacccacagtttccggttcagcat

SEQ ID NO: 27418 - DNA, 567 bp, Homo sapiens
  SIMILAR (126)..(1): 921254mologous to Homo sapiens Human secreted protein, SEQ ID NO: 7217,accession number G03136,Smith-Waterman Score=196.
atggatgaagctggaaaccatcattcgcagcaaactcacacaggaacagaaaaccaagcactgcatgttctcactcataagtgggagttaaacaatgagaacacatggacacagggaggggaacatcacacaccagggcctgttggggaccagaacaaggaaaggcccacagagaaagccaagctgcatcaaggcaaattttctctacaaatgcagatctcctccataaaagatagctttttagatattctaacatttccagcttttccgaataaccatcttgaaatatgtcgaagaattcctggcatctccaagcttctgggaaccactgcattttcctccacatgggtgcctgcagcagaagccatgtgcaatacatcttgtccagccacagcctcacatggagccggcacctatgccagcgcttggagctgtccatctactgtagcaggcagcatgcttggctgtgcacactggccagatcctgcactcacttgctcacacaccccttaccgctccacacgtaactggcccttggtagatgtggaatccgggctggtagcgtga

SEQ ID NO: 27419 - DNA, 804 bp, Homo sapiens
  SIMILAR (169)..(390): 1001254mologous to synthetic construct lac repressor,accession number A14595,Smith-Waterman Score=354.
atggatgaagctggcaaccatcattctcagcaaactaacacaggaacagaaaaccaaacactgcgtgttctcactcataagtgggaattgaacaatgagaacacatggacacagggagaggaacatcacacaccagggtctgttgggggggattttgccgatttcggaaccaccatcaaacaggattttcgcctgctggggcaaaccagcgtggaccgcttgctgcaactctctcagggccaggcggtgaagggcaatcagctgttgcccgtctcactggtgaaaagaaaaaccaccctggcgcccaatacgcaaaccgcctctccccgcgcgttggccgattcattaatgcagctggcacgacaggtttcccgactggaaagcgggcaatttcaaagaaagtactggcaggcttgggtgcctaggcagaagtctgccacaagggtaaaacccacacagagagaccctactagggcagtgctgaagggaaataaagggtttgaacccccatacagagttcccatcagggccctaccttgtggaactgtgggaatgaggctaccaccctctagacccaagaaagatagagccatccccagctcatacattgagcctggaaaagctacaggcactcaactccaacctgtgaaagcagccatgggctcttcatcctgcaaagccacaggagcaaagcggctcaagaccttgggatcccaccgcttgcatcagtgtgctcatgttacgaggaaaagagtcaaagaatattatttcttgcctgccctgatgggtctcagacttgcgtga

SEQ ID NO: 27420 - DNA, 615 bp, Homo sapiens
  SIMILAR (123)..(1): 871254mologous to Homo sapiens Human secreted protein, SEQ ID NO: 7217,accession number G03136,Smith-Waterman Score=180.
atggatgaagctggaaaccatcattctcagcaaactaacacaagaacagaaaaccaaacactgcatgctctcactcataagtgggagctgaactatgagaacacgtggacacaggaagtggaacctcacctactggagcctctaggaggattttttaaaaatcagcatattcagtcacacaaaagactatttcaagaaattaagggtctcccatacagattctctcaatgtgaccatagggcccctaggaagcttaaggacgttgtgcttcagccccatcagcagcagtcagacaccccactctgggatcttgaaaagagtggaatgaaagtactattctcagagctgtgggcaagatttaaggaacacaaagagatgaatcaaggagagactagctggagcaggaatacgattacccctgaggctactgggcaagtggaggaagcagtgtttccggggcaagtggaggaagcagtgtttccggaccaaatcttgacacgaatgcatcccctagcaggatcggacccagagcataactggcagggattgtcggaatgtacttcccaaaggtcctgtcaccctcatacaaaggtgaagataaaagaggggaaatga

SEQ ID NO: 27421 - DNA, 855 bp, Homo sapiens
  SIMILAR (553)..(852): 581254mologous to Homo sapiens PRO2221,accession number AF116695,Smith-Waterman Score=271.
atgaaccagacagccatatggaagagagtggatcatcaagttggagtgacaagcacggacttcatcatcaaagatccacctaggcctttgctcagtgctctatcaaaatgtgagggaagtggcctgcctgtcctctttactggggcaaatactgccactattgccagcaagcttcatgcttcccagaccctcaaaggcatcatggggcctcaggctaacaaaccacaggaggcaccctactcaagtgaagacaacaaaaatgaagagccctatggtgatctacttcaacttaatgaatgggatatggatgaagctggaaaccatcattctcagcaaactaacacaggaacagaaaaccaagcactgcatgttctcactcataagtgggagttgaacaatgagaacacatggacacagggaggggaatatcacacatcggggcctgttgggggctggggagaaagcaataaaatcaacaaaaaggatgcccacgcaaaaaccccatccaaaggtcatcagcatcaaagatcaaaggtagataaatccataaatatgaggaaaaaccagcgcaaaaatactgaaaattccaaaaaccagaatgcttcttctcctccaaaggatcatgactcctcaccagcaagagaacaaaactggacagagaatgagtttgacgaactgatagaagtagacttcagaaggggggtaataatgaagtgctctgagctaaaggagcatgttttaacccaatggaaggaagctaagaaccttgataaaatgttctgggaactgctaactagaataatcagtttagagaagaacataaatgacctgatggagctgaaaaacacagcgtga

SEQ ID NO: 27422 - DNA, 669 bp, Homo sapiens
  SIMILAR (179)..(12): 801254mologous to Homo sapiens Human secreted protein, SEQ ID NO: 7217,accession number G03136,Smith-Waterman Score=230.
atggaatactatgcagctataaaaaagaatgagttcgtgtcctttacagggacatggatgaagctggaaaccatcatcctcagcaaattaacacaggaacagaaaaccaaacattgcatgttctcactcacaagtgggagtcgaacaatgagaacacatggacacagggaggggaccatcacaaaccagggcctgtcggggggatcccaaactccatattcctaccaacgacatcagtgcaacattgtatgtgtccagagatgggattttgggggcagtcataccaaggatgtgtccttgggaaggccagaaacactaccccagagggagcaacataagccaaggagataccaccaaagtgtttgtgaaagtgttcataacagtttacacacagagaagaatatgatggctccagttgctctacagtcttttcaacacctgatgtttgagggaaggtgcccaggaggctctgtggctgtgggaggcacaccagagcaagctgttgctgaagaagctggagactcaaaaaagaacagagaagcatcaggacaagcacagcctggagaaacaggtgcaggccccatctgctggggaagccctgagggggatgagagatgggtcacaaccagacagtcatctgcccttagggctcagcatagtggcctgtga

SEQ ID NO: 27423 - DNA, 375 bp, Homo sapiens
  SIMILAR (111)..(1): 941254mologous to Homo sapiens Human secreted protein, SEQ ID NO: 7217,accession number G03136,Smith-Waterman Score=179.
atggatgaagctggaaaccatcattctcagcaaactaacacaggaacagaaaaccaaacactgcatgttctcactcataagtgggagctgaacaataagaacacttggacatggaggggaacatcacacgccagggcctgtcgatggttagaaactaagaaatggttttatagcttggccacagatgagggcaaaaaaaaggcaggagaattcaccacagccaataacatgaagggaatcagcgaatcagcactcactgtggttggcctgatgagaacagtgactacaacttctgctgtaattgatgggaacgaattcttctgggatgtgttaatacagctgcaggcagtaaggcaagcagcgaatggaaactaa

SEQ ID NO: 27424 - DNA, 597 bp, Homo sapiens
  SIMILAR (126)..(1): 881254mologous to Homo sapiens Human secreted protein, SEQ ID NO: 7217,accession number G03136,Smith-Waterman Score=190.
atgaatgaagctgaaaaacatcattctcagcaaactaacacaagaacagaaaaccaaacactgcatgttctcacttataagtgggagctgaacaatgagaacacatggacacagggaagggaacatcacacaccagggcctgtcggcggtcttactcccaagctatacctgcaaaagctcttggtggtgcaaatgtgtgtatgcgtgtgcttaggcaagggattgtccagcaagagaagagatgcaaagggtgctggggccactgggggtgccatgctgggaaacttacacattaaccttgggccagtggtctccaaactgaggcttactgactcaatccgtgggtttgggaaagacatcggcattcgtggaaagaaaccagtatcttgcatgagcatttcctggttaattctaatagcaaagaaagtgtgcagctctggagcctttaagcttctgagtgacccaaccaactggccaatggaggctctgtcactctatctggatggatgtgaatcaggaagcaacatagccccagttattaccaggtatcgtcctgcaactactacaacaaagtactttatggtgaaactaacatga

SEQ ID NO: 27425 - DNA, 1323 bp, Homo sapiens
  SIMILAR (733)..(897): 751254mologous to Homo sapiens putative p150,accession number U93565,Smith-Waterman Score=221.
atgggcaggactctgaagcctcaggaggatgggggtacagagcgaggctctacattccaaaacaccaaactgcatctcacaccagagccaaaggcgtgccaatcaaaattccaggagggctacacccaagaaacagaaacaagccaaacgcagactcactctaaactacagccacagctccttgacctggttcaatgcggggtaggtcttgtgggacgcaaaacgctaagaggaacagcatggctgaatcatctggggacaactaagagcagtgagaaggggaaagaatgcacagcaactgccacacagttctcaatctgtgccaatcctaccaacgggcttgtggagtccatcaagaggtccatctgtgaaccccacaggatgccctgcctgaagatcccttggccacagccagatgatctgccccgaacctctagtgggttgcaccatgggcatcccatgtgtgaaccatatgaatttaaaattgaaatgtggattcataataccttctgtgctaatagagtcagcatccataatacagcccctatccaaattgactttagcaccaaggaggggcacattgcaaaacctgaactttcaggaaagggtgagaacgttttggagatgcttcagagtaactgtaaaaggagtgtgagttatgggattgcttgtcaaaggagagtcatagcatggacctgcgctcccattacagcttcctgggcagctttggatcgactgccattagaagaattggaaaaaactactttgaattgcatatggaacaaaaaaagagcccgcatagccaagacaatcctaagcagaaagaacaaaggtggagacatcacactacctgacttcaaactatactacaaggctacagtaaccaaaacagcatgggacatggatgaagcaggaaaccatcgttctcagcaaactaacacaggaacagaaaaccaaacaccccatgttctcactcataagtgggagctgaacaatgagaacacttggacacagggaggggaacatcacacaccggggcctgtcgggtgggagagagctgctaggaacactggtggtttttcacacttggaagtggaagaagacctactaagggaacagaagtcactggctcaatgtaaagcagcaaatcatctgggaagacctgtgaagtgtcagaaaatctttaggattcagggtgacaagaaacacagggaaaatgctatggaatataatttagaggaatgcactgatgagaagactagacagaatttatggcctgtttaccacgcagtgagagcactcctttcagacttgggcatctaa

SEQ ID NO: 27426 - DNA, 1041 bp, Homo sapiens
  SIMILAR (52)..(390): 921254mologous to Cloning vector pSacBII SacB,accession number U09128,Smith-Waterman Score=551.
atggcagaagtgaaactgtctgacaaggaggaggagaaggaggaggaggacctttctggaggaggagcgactcaagccttcgcgaaagaaaataaccaaaaagcatacaaagaaacgtacggcgtctctcatattacacgccatgatatgctgcagatccctaaacagcagcaaaacgaaaaataccaagtgcctcaattcgatcaatcaacgattaaaaatattgagtctgcaaaaggacttgatgtgtgggacagctggccgctgcaaaacgctgacggaacagtagctgaatacaacggctatcacgttgtgtttgctcttgcgggaagcccgaaagacgctgatgacacatcaatctacatggacatggatgaagctggaaaccatcattctcagcaaactaacacaggaacagaaaaccaaacaacgcatgttctcactcataagtgggagttgaacaatgagaacacgtggacacagggaggggaacatcacacacaggggcctgtcagggggcccagagccctgggaagaaagaatggtttcacgggccaggcccagggccctgctgccccaaagaagcctcaagacactgcttcctgcatacaggcaaccccagttccagcctcagatcaaaaggtcccaggtacagcttgggatgctttggagggcacaaaccataacccatggcggcctccacaggacaataagcctgcaggtgcacagaatgcaaaaatgaaggaggcttggcagcttcgaccaaaatttcagaggatgtatcggaaagtctggaatgatagagccatgggcagctggcatactgaatctggaaaagccacaggtgttcaactccaacttgtgagagcagccacagaggcttcaccctgcaaaatcacaagggcagagctgcccaaggtcttgggagcccactccttgcactggtgtgccctggatgtgggacatggaatcagggattattttgaagctttaaggtttaatgactgccctgctggtttcagacttgtgtggggcctgtag

SEQ ID NO: 27427 - DNA, 684 bp, Homo sapiens
  SIMILAR (12)..(254): 821254mologous to Homo sapiens crystallin beta-B2,accession number L10035,Smith-Waterman Score=357.
cccatcaaagtgacagcccagagcacaagatcatctttaataaaaccccaacttcaccgggaaagaggatggaaatcatagatgacgatgtacccagcttccacgcccatggctaccaggagaaggtgtcatctgtgtgggtgcggagtggcatgtgggttggctactagtaccctggctaccgtgggctgcagtacctgctggagaagggagactacaaggacagcagcgactttggggcccgtcaccctcagggacatggatgaagctggaaaccatcattctcagcaaactaacacagaagcagaaaaccaaacaccacatgttctcactcataagtgggagttgaacagtgagaacacatggacacaaggaggggaacatcacacaccgaggcctgtcagggagtgggggacaagagggagagagagcattgggacaaataccaaatgcatgcacggcttaaaacctagatgacaggttgatgggtgcagcaaaccaccatggcacatgtatacctgtgtaacaaacctgcacgttctgcacatgtatcccagaacttataataaaaaagaaaccagtaagtgctcaataaatgttactaacatctatttcttcattcattcttcaaccattacccactgagtgcctatttggatacttggcttagtacctgggtgatga

SEQ ID NO: 27428 - DNA, 1492 bp, Homo sapiens
  SIMILAR (1040)..(1198): 831254mologous to Homo sapiens putative p150,accession number U93564,Smith-Waterman Score=223.
atggatgaagctggaaaccatcattctcagcaaactaacacaggaacagaaaaccaaacaccacatgttctccctcataagtgggagttgaacaatgagaacgcatggacacaaggaggggaacatcacacactgggacctgttggaagtgttggaagttctggccagggcaatcaggcaagagaaagaaataaagatattcaattaggaaaagaggaagtcaaattggccctgtttgcagacaacatgattgtatatttagaaaaccccatcatctcagcccaaaatctccttaagctgataagcaacttcagcaaagtctcaggatacaaaatcaatgtacaaaaatcacaagcattcttatacatcaataagagacaaacagagatccaaatcatgagtgaactcccattcacaactgcttcaaagagaataaaatacctaggaacccaaattacaagggatgtgaaggacctcttcaaggaggactacaaacaactgctcaacaaaataaaagaggacacaaacaaattgaagaacattccatgctcatggataggaagaatcaatatcatgaaaatggccatactgcctaagcctaactgggaggcaccacccagtaggggcagactgacacctcacacggccaggtacccctctgagacaaagattccagaggaacaatcaggcagcaacatttgctgttcagcaatattcacggttctgcagcctccgctgctgatacccaggcaaacaaggtctcgagtggacctccagcaaactccaacagacctgcagctgaggctcctgactgttagaaggaaaactaacgaacaaaaaggaatagcatcaacatcaacaaaaaggatgtccactcaaaaaccctatcagaaggatcacaactcgtcggcagcaagggaacaaaactggatggagaatgagtttgatgaattcacagaagtaggcttcagaagttgggtagtaacaaactctttcaagctaaaggatcatgttctaacccaatgcaaagaagctaagaaccttaaaaaaagaattggaaaaaactactttaaagttcatatggaaccaaaaaagagcccgtattgccaagacagtcctaagtaaaaagaacaaagctggaggcatcatgctacctgacttcaaactacattacaaggatacagtaacaaaaacagcaggggacatggatgaagctggaaaccatcattctcagcaaactaacgcagggacagaaaaccaaacactgcatgttctcactcttaagtgggagttgaacaatgagaacacatggacacagggaggggaaggaacatcacacaccgaggccctgtccctgcaatcattcaaagaacagactccctcaactgtgcaatacaaacgaaagagaagtgacaggcactcagaggtcttggccaccaacatacgttcttgtgggacagtgccacaaaccttcaacccttacagccacaag

SEQ ID NO: 27429 - DNA, 1105 bp, Homo sapiens
  SIMILAR (1)..(387): 851254mologous to Homo sapiens putative p150,accession number U93570,Smith-Waterman Score=565.
atgtgcagaaagctgaaactgaatcctttccttatactttatataaaaattaattcaagacggattaaagacttaaatggtagaccaaaaaccataaaaactctagaagaaaacctaggcaatactactgaggacataggcatgggcaaagacttcatgactaaaacaccaaaagcaatggcaacaaaagccaaaactggcaaatgggatctaattaaactaaagagcttctgcacagcaaaagaaactaccatcagaatgaacaggcaacctacagaatgggagaaaatttttgcaatctatccacgtgacaaagggctaatatccagaatctacaatgaacttaagcaaatttacaagaaaaaaacaaacaaccccatcaaaaagcaaacagggtgtggagcagacctccagcaaactccagcagacctgcagcagacgggactgagtgttagaaagaaaactgataaacagaaaggaatagcatcaacatcaacaaaaaggacgtccacacagaaaccccatccgaagttcactaacatcaaagaccaaagaaatacaaactaccataaaagaatactatgaacacctctatacaaataaactagaaaatctacaagaaatggataaattcctggacacatacaccttcccaggactaaaccaggaagaagtccaatccctgaatagaccaataacaagttctgaaattgaggcagtaattaatagcctaccaaccaaaaaaagtccaggaccagacagattcacagccgaattctaccagagggacatggatgaagctggaaaccatcattctcagcaaactaacacagggacagaaaaccaaacactgcatattctcactcataagtgggagttgaataatgagaacacatggacacagggaggggaatatcatactccagggcctgttagagtttgggggaatagaggagggatagcattaggagaaatacctaatgaatgcagctcctcaccagcaacagaccaaagctggatggagaatgactttgacgagttgaaagaagaaggcttcagacgattggtaataacaaacttctccgagctaaaggaggatgtttga

SEQ ID NO: 27430 - DNA, 613 bp, Homo sapiens
  SIMILAR (2)..(271): 821254mologous to Homo sapiens reverse transcriptase,accession number L27428,Smith-Waterman Score=382.
aaaactgaaactggaccccttccttacaccttatgcaaaaattaactcaagatggattaaagacttaaacataagatgtaaaaccataaaaaccctagaagaaaacctaggcaataccattcaggacatagacatgggcaaagacttcatgactaaaacaccaaaagcaatggcaacagaagtcaaaattgacaaatgggatctaattaaactaaagagcttccacacagcaaaagaaactatcatcgaggtgaacagggacatggatgaagctggaaaccatcattctcagcaaactaacacaggaaccagaaaaccaaacactgcatgttctcactcataagtgggagttgaacaatgagaacatacgggcacagggatggggaacatcacacacaaacgggggcctgttggggggatgggggctaggggagggatagcattaggagaaatacctaatgcatactggggcttcatgcctagatgatgggttgatgggtgcagcaaaccaccatggcacatgtatacccatgtaacaaacctgcacattctgcacatgtactaccctagaacttaaagcataataataaaaaaataagaaaatggaaattga

SEQ ID NO: 27431 - DNA, 3185 bp, Homo sapiens
  SIMILAR (1018)..(1125): 781254mologous to Homo sapiens Peptide sequence derived from a human secreted protein,accession number Y40039,Smith-Waterman Score=142.
atgagaatctcagaccccatcccagacatactgaaccggaaactgtgggcggacagcccaacaatcggtgttttaataagcccccgggtaatcttatacacgctaaagtctgagaaccactgctctagagaaatgcacaaacgttccttagtggagattaaacaaaaggcgaggggttggagggcgcgaaacggacctcagctccccgactcctccccgcgcttcacgggtcttccggactccagtcagcgttcctcgggccctcggcgccacgagctgtccgggacgcaccccctagcgggccgtggctgccaaccggcggccttgggtggaacaaagtatgttgtgcaaggagtgacgcattttaaggaatggcattgcctttcccagaaagtgaagagaggaaattggaaaattgtgagtggaccttctgatactgctcctccttgcgtggaaaaggggaaagaactgcatgcatattattcagcatcctatattcaaagtgctgatgaagactgtaaccccttttgtgctgatgactgttattcagctatgaggcctaagaactttgacccttggggagagtgggatgcaagcataccagctaataaatgtgggataaacaccaataaacctgatgtagttttacaagtacctaccacagggatatccctggacaggaagatccccccactctccaccccgccgccaccggccatgtggacagaggaagccggggcgaccgccgaggcccaggaatccggcatcaggaacaagtctagcagttccagtcaaatcccggtggttggggtggtgacggaggacgatgaggcgcaggattccattgatcccccagagagccctgatcgtgccttaaaagccgcgaattcctggaggaaccctgtcctgcctcacactaatggtgtggggccactgtgggaattcctgttgaggcttctcaaatctcaggctgcgtcaggaaccctgtctcttgcgttcacatcctggagccttggagagttccttgggagtgggacatggatgaagctggaaaccataattctcagcaaactaacacaggaacagaaatccaaacactgcatgttctcactgataagtgggagcttgccatttttgaaaaagaaagtgtcggatgaaataacttatgctgaagatactgctaattcaattgcacttctgggtgacttaatgaaaataccaagttctgaattgaggatacaaatttgtaagtgtattgttgatttttatcatgcagaaccaccaaagaagcatattccagaagttaattgtactataatgatgaaagcacaagcagccagtggaatctgtactcacctcaatgacccagatccctctggacagcttttatttcgttcatcagaaatactttggaacttgctggaaaaatcttcaaaagaagaagtcatacaacagcttagtaacttggaatgtttgctggctttgaaggaagtatttaaaaatctgtttatgagaggtttcagtcattatgaccgtcagcttagaaatgacatattagtgatcactacaattatagctcaaaatcctgaagcaccaatgattgaatgtggctttaccaaggatttgatactgtttgccacctttaatgaagttaaaagtcaaaatcttttggtgaaaaggacttaagctttctaattcctatgaagattttgagttgaagaaattactattcaatgtaattgtgatcttatgtaaagatttacctactgtacagctattaattgatggcaaagttattttggctttgtttacctatgttaagaagcctgagaagcaaaaaataattgactggtctgcagcacagcatgaagaattacaactgcatgcaattgccactttgtcatcagtggctcctttattaatagaagaatacatgtcatgccagggaaatgctcgagtccttgcatttctagaatggtgtgagagtgaagatcccgttttcagtcatggttacaggtttcatggtacaggtggccgaggcaacaagtttgcccagatgcgttacagtttaagactcctgagacgccatggtctaccttgaagatgagactgtaaacaaagatctttgtgaaaagggaacaattcagcaaatgataggtcttcatgacctgtatcttttgcgacctcctatctcatcctgtgacttagaatgccgtgaccatctgggaatgcagcacagtacccctctttatgacagaacaatacagaaagacaaagtacaccagattggctacaggttaagattaggctttcaaatcatttctcccattaatcaaaactttacagaggagacagtgatttttaccattcattcaactggtttgcacagaggggaagggaagggaaaaagggaagggagcattgcttttggcagtgtggggaagattggagaaatatggaatgaaatatatgaagaaataaaattagaaaaattaagaccagtcactacagataaaaaagctttggaagctattacaacagcatcagaaaatattggaaagatggttgcttctctgcaaagtgatataattgaaagccaagcatgccaagacatgcaaaatgaacaaaaagtatatgcaaaaatacaggccacgcacaagcaaagagagctggctaataaatcatgggaagatttcttggctagaacatcaaacgctaaaacgttaaagaaagcaaaaaggcttcaagaaaaagctatagaagcctccagataccataaacgaccacaaaatgcaatatttcaccaaacacatattaaaggccttaacacaatggtgccctctggtggagtagtaacagtgggaaagcactcctgcccgattagtaggaggacctctggtttgatacgggtattggctcttaaaaaactggcccattcgagggaggagcctttgcagaggggtgaaagcagtttaaaattgtggatgcaccaaaaaagagtattcctacgtaatatactatagagactttttgaaataaagtcagcttataattttttagctgaatatatctttatacatatgtaaagccaatattttagaataagtattttagtataaatattttagtaaaatactataaaaataaaaggacatataatttatttttatggaaaacatcaaaaa

SEQ ID NO: 27432 - DNA, 416 bp, Homo sapiens; identical to SEQ ID NO: 12414
  SIMILAR (128)..(328): 381254mologous to Mus musculus histone stem-loop binding protein,accession number U75680,Smith-Waterman Score=83.

SEQ ID NO: 27433 - DNA, 816 bp, Homo sapiens
  SIMILAR (769)..(626): 461254mologous to Homo sapiens Polyproline-rich domain from dynamin,accession number Y56033,Smith-Waterman Score=89.
atggaccggattgaaaaggatatttgcattgaattggaattaacacctgcaggcaggagcagaacactcctcttgggggaaaacccggaaggagatggcccagtagaccacccacaggaggccaccgtcgctgagcctgatgggcacccagaagcccccacgcagctcgaggctattgcggacagtggagagcagttggaagcgtcacctggaccctggctctctttgggtctgtccaatggcagatactccattgggcagcagaatgggaaaaaagctattgctgcctctgctatttctaggaaggatctaggcagcagggctggaatggactccttgggctgcccagggctccagtgcacggtgggaatacccctgaaggggctagtgcctgtccacctagaaggtccagcagccttgcggcctagatctggctggggtgaagggccaggtactgagaggctctacggacatgcctgctcacaactgaagacaccgaggggctcaaaggaaggcttttctgcagagggtcaactgcggcctgtgttgcacctggaatctctgcccacaaaagctaagggggagaaaatggccagtccaggtgtcgcacagctgcaggcagagatcctggcggaccccttctgtaaccagaaggcaccctgtggggggctcccttttgtcttggggcacctccacctctacttacagctgcctgtgcccctgcggcaggcagggcagggggcaccagaggagcagcgccagcatgccccgaagacaggacgaatgcccacagtcagcaccaccatccccatgtga

SEQ ID NO: 27434 - DNA, 1881 bp, Homo sapiens; identical to SEQ ID NO: 12415
  SIMILAR (870)..(1106): 331254mologous to Muntiacus muntjak prion protein,accession number AF113944,Smith-Waterman Score=81.

SEQ ID NO: 27435 - DNA, 326 bp, Homo sapiens
  SIMILAR (304)..(50): 311254mologous to Drosophila melanogaster RNA-binding protein Smaug,accession number AF159852,Smith-Waterman Score=116.
cagcactgttggcctccgactccagcaggtggatgtcattgcagtccgccagtgagtgctccaggcagagctgcaggaagcgggcctgggtacgggtgacccgtttcagaagtgacaggagggccactgtctgctcacactcattccagcctttgaaccagccagcgaggatgcccacctggtctcggaacatcatggtgccgggcctttcccctgagggccagggcttaaggacgtttctgggcgtggtggcaacggttgttgggggaggaggaagcctgctcacatggggggaggtcttggtccagccacgcctctccagtttc

SEQ ID NO: 27436 - DNA, 2319 bp, Homo sapiens
  SIMILAR (235)..(1200): 981254mologous to Homo sapiens unnamed protein product,accession number AK001073,Smith-Waterman Score=1665.
cgcggccgcgtcgacgttagcctgtgaggaaactggagaggcgtggctggaccaagacctccccccatgtgagcaggcttcctcctcccccaacaaccgttgcgcaccacgcccagaaacgtccttaagccctggccctcaggggaaaggtaacaggaggccagagccgggaccatgtgacggcgctggccctcgccaccgccgtcacccgaccctgaccccaggcccggcaccatgatgttccgagaccaggtgggcatcctcgctggctggttcaaaggctggaatgagtgtgagcagacagaggccctcctgtcacttttgaaacgggtcacccgtacccaggcccgcttcctgcagctctgcctggagcactcactggcggactgcaatgacatacacctgctggagtcggaggccaacagtgctgccatcgtcagccagtggcagcaggagtccaaagagaaggtggtgtccctcctgctgtcccaccttcccctgcttcagccaggcaacacagaggccaagtcggagtacatgaggctactgcagaaagtgctggcctactcaatcgagagcaatgctttcatcgaggagagtcgccagctgctttcctatgccctcatccacccagccaccacactggaggaccgcaacgcactggccctctggctgagccacctggaagagcggttggctagtggcttccgctcccggccagagccctcctaccattcacgtcaaggctcagatgagtgggggggccctgcagagctaggccctggggaggcagggccaggctggcaggacaagccaccccgggaaaatggacacgtgcccttccacccatccagctcagtgccgccagccatcaacagtattgggagcaatgcaaacacaggtctcccctgccaaatccaccctagcccactgaagcgctccatgtcactcatccctacaagcccccaggtccctggtgagtggccgagtccagaggagcttggggcccgggctgcttttaccacgcccgatcacgcacctctctcgccccagagcagcgtggcctcctctggcagtgagcagacagaggagcagggctccagccggaacaccttccaggaggatggcagtggcatgaaagatgtgccctcatggctcaagagcctccgtttgcacaagtatgcagccctcttctcacagatgagctacgaggagatgatgacactgactgagcagcacctggagtctcagaacgtcaccaaaggtgcccgccacaagatagccctgagcatccagaagctgcgtgagagacagagcgtcctcaagtccctagagaaggatgtgctggaaggcgggaacctacgaaacgctctgcaggagctgcagcagatcatcatcactcccatcaaggcctacagtgtcctccaggccaccgtggctgccgccaccaccacccctactgccaaggatggggccccgggggaaccaccgctgccaggtgctgagcctcccctagcccaccccggcacagacaaaggcaccgaggccaaggaccctccagctgtggagaactacccacctccaccagctccagctcccactgatggcagtgagcctgccccggctcccgtcgccgacggagacatccccagccagtttacacgggtgatgggcaaagtgtgcacccaactgctggtgtcccgaccagacgaggagaacatcaccagttacctccagctcatcgaaaagtgcctgactcatgaggctttcacggagacgcagaagaaacggctgctatcctggaaacagcaagtgctgaagctcctccggacattcccgcgcaaagccgcactagagatgcagaactaccggcagcagaaaggctgggcattcggctccaactcgctccccatagctggctctgtggggatgggagtggcccggcgtacccagcggcagttcccaatgcctccccgggccctcccacccggccggatgggcctcctgagcccctcgggcattgggggtgtctcccctcgacatgccctcaccagccccagccttggaggccagggccgacagaacctgtggtttgccaaccctggaggcagcaacagcatgcccagtcagagccgcagctctgtgcagcgcacccactcgctcccggtccactcgtcaccccaggccattctcatgttccctccagactgcccggttcctgggcctgacctggagatcaatcccactctggagtctctgtgtctgagcatgacagaacacgccttgggtgatgggacagacaaaacctccaccatctga

SEQ ID NO: 27437 - DNA, 678 bp, Homo sapiens
  SIMILAR (71)..(193): 701254mologous to Homo sapiens super cysteine rich protein; SCRP,accession number U63332,Smith-Waterman Score=230.
ctacttaataagggtttttaaggagtgggtgaatgtgctcataacagtcgccgaagttggggagcctggtggatgctctgtggctgcccctgcagctgctgccacctgctgctgctgctgctgctgttgttgttgctgctgctgttgttgttgctgctgctgctgttgttgttgctgctgctgctggttaaggttacgggctgtggactcctcagctgcacgcagcaggaaggtgtagttcctcaccacctcttctaccttggccagcagctcttggcgctgggcctcggagcgcacaatgaacaccagccgcacgaaggtctcaatgaggctgctcagcacctggaagctgcccgtgatggctgccagcatgtgagttgggctcttgtccacattggccacacggcggcaggaggcccggagctccttgaacttgagagctagctcaagcttatactcggagatctgagacacatagggcttgggggcacgggcctcggggctggccacacactgccgcaggactgtcagcagctcgttggtgtccagccgggcagccaggaagccatcagggaggccataggcatgggcccgcagggcattgatcttggccaggctcccctcgaaggtggacacacggaggtcaataacaggcaccacctgctcgtccagcttcat

SEQ ID NO: 27438 - DNA, 1416 bp, Homo sapiens
  SIMILAR (802)..(1149): 321254mologous to Arabidopsis thaliana putative protein,accession number AL138659,Smith-Waterman Score=114.
gcatcaaaggatgagaaaatgctgttagccctgaaattgctaatatttttttaaaacacgaattcttaatagcaaagtgaaaagttttacattacattttttaataagggataacaaaatctcttacatgtatttctgtgtgtttatattgtatatgaatgtatgagtgcagaaaatacttgactcacactaggtcataattttatttgtcagtatattggaatatgggggtggggaccaagtataaaaggaaattttctatatatgtaaaattagatacgtacatgtatatgtaaatgttctttaaaaaaactattaaaaacggaagcgattctttaaaaggtagatttccttttatgttgcagtcatagccacgtaagcaatggacctcatattttttttcaacagggagcctcttaaacagaatctaacctgtaaaactcaggagccgagaagctttaagaacagtgaggttgaagggcacaggctcttggtccttggcagcgatattaggaggcgtgcctagggaacctcggattccggggagctggacgtgaaactctgtggtggaatagaaatcctcagggcatgagctatacctaaaacgtaatggtattaagaattctggttcagccgtctgtatatctccccagatacctgaaactgaccacctgagtacgttttcccattgctgagctgtttccctgatatctggccatgcaacggagatcaagagggataaatactggacttattctactcctttctcaaatcttccatgttgggatcaacaatattccacctgtcaccctagcaactttggccctcaacatctggttcttcttgaaccctcagaagccactgtatagctcctgccttagtgtggagaagtgttaccagcaaaaagactggcagcgtttactgctctctccccttcaccatgctgatgattggcatttgtatttcaatatggcatccatgctctggaaaggaataaatctagaaagaagactgggaagtagatggtttgcctatgttatcaccgcattttctgtacttactggagtggtatacctgctcttgcaatttgctgttgccgaatttatggatgaacctgacttcaaaaggagctgtgctgtaggtttctcagagaaggacttggaaattcggaaggttaagagacttatcaacaaacagtttgtggtagacaccagccttaaaggttataccaatttgcattcatatcagcagcatatagaaatgtctgttatcactaccaacattaaatgtggtgagatggagggaggtggagcaaaacggccaaatagaaagctttacagatcatccttcccagaggaacaccaaactgaagaactatctgcagaaaaaatcaccttcataagaaccaaagatcat

SEQ ID NO: 27439 - DNA, 501 bp, Homo sapiens
  SIMILAR (60)..(317): 981254mologous to Homo sapiens Human secreted protein, SEQ ID NO: 6033,accession number G01952,Smith-Waterman Score=422.
agtcctcacgcgcgcttagactcttgggagttgtagtacgaatccgtcaggccggaaccatggcagtgaccaaggagctcttacagatggacctgtacgcgctgctaggcattgaggagaaggcagcggacaaagaggtaaagaaggcgtataggcagaaggccctctcctgccacccagacaaaaatccagataatcccagagcagctgaactcttccaccagctttctcaggccttggaggtgctgaccgatgctgcagccagggctgcatatgacaaggtcaggaaagccaagaagcaagcagcagagaggacccagaaacttgatgagaaaaggaagaaagtgaagcttgacctggaggcccgggagcggcaggcccagggccagggagagtgaggaggaaggagggagagccggagcaccaggacattagagcaagagatcgaacgcctgagagaaaagggttcccggcagctggaagaacagcagaggctcatcg

SEQ ID NO: 27440 - DNA, 966 bp, Homo sapiens
  SIMILAR (196)..(309): 941254mologous to Homo sapiens Human secreted protein, SEQ ID NO: 6033,accession number G01952,Smith-Waterman Score=171.
atggcagtgaccaaggagctcttacagatggacctgtacgcgctgctaggcattgaggagaaggcagcggacaaagagataggttgccccagtttatatgcccaccaagaatgtgtagagtacctgtcttcgagtggctgtcgagaaagcggggtactgtgctcctgcctgttgcagcagcccctggacatctgcagtgctgaactcttccaccagctttctcaggccttggaggtgctgaccgatgctgcagccagggctgcatatgacaaggtcaggaaagccaagaagcaagcagcagagaggacccagaaacttgatgagaaaaggaagaaagtgaagcttgacctggaggcccgggagcggcaggcccaggcccaggagagtgaggaggaagaggagagccggagcaccaggacactagagcaagaggtgagcactcaggcacactggccagaaggccacctgcaggaggaggagatcgaacgcctgagagaagagggttcccggcagctggaggaacagcagaggctcatccgggagcagatacgccaggagcgtgaccagaggttgagaggaaaggcagaaaatactgaaggccaaggaacccccaaactaaagctaaaatggaagtgcaagaaggaggatgagtcaaaaggtggctactccaaagacgtcctcctacggcttttgcagaagtatggtgaggttctcaacctggtgctttccagtaagaagccaggcactgctgtggtggagtttgcaaccgtcaaggcagcggagctggctgtccagaatgaagttggcctggtggataaccctctgaagatttcctggttggagggacagccccaggatgccgtgggccgcagccactcaggactgtcaaagcacttcagttttctggatgtgtctctggctgccccagaaagggaccgactgtcaagaggcaatatctcctcttga

SEQ ID NO: 27441 - DNA, 384 bp, Homo sapiens
  SIMILAR (134)..(319): 321254mologous to Ovis aries type II small proline-rich protein,accession number L77968,Smith-Waterman Score=64.
gaagagattaaaattgtgggctctagaatcaaacctgattcttccagttactattaacattgccatttctcatgtgtgaaatgggaacagtgacctcacagggtcattgtgagaattaaattcacagtacctagaacagtgccaggtatggagtgagtcccccggggttgttagctttggtgagtgtcaaccactgccctggcctctcccaccttgagcaccagcactgctacagatgccactccccaggcccctccttccccactgctcttctcatctcagtgaaccacagcaatgcgaggcaacactcaaccctcgatgtgtccaggtgccaggcaggcatcttacttgtcgtgtctcacttgatcctggctacagcccttt

SEQ ID NO: 27442 - DNA, 715 bp, Homo sapiens
  SIMILAR (523)..(305): 1001254mologous to Homo sapiens dJ770C23.1 (novel protein similar to mouse kinesin-like proteins KIF1A and KIF1B),accession number AL118509,Smith-Waterman Score=378.
cttcgatgtggaagctgcggcgtttgaggctctcctcctgcttgcgaatctggagctgcacgatttctgtctccttgcgctgggtctccacctcctgctgcatccgctccagttcagccttgtctgatttctgcttttcctccatttcttctatgagtttccttttactttctaatttttcaagttcttcacgctgttgcctctcaaattcaagtccggggttatacaacatgactgcagacaggttctcacgggacttcgagaggtcggtcatggacaagctgaaggaggacagaaggccactcttcctcttctccctgagcttggcggcttcctttggatggttaaagcgaaacatattggttcttcccaagagaatcacagcaccttgatttagatgtgtggcctccacgatctgaacaccattcacagagcactgggacccactcaggggtatcagagtcactgtccccccgatattttcaaagatgcaatgctcactctccaagtcaaggccatgaagaacaatatcttgctccgtggaagcatcgtctctaccaacgtatgtctgaccttcctttaaatgatataagatgattccagtactcaaaaggtcatcatcgatgccaatcaaatgaggcagttcagaatccaaaacaactccaatcccttctttcctgagggctagagtttgttccatggttgaactgtgcat

SEQ ID NO: 27443 - DNA, 5312 bp, Homo sapiens
  SIMILAR (1596)..(2396): 981254mologous to Homo sapiens dJ971B4.1 (novel protein similar to mouse kinesin-like proteins KIF1A and KIF1B),accession number AL117376,Smith-Waterman Score=1316.
atgaacgaacttgttacttcgtgttacttggctccttcagcttaccttcatcgtgtctgcagatgtactgcagccttcactaatcacacgatgcaaatcctgaaggcgtctttggacttcttcttcaatgtgtgtgccctccacttggccatagaccttgggatttcctgtcatggagaaaatcaccttgatgacatggtggcctccagggatgctcagagtccaactgcaccgtacagaaaggctcacagagcattcaaaagcacacagagatgtagaggaaggaggggtgctgtgattctcttgggaagaaccaatatgtttcgctttaaccatccaaaggaagccgccaagctcagggagaagaggaagagtggccttctgtcctccttcagcttgtccatgaccgacctctcgaagtcccgtgagaacctgtctgcagtcatgttgtataaccccggcctttttggcaccatggaccaagtttcgtggaagacagttttttcagagacagggacagaggagggggatggatggtttcgggatcaaactcttccacctcagataattagtgaaccacagcaatgcgaggcaacactcagccctcgatgtgtccaggtgccaggcaggcatcttacttgtcgtgtctcacttgatcctggctacagccctttgagacttgaatttgagaggcaacagcgtgaagaacttgaaaaattagaaagtaaaaggaaactcatagaagaaatggaggaaaagcagaaatcagacaaggctgaactggagcggatgcagcaggaggtggagacccagcgcaaggagacagaaatcgtgcagctccagattcgcaagcaggaggagagcctcaaacgccgcagcttccacatcgagaacaagctaaaggatttacttgcggagaaggaaaaatttgaagaggagaggctgagggaacagcaggaaatcgagctgcagaagaagagacaagaagaagagacctttctccgcgtccaagaagaactccaacgactcaaagaactcaacaacaacgagaaggctgagaagtttcagatatttcaagaactggaccagctccaaaaggaaaaagatgaacagtatgccaagcttgaactggaaaaaaagagactagaggagcaggagaaggagcaggtcatgctcgtggcccatctggaagagcagctccgagagaagcaggagatgatccagctcctgcggcgtggggaggtacagtgggtggaagaggagaagagggacctggaaggcattcgggaatccctcctgcgggtgaaggaggctcgtgccggaggggatgaagatggcgaggagttagaaaaggctcaactgcgtttcttcgaattcaagagaaggcagcttgtcaagctagtgaacttggagaaggacctggttcagcagaaagacatcctgaaaaaagaagtccaagaagaacaggagatcctagagtgtttaaaatgtgaacatgacaaagaatctagattgttggaaaaacatgatgagagtgtcacagatgtcacggaagtgcctcaagatttcgagaaaataaagcccggtgaaggaccaggctgcaatataaagaacgccagctacagtacctcctgcagaatcacttgccaactctgttggaagaaaagcagagagcatttgaaattcttgacagaggccctctcagcttagacaacactctttatcaagtagaaaaggaaatggaagaaaaagaagaacagcttgcacagtaccaggccaatgcaaaccagctgcaaaagctccaagccacctttgaattcactgccaacattgcacgtcaggaggaaaaagtgaggaaaaaggaaaaggagattttggagtccagagagaagcagcagagagaggcgctggagcgggccctggccaggctggagaggagacattctgcgctgcagaggcactccaccctgggcatggagattgaagagcagaggcagaaacttgccagtctgaacagtggcagcagagagcagtcagggctccaggctagcctggaggctgagcaggaagccctggagaaggaccaggagaggttagaatatgaaatccagcagctgaaacagaagatttatgaggtcgatggtgttcaaaaagatcatcatgggaccctggaagggaaggtggcttcttccagcttgccagtcagtgctgaaaaatcacacctggttcccctcatggatgccaggttcaatgcttacattgaagaagaagtccaaagacgccttcaggatttgcatcgtgtgattagtgaaggctgcagtacatcttcagacacgatgaaggataatgagaaacttcacaatggcaccattcaacgtaaactaaaatatgagaaaaggcagttttgcccagcatggtatcttgacccgcttctgcccagagatgccactgacacttccagcctcattaaagaggagaggagggaggtggatcagaacgaccactgggatcatcccatgctgtggagcgtctcaggccctaaaacaacttcctcagcatcacaagagagaactcaccagcagagggatcagtcctcagtacccgaggtattccaggacagtgaaaacaaatatggtcatcctgagcatgctggccattttgaaccaaaatgttttaatctacctaaaatctcttttcttaacgaaagtaacaccgatgatgcagaagattttcagagtcagtcagaaaatttcagttgagctgatgactcataaagataatcatggctggagagtcaagtccagttggactttgctgcatcatacgtcccaagaagtgtctataaatagcggaggcaagcatgccaggcaaggcaaggtgctctgcttggttctgtctgaaggcattttccatgaagagagagcttccttgcatgtccctcataacgtactggcgtctgagttttatagtgagcagcaaggtcaggaagagttggatgctaaaaaaatgagctcatcggagtcactggtcaatatcagaacagaagtaaccaatgggctgggatctttttaccacaagttttcagacctttataaagattccagcagtcacttgtttcaggatggcacaaaggtgatcagccaagccaggcttgtggggaatctgtgtgcacagagggggttccccttccgggtagcaacattcgtcagaagccccccatttctgaagcacttagccccacacatgcccttgaagactgacatgcagtcaacagaatctcattctccggaagctcgggttggcagcagcgagagcgaagctgcagggagcctgaggccagcagagggtgcggcgccttaccgggcctctgtctttgcagctacaggtttaccaggttcctcgccaagctcagtttttcgccttgaatatgaagatgctagaaagagctctgcatttaagcagagccttgtgcaattcccggaccaaatgctgaaactgcaagagtgccctttaaaagaccttcttaggcatgtgacttgttctctaccagaacctttgggcaacatgaaggaagtcaaaggcatttactggcttgctgttgctgttctgctcagcacctgaccctcaaccagcgagattgctcctgcttcagtcaactttatatgctttgggcctgccagataatctcggctcaatgagcattattcatgctctacctctctctggtctacaggagattcagattggctttggtggacagagtgttcgattcctgagctctgcagagggtcttctgctcactgtattcagttataacaaatacctctctcaacagctgggtcgtgacctcctgtgtgtcctgatgccagagcctgatgccgctgcctgcgctaatcatcccttgctccagcaagatctggttcagctttctcttgattggaaaacagaaatccctgatttagttttgccaaatgggagttcaggtgtcatccaaattccaggactaccttgggttggacatgatttactttcttcatggaaatatggaagtcaatgtcccttccctggcagaagttcagttactgctctacacaacagtgaaagtcatgggtgactctggccatgaccagtgccagtcgctagtccttctgaacacccacattgcactggtgaaggaagactgtgttttttatccacgcattcgatctcgaaacatacctcctccgggtgcacaatttgatgtgatcaaatgccatgctttaagtgaattcaggtgtgttgttgttccagaaaagaaaaatgtgtcaacagtagaactagtcttcttacagaaactcaaaccttcagtgggttccagaaatagtccacctgagcaccttcaggaagccccaaatgtccagttgttcaccaccccattgtatcttcaaggcagtcagaatgtcgcacctgagattggagtggctgtgctgtacgctgcaggtcatctgttgctcaaccagggtcggtctgctccacacatatcattttgggacctattcagaaggggcagtagccatcgtggtgatgacagaaacacagaagggcagtcctgcaagcctttgcctgtgtctgctaacatctcattggccaacacaagtcacatgaccaagccccaaatcaaggggcaaggaagtaccctccgtccatcaagaggccatgatgacctgaaggacccaattaaaattagtatcccacgctacgtcctctgcgggcaaggaaaggatgcacacttcgagtttgaggtcaaggaatcttcactctccaagctccatacacctcccatttgtgttacccacagacgggcagatcgaggactggcattggactgccctttccttgtgcaatgtgctgtctttagaaccaggctcttcctgcagaggcccagcttcttccctcaagtacctttgaacagaatttctgcagttggtcaagcttcaggttcacagggcccactgcactggagggggaagcctgcttggattaggaactgttacacagttgcggacatggtccagatggcaactgttcccttgccttgtgtccctggatggctgctgaccaagtctctctttctttactcccacctggctgcagagctctgccctcctttgggctccccagaaggagaagccggtgaacgttcccaaagtgtccctaatggagccagaggaggggatacattgcagatacatctcagagcaaataacttaaaataccccattagactattgtgttctcccaagagcaccagcctttccgttcctcctgcctag

SEQ ID NO: 27444 - DNA, 4002 bp, Homo sapiens
  SIMILAR (3025)..(3069): 931254mologous to Homo sapiens Human cell cycle protein min1,accession number R77417,Smith-Waterman Score=77.
cggcgtgtttccctctctccgcgcggattttagccggaactgcggcagtctctccctgccaggctcttcatccaaggtttctggggatcccttctgaagttctatctgaaaattgcgcttaagtgaattttctgttagaagaacttggttgctactttcttgtcaagatgattgcaacacctttgaaacattcaagaatttacttacctccagaggcatcttctcaaaggagaaatctacccatggatgcaatcttttttgacagcattccttcaggcacacttactcctgtaaaagatttggtgaaatatcagaactcctccttaaaattgaatgaccataaaaagaatcagttcctaaaaatgacaacttttaacaataaaaatatatttcaatcaactatgctaacagaggctactacctctaacagttctcttgatatcagtgctataaagcccaacaaggatggattaaaaaataaagcaaactatgaatcaccaggaaaaatatttctaagaatgaaagaaaaagtactgcgtgacaagcaagaacagccatcaagaaacagtagtttgttggaaccacagaaaagtggaaataatgaaaccttcactcctaacagagttgaaaaaaaaaaattgcagcatacctacctatgtgaagaaaaggaaaacaacaaatcattccagtcagatgacagttcactaagagaacttccaactctgaaccaagaacaggaaaattttttggctgtagaagcccgaaacaagacattaactagagctcagttggctaaacaaatttttcactcaaaggagagtatagttgcaaccactaaatccaaaaaggacacgtttgttttagaaagcgttgattctgctgatgaacaatttcaaaatactaatgctgagactctcagtactaattgtattcctattaaaaatggcagcctgttaatggtttctgatagtgagaggacaacagaagggacttcgcaacagaaagttaaggaaggaaatggaaaaacagtgcctggagagacaggtcttccaggttccatgaaagatacatgtaaaattgtacttgcaacaccaagacttcatataacaatacctcggagagacgtcactaacatatattggcacagtaatgtaattatagagcggattgagcacaacaaacttaggactatatcaggcaacgtttatatattaaaaggcatgatagaccaaatttccatgaaagaagcagctaatttgagattttggtctttggttttgtcttatgaaattaaagagacaactgaagaattggatgtatccattgatattctaacctcaagggaacagtttttctcagatgaagaaagaaaatacatggccatcaatcagaagaaagcttatattttagtaacaccacttaaatctagaaaagtgatagagcaaagatgcatgaggtataatctgtccgctggcaccatcaaagcagtaacagattttgtaataccagagtgtcaaaaaaaaagtcccatcagcaagtccatggggactttagaaaatacatttgaaggtcataaaagtaaaaacaaggaagattgcgatgaacgtgacttacttactgtcaaccggaaaataaaaatatctaaccttgaaaaggaacaaatgctcacctctgactttaagaaaaataccagactattaccaaaattgaagaaaatagaaaatcaggtagctatgtcattttataagcatcagtcctcaccagatttgtcaagtgaagaaagtgaaacagaaaaggaaattaaaaggaaagctgaagttaagaaaaccaaagcaggaaacaccaaagaagcagtggttcacctgagaaagagcacaagaaacacaagtaatattccagtgattttggaacctgaaactgaagaaagtgaaaatgaattttatatcaaacaaaagaaagctagaccttccgtcaaagaaactcttcagaagtctggtgttaggaaagagtttccaattactgaggcagtaggatctgataagacaaataggcatcccttagaatgcttacctggtttaattcaggataaggaatggaatgagaaggagttacagaaacttcattgtgcttttgcatctcttccaaagcacaaacctggtttctggtcagaggtagctgcggctgtaggttctcgatctcctgaagaatgccagaggaaatacatggaaaatcccagaggaaaaggatcccagaaacatgtcactaagaagaagccagccaattccaaaggccaaaatggcaacgagaggtgatgctgatcagaaacaaactattaagataactgccaaagtgggaactcttaaaaggaagcaacagatggagggaatttctgggaacagttgccaaaagatgaccatgatgattttttcagtacaacacctttacagcatcaaagaatactgttaacctgctgtaacattcccacttctgcaagtcaccagtcaagtgaagctttggaagcagcagatgctgtgacagaaatagaaaaggaggttctgcaagacaaaggcaccttggctattgctggaagctcccctaatgttcttactacagggtcagctagccatgagcagctggcactcacaggtggctccatggccctatccaacagaagatcagatagtttccaggacagtgaagatgatgatgatattctgccaaatatggacaaaaatccaacaactccatcatcagttatctttccattggtaaaaactcctcaatgtcagcatgtcagtcctggcatgctaggttctataaataggaatgactgtgataaatatgtttttcgtatgcaaaaatatcataaaagtaatggtggtattgtctggggcaacatcaagaaaaaattagttgaaactgatttctcaactccaacaccaagaaggaaaaccccatttaacacagacttaggagaaaactctggtattggaaaacttttcactaatgctgtggaatccttaggatgaggacgagaaagattattatttttcgaactctgattctgcatagtaaaatgagaaaatatgattcctgggatttttaccataaagcagaccagtgtttgtattttcaactggagctacatgtattttctttgtaaagtagcttcctatgaaaatgtggacttttttgaaggtttcatatgtttgtgttcaaagtaaaatatcctcattgctgcagcttactaaaaatgtaaagaaaattgtttttgctcgtgtagatatctgtaaatttgtttttgcatattaaaatatatatagataattttttaataagcatccaagtctgtttactttaagaaaaccatttcccaaacagatttttttcctatttcaagaaaattttgctaccatttaagtaagagaaggtgagaaggatgacagaggttgtattggtagctattgaattcatgaaaacttttaagttagcatttgttagcagttattatccaagccagagtaggatttgttaccagttgttatccaaacctaatgtttaaattacacattgttgaaattaaattacacattgttgacatgcttctctcctgattgtttttattttaaacttgtgataggcatatctatgaaacctttgtaaatttagtttattgctttaccattattttactaggtaaaattagagaacagattttgttctctaatttttaagccttatttacatatgcagaaacagcttaaatattttgactagattagacaaacagttaatagatccaccattaggaatcaatatattatgtcataataaacatcctttttctttcactgaaatttcttttagaaataaacttatttttgcttgttatgttttgaaacttgacataggatattttccctctggctacacattcacctacccttgttctctatttagattattcaaataaagttagtttgcttttatagtaaaaaaaaa

SEQ ID NO: 27445 - DNA, 1812 bp, Homo sapiens
  SIMILAR (1492)..(1794): 541254mologous to Homo sapiens mucolipidin,accession number AJ293970,Smith-Waterman Score=293.
atggggccctcatggagaatctctgtgagggcagtgtggaagggaagtgtggcgtcggaaaccccacacagagtccctactggggcacctcctaatggagctgtgagaagagggccatcatcctccagaccccagaatggtagatccactgacagcttgcaccgtgtacctggaaaagccacagacactcaacgccagcctgtgaaagcagctgggagggaggctgtaccctgcaaagccacaggggcagagctgcccaagaccatgggaacccacctcttgcatcagtgtgacctggatggcccaccgcccgggtccctctgtaaggcgcttctccggcagacaccccgagccaaagcgggccgtaccgcagcgttgggcacttgggtggagagtgcaagggcggcgggcctgcgcccagacaggtgtagccgtcccacgctaggtgtcctcctgccgctccctggccgcgccatgcctcgaggcatggaggtgctggacctgccggtgtgcaaccgcgcctcgggcctgtcctgggggccgcaccacagggctccaacttcggcggacgcgttacggcgagggcgaaatgagtcggccgtgaacggtgtttcctgttccgaatcccgagagccctggaaagttttgaaggaggaggcatggcccggcagccttatcgttttccccaggcaaggattccggagagaggatcaggtgttttcagatgtggtggaaatacccagaaaactagaagagaagcctgaagatgtgacagaattgctgcaatctcatgatcaaactagaatggatgaggagttgtttgttatggatgagcaacgaaagtggtttcttgagatggaatctactcttggtgaagatgctatgaacattgttgaaatgacaacacataatttagcatattccgtaaacatagttgataaaacagcagcaaggtttgagaggactgactccaattttgaaagaagttctactgtagccctcaaacatcagactccaagttcttcagttttagaactcggactggctctccttgctcctcaacctgcagatggcttattgtgggaccttgtgatcatggcagtgggctcccttctggcccacggaaggtccagaaatgccatccaagagtcagctcttagaactggggactccaggagcccacttgttgctccaccccccaatagccgagatgaacctgaagccagcaagtctcagaggctcacccaaggccctagatgtagtacctgggtatcgctgctgattattcagtgcccaagggctcttcagttagcaggtgatgaatgctgccaggaatgggttcttcccttcaaggcagtaggttcccttctggcccaggggaggctcacagaactcagggaaacacatttactggtttattgtaaaggttgttacaagggatacagtgaagaatacatgagaaatgcaatggcacatcgtgattctgagatgaaagaagaatgtctaagggaagacctgaagttttacttcatgagcccttgtgaaaaataccgagccagacgccagattccgtggaaactgggtttgcagattttgaagatagtcatggtcaccacacagcttgttcgttttggtttaagtaaccagctggtggttgctttcaaagaagataacactgttgcttttaagcacttgtttttgaaaggatattctggtacagatgaagatgactacagctgcagtgtatatactcaagaggatgcctatgagagcatcttttttgctattaatcaggcaagtgttttgttgtga

SEQ ID NO: 27446 - DNA, 601 bp, Homo sapiens
  SIMILAR (1)..(144): 771254mologous to Homo sapiens phosphatidylethanolamine binding protein,accession number X75252,Smith-Waterman Score=188.
  misc_feature (1)...(601): n = a,t,c or g
cttgtcntgacagacccggatgctcccagcaggaaggatcccaatacagagaatgggcatcatttcctggtggtcancatgaaggncaatgacatcagcagtggcacagtcntctccgattatgtgggctcgggcctcccaaggcacaggcttccaccgctatgtctggcacgtgttaccaggccgagtgggatgactatgtgcccaaactgtacgagcagctgtctgggaagtagggggttagcttggggacctgaactgtcctggaggccccaagccatgttccccagttcagtgttgcatgtataatagatttctcctcttcctgccccccttggcatgggtgagacctgaccagtcagatggtagttgagggtgacttttcctgctgcctggcctttataattttactcactcactctgatttatgttttgatcaaatttgaacttcattttggggggtattttggtactgtgatggggtcatcaaattattaatctgaaaatagcaacccagaatgtaaaaaagaaaaaactggggggaaaaagaccaggtctacagtgatagagcaaagcatcaaagaatctttaagggaggttt

SEQ ID NO: 27447 - DNA, 598 bp, Homo sapiens
  SIMILAR (104)..(247): 831254mologous to Homo sapiens neuropolypeptide h3,accession number S76773,Smith-Waterman Score=220.
  misc_feature (1)...(598): n = a,t,c or g
ggggtcggggtggaccgagctgggcaaagtctgacgcccacccaggttaagaatagacccaccagcatttcgtggtatgtctttgattcaggaagctctacaccttgtcctgacagacccggatgctccagcaggggatgatcccaaatacagagaatggcatcatttcctggtggtcaacatgaagggcaatgacatcagcaatggcacagtcctctccgattatgnntgtgctgcgcctcccaaggccccaagccatgttccccagttcagtgttgcatgtataatagatttctcctcttcctgccccccttggcatgggtgagacctgaccagtcagatggtagttgagggtgacttttcctgctgcctggcctttataattttactcactcactctgatttatgttttgatcaaatttgaacttcattttggggggtattttggtactgtgatggggtcatcaaattattaatctgaaaatagcaacccagaatgtaaaaaagaaaaaactggggggaaaaagaccaggtctacagtgatagagcaaagcatcaaagaatctttaaggaaggtttaaaaaaaaaaaaaaaaaaa

SEQ ID NO: 27448 - DNA, 609 bp, Homo sapiens
  SIMILAR (451)..(606): 881254mologous to Macaca fascicularis phosphatidylethanolamine-binding protein,accession number X73137,Smith-Waterman Score=253.
atgtggctccaagttaggtgctctttacattatgtggggggattggctgctgctgtgttgtacaattcctccaagagccgtgaggtgtggagccctgacagcgtcgtcctgttacctcaggtgcaagtcattaaaaaaggagttacctcccaaaagaaagaaatacgattgcgcagactgccagaacagcccaagttcttcacccaggttccggcggggtcaggagcctttagcatttctcaaggaatgcagttttgcccacagatgcttcgaaaacccaagtttcctgatcgttgctatgacacacccaggattaagcgagcgtatgcgagaagcgctctgcaaaccgccaggcaaacggcaacgaagaaactgcctcacaaacaatacctgaatgaggcgggggccgaagaacttgctgacaatgggcaccggtcaatgctcgggcacaggccgctgaaatgtgacgagcccatcctcagcaaccgctccggagaccaccgtggcaaattcaaggtggcgtccccccgtaaaaagtacgcgctcggggtcccggtggccggcacgtgttaccaggccgagtgggaccactatgtgcccaaaatgtag

SEQ ID NO: 27449 - DNA, 1513 bp, Homo sapiens
  SIMILAR (92)..(685): 651254mologous to Homo sapiens phosphatidylethanolamine binding protein,accession number X75252,Smith-Waterman Score=559.
gagccagtgtgctgagctctccgcgtcgcctctgtcgcccgcgcctggcctaccgcggcactcccggctgcacgctctgcttggcctcgccatgccggtggacctcagcaagtggtccgggcccttgagcctgcaagaagtggacgagcagccgcagcacccgctgcatgtcacctacgccggggcggcggtggacgagctgggcaaagtgctgacgcccacccaggttaagaatagacccaccagcatttcgtgggatggtcttgattcagggaagctctacaccttggtcctgacagacccggatgctcccagcaggaaggatcccaaatacagagaatgggcatcatttcttgggtggtcaacatgaagggcaaatgacatcagcagtggcacagtcctctccggaatagtggggctcggggccttcccaagggcacaggcctccaccgctatgtctggctggtttacgagcagggacaggccgctaaagtgtgacgagcccatccttcagcaacccgatctggagaccaccgtggcaaaattcaaaggtgggcgtcccttcccgtaaaaaagtaatgaagctccagggcccccggtggctgggcaccgtgttacccccagcccgaagtgggatgaaccaatgtgcccccaaactgtaacgaagcagctgtcctggggaaagtagggggttaagcttgggggaccctgaactggcccctggaggcccccaagcccatgttcccccagtttcagtgtttgcatgtataatagatttctcctctttcctgccccccctttggcaatgggtgagaccctgacccagtcaagatggtaagttgaggggtgacttttccctgctgccctggccctttataattttactcactcactctgatttaatgtttttgatcgaaatttgaacttcatttttgggggggtatttttggtactgtgatgggggtcatcaaatttattaaatctggaaatatagcaacccagaatgtaaaaaaagaaaaaaactgggggggaaaaaaagacccaggtctacagtgatagagcaaaagcatcaaaagaatcttttaagggaggtttaaaaaaaaaaaaaaaaaaaaaagattggttgcctctgcctttgtgatcctgagtccagaatggtacacaatgtgattttatggtgatgtcactcacctagacaaccagaggctggcattgaggctaacctccaacacagtgcatctcagatgccctcagtaggcattcagtatgtcactctggtccctttaaagagcaatcctggaagaagcaggagggagggtggctttgctgttgttgggacatggcaatctagaccggtagcagcgcctcgctgacagcttgggaggaaacctgagatctgtgttttttaaattgatcgttcttcatgggggtaagaaaagctggtctggagttgctgaatgttgcattaattgtgctgtttgcttgtagttgaataaaaatagaaacctgaatg

SEQ ID NO: 27450 - DNA, 1446 bp, Homo sapiens
  SIMILAR (839)..(1102): 301254mologous to Homo sapiens keratin associated protein 9.5,accession number AJ406949,Smith-Waterman Score=84.
atgaactgcggcagggctacacccgagagtcgcatcctgcagttaatctggaagcagcagatgtacctgcgtcaacaggaaggattttggaaacatgcagggggcatgagaagagaggctgctgagggtctgtgccataggaagcctctactgacaaatgttaaacagaaggtggcaatagaccgttcctacagatgccttcagctgcagcagaagaaatacaggcatgtggaatccataccaaccccgggaaaggagggcagggagcggaactgggagaatgaaggggcccccactgtatctgagatgttttcgttctctgaagcaaacacagaaaaactgtcctgcacggagcagctgccgcccaatctctgctcgtggagacgagcgttggtcactggccatgaaacccttcgtgaagtttttgaaataaaaataataataacagatagttggggactggagcagcgggaggctgggctgtttatgctgtgtttttggttgcacgtgtttttggttgttggtgtttttctctgcccctcggtatttccttccgaaatgggtgaactcgggcatgagtctccactcaccaaaggatcctcccacgtctgtgtggcctgggcgccgcctttcattgaggaagctgggccgccatctggaggcgcctcgcacgcgggacacgcatggaggacctgccaggtgcctgttggtggccgcctgtccccagggcgttctgactcagggacagctttcagcgactacacggcagaagtggagtgtgaaaaggaaaaagctttgccctctgagctcaactctgatccctttcaggaaccaccggtcctcctgttgtacgtccttgccctgtgctgggtgctgttccaggtgcctgccaagtgtcatctcacgcagccctccaggcctagcgggagggaggcccaggcatctcagcagaggctatggggtgtctgcttcatgcagctcctgctgtctaaccccgagctcgccaagaaactgcgtgtttatgacctggcttctgcacagacatttcaaagcaagagactgtgcagaccctacctgcgcttcatcctgcaagcagccggccacgccacacagcctgctcccagaactcagggtggctgcaacggaagttcgcacatgtgtgagctcagggacgtttccttttatcaacaagtgcgaagcaagttggtcaagaaaggcccacggtgcgtggctgagagcagccgaatggagggagcagacgcttgctggatggagacgccgccgctcgctgcattgctgatgtgtgaggacgcgtggatttcctttccttgctttgcctggcgaggctgccctcgcatcccgacgtgtttaacacaggacaccagcttctccaccgggaggaagccttgcgttctgagctcagcgacgctgaacttgttcctgtag

SEQ ID NO: 27451 - DNA, 1785 bp, Homo sapiens
  SIMILAR (47)..(214): 831254mologous to Homo sapiens dJ439F8.1 (KIAA0767 (isoform 1)),accession number AL021392,Smith-Waterman Score=237.
tagggtgaagcagaggacctcagtgctgaacatgctaaggaggttggacaaaatcaggttcagaggtcacaagagagatgacttcctcgatctagcggagtctccaaatgcctcggacaccgaatgcagcgacgaaatccccctgaaggtaccgcggacctcgccccgggacagcgagggggttgcaggtattggtctggttggagcagcaggaggtagggctgtgggatcatgggagtcttcacctggggcagaacatctggatttggggggcatcagggatccccttcggggggacggcagtctcgtccacccccaggcctgctttaaggatcaaatgagataataagtgaaacgtacgtggctggcgtcttgcttatggttagcttggagggagttgtaattattaatgaccgtgaaatactgagctccaggagctcttccgtggcggaccccaagcagcctcactcctggcagcggctcaggatctcaccctgggatgttcgtcacttcagctaatctgtccccactgagggatcgcaggtgcttgtgggatgggtagaacctcacagcctgtgtcctttcgtctcctggggaccggggatgggtagaacctcacggcctgtgtcctttcgtctcctggggaccggggatgggtagaacctcacggcttcctgtgggaatagagctgtttaaagtgtggctccctctcctgccctccctggggagccccccacctaatgaaggtggggacttggatgaggtggcatggatgcccgtcctctctttgtccctgacttccaggtagcctttgctcatgtctgtcccagggaagggctggctgtgtggggctgtttcaggggctcctgatgaaggctgctcctggcccgggagcccagcaactggggggctttgcagtgtgcctcctcctggctgcgtgtgggagcgcccaggcccttgcccactcaggtgaaccttttccaggctgtctatgtcagagccaccttcatggggacgtttagcccccggggtctgtcctggggccccagctggggtcctagtctagtgctgggacagaccccaagcagctcccacagggtccgtccagcgggcgggacagatggaatcaccctgcctccactcatgccctgggaactcttgccccagcagcgagagcagctgaaagtgtgggaggtcgggcacccagaacggggcagccacagccagagtgccctgcctagaagctgctggttcccgaagccagcgccttattcctgggctgtggccacagcgtgggtgatacatgtgcaaggagccgttgcggtgctgctccgggtggccttgttgaagccgcacacctgttacctggctctggaggaggaagtctgaggacccagctggagaaatcgggtcgctgctgtcctgtggtgggacactcactcgtgtgctgtccctcaccaggtccctggcaggatgcaacgtggagggcgactgtgtggcatccagtgtggggcccaggcaggcctggctgtgccgggcatggcccctgctttctgtcccatcagcagggtgtggaacggccgcctgtgcccagtccctgggctccaggcatcgggcagctgtagcctgtaactcgagcccgtcctggcttgctggggctgtgagcgcatagctcagcagacgctagttaagtcatcaaccaccagaggctgccttatccgctgaacctcacgaattgcctttctgtgagttgaagtggttgaatattgacggtttttctgcctg

SEQ ID NO: 27452 - DNA, 594 bp, Homo sapiens; identical to SEQ ID NO: 11934
  SIMILAR (121)..(360): 391254mologous to Arabidopsis thaliana Glycine-rich protein,accession number Z11867,Smith-Waterman Score=112.

SEQ ID NO: 27453 - DNA, 1476 bp, Homo sapiens
  SIMILAR (1476)..(820): 901254mologous to Homo sapiens putative p150,accession number U93563,Smith-Waterman Score=1076.
tcacatcaaccagggttgctcttctccttgcacagctgggtggtcagtatgaccagtccttgcagcattcacttcactgtgtttgcagctcttcccacatctagccaacaccacacattcagactcatccttaagtggctcaggagtttcttccttatatactttgtaccaccctaaaaactctctcttccccactgatgcactgaggtccaccagaactaccttaggaattgccacctcatattcatgatcattatcatcaatgtccataactgccttcatgtagaagcccagcaagctcttgaacccagagccgggatgccttccagagccggctgctgccaagacccacactcggtcatcagaggagagctgccacgggatgcccataccaggtggacaccatcccatgtggccagggtccatcttcagcagttgtggattgaggcctttgtccttgtctgtgctgatttgagaggtactggagaaaggctgtggtgtcttggtcttcgtctccagtgttagccactggccgccaatctgttttctaaagtggctgcaccatttcacattcccaccagcagtgatgagggttttttcctccatccttgctaacacttgttcttgtctgtagattttatcatagccatcccggatgttctttttagatgtggcattttgagcgtcatgatttggagagttgctgtgactgtgccgagcttcatacagaaatccaagcaaagctcttgaatccagaatcaggatgccttccagagccagctgtttcaagacgctgctagaggcagtgaagagcgcaggaggcctgcctagcagtctgatggtagtttcttttgctgtgcagaagctctttagtttaattagatcccatttgtcaattttggcttttgttgccattgcttttggtgttttagtcatgaagtccttgcccatgcctatggcctgaatggtattgcctaggttttcttctagggtttttatggttttaggtctaacatttaagtctttaatccatcttgaattaatttttgtatgagatgtaaggaagggatccagtttcagctttctacatatggctagccagttttcccagcaccatttattaaatagggaatcctttccccatttcttgtttttgtcaggtttgtcaaagatcagatggttgtagatatgcagcattatttctgaggactctgttctgttccattggtctatatctctgttttggtaccagtaccatgctgttttggttactgtagccttgtagtatagtttgaagtcaggtagtgtgatgcctccagctttgttcttttggcttaggactgacttgccaatgcaggctcttttttggttccatatgaaccttaaagtagtttttcccaattctgtgaagaaagtcactggtagcttgatggggatggcattgaatctataaattaccttgggcagtatggccat

SEQ ID NO: 27454 - DNA, 875 bp, Homo sapiens
  SIMILAR (145)..(309): 421254mologous to Mus musculus alpha-1 type 1 collagen,accession number U38544,Smith-Waterman Score=95.
agaattcccgggtcgacgatttcgttgttaaactgacaaagcccacgtctccgggtccctgtctcggggagtcgggactattggggcaccccgcgtagtcgagactttaaactgagctgtctcggtcactcaggaggcagttggcagagtattcgtggtcagggaggtgacccgtggtcagcagggtcaggccacccagggacaaagggtgctcctgcaccgggccttggagaaggacagagcggtggggacttggggtcagcgggggagcctccgcggcatggggagtcaccacctgccggcaatcagccatgactgcctttgcactgtccatgctctcagcccaccacctcctccccctgccattgcagtggctaacactggagacgaagaccaagacaccacagcctttcgtccagtacctctcaaatcagcacagacaaggacaaaggcctcaatccacaactgctgaagatggaccctggccacatgggatggtcagacacgcctgcccagctatctgcaggcgaagaggctcagaagaggtttaggtgcctgaaggacatcttgcttccatgtccatatgagcaggctatttctgctccatgagtcaattttgccatataaaatacttaatttcagccattccagggtgctgtaggatgcacagcttcccatcagcccacctgaactccagccatgccattttaataccaggaataaggtcacctgctttcctgccccttaggaggccagagccgtggaagcaaaatggcacttctgtttacctgttatattatttttttgtcatccttatatgcttggaaaatgcaattatatgaaaaaagtttagtaattacagacataacagcaaa

SEQ ID NO: 27455 - DNA, 2650 bp, Homo sapiens
  SIMILAR (34)..(240): 301254mologous to Homo sapiens cN38E12.1 (like- glycosyltransferase (KIAA0609)),accession number Z68287,Smith- Waterman Score=89.
ctaaagggcgcaggggatacggcaacccagacccacatgcttacgtacttgcagactcgcccaggcacacgtgtatcgccacatgcagacacgcaagcatacacttgctgcactcagacctcctggtgtgaacacacggtgtgcaccgtcggagatagccagtggcccccacgtacatgccatccctcaggcacagagaaccagcccacaggtcccacttggagggacatgaagcagacagggtccccaggctgtatgcttctcctaggccggtgtccaccacagtcagccacatacatctgctgccatgacacaggctccctttgtgccataggatccaagatgacactccatcacataggcttctagcctgcacgaagttggggagagagggccccagaagcaggttctctccttttaaggacaccatctggaagtcacagacaatgcttttgctcatatcccattggccagaactgttagacatgtagctatacttagttgaggtcccccactgactgcagacagcaaccaagctgtcctgggcctgtggtgtcacctggtggtcagccttggaacttgtcttggagctgagatctgaattcagcttcatccatcttagtctgaagatcttcacttcctccccttcctccgcctctagcccacgtccatcccgtgtgcgacaggattccatagagctggggcccctatacacggggatgtctggctgtgttgggggccgggggtgtttggaataagcgagcaacagcggcacatccttggcatgacgggcccgcttccagccccctgggccctgtccaaagccacatggccagtatgtggccagcagggatgtcaactcaggtgagtcttcctctagcccagagttcttctgaccacacaaagactgccctctccgggcttctctctcttgtggatgtggactgtatgggtacacagggttgtgccagaggttccagatgctgcaggacaagcatggctcatcctggagagcatcaggtttgccagacatatgatctttgccctccaggaacttaaatcccccatgaacaatgaacttgtgatagtgaacagtacatagtctcttccataatgaaccctgggtttcagtctggtggtgccacatggtcttgaaggtactctggctgtgaggggccgctcccatgttgtcttccatctctgggacaagatggtaggttgggagtggggagctctggccgttggagccttggccaggattgaggcttgggtcactctccgcatcccaggtacacaggggctgtccagtcctcaccagcaggaggggagcaaatgtggcgccctgggcccggtcccagttagctgagctgcgtatctttaatcccttcacctcctcccacccctccaggctggctgggcctgggcctgcttcggagcccctgtgcccttcaccaggcctgtttacaaggcccaggacagccgccaaaaccccagctgtgtccctgtccttgtctgtctccagcggacatgactgacttggaaggaaggcgtgcccttgtctggagagaaaagagccaaagagagccagagatgcgaaccgggaagaaccaagcaggaggccagagacattgagtcccagctccctgcaaagtagtgctgaatttaccaggggctccaccagaaattcagacccctgggcataggtcccactctggcccacaggagccctcaacgccgcttgtgttttctgtggggcatctaccatgggccaaacacggtgctgagctccaaggcagactgacgtagctcctcctcccgcaaaaccatggcctgatgggagagaccggcgagtcaatggctgtttctcagtaggaggggagtcacaatcaaggtttgcacaggattcacctgtaggacactcagctctggtcaatctggttgtagattccatgctcttaatcaccatgtgggtttgagcatttggtgtctgggtcatggggcccttgtcacccgtggaagtctgagtgatgcccccacagatgttcatgtctttaggcccagaatctgtccatgacacctcgtatagggctttcacctgaaaggggaggtcgttttcaagatcaggtacctgaggaagaagcgggtcttcaaaatagaaggtgaacctgaggctgtacccctcagatgcatttgacatccggttcctttcctcctcaatccctgaagctttcattcccccacagtctgccttctctttccccttttcctgatccaatgaagggtctgggctggcagagacctgtgctgctttcagcctggggtgggcattgaggctgccaggaacattccttccctgcagtcctgcctgggataggcaaggccctgtctccagatgggcaaatgggggccctgggaactggggggatgcaggagcagctgagccgggaccagagtccaggccgaatgacttcacatccagagcatggtcttcaacctcccctgaaacctcatgaagcttggcttggcaggatgaggggtcacataagctcagtggtagttcagccaggaccaggttctgccaggtagggcactgagggcaggggagccagctgcgggagaggttgaggaaggtcacacgggcctgctccat

SEQ ID NO: 27456 - DNA, 610 bp, Homo sapiens
  SIMILAR (496)..(335): 361254mologous to Archaeoglobus fulgidus nifU protein (nifU- 3),accession number AE001061,Smith-Waterman Score=69.
caagcaatctgtacctgcagtccttgtctgtaaccatggcaccctggcttctcacacatctcatcgtggagttccaccatgtgtcaggcatggcactgagcaccttcttttaagaatataatttgtaattatgtagattcttaattctacttcaaaatgccacacagccttcatgtgataaaatgaaacaattgctcaactgatctcctgggatctctactaagatgttggcagcccggccagctggtctggccctggacgtgccttcagggtctggttatgcttcatgacctgcattgtggtcagtgccattttgcagactttgatcacagtgaacacgttccacgggaacttgggccatgagaaacatccttcctaaccacgtgactgcagaaacatccttatcacatcctcctgggcaaaggcccaacagcctgactgcagggacatccttgccatatcctgctgggcagcaagctctaccacccagatccctccctcccagtcccatgattaccccagcctgtgagtggcagttggttctggcactaagctggtttcctcctccccagggttttgctggcaataaagatgttgctgttgaagccac

SEQ ID NO: 27457 - DNA, 1007 bp, Homo sapiens
  SIMILAR (243)..(299): 421254mologous to Drosophila willistoni period protein,accession number L06342,Smith-Waterman Score=42.
tgtctggtacagtgtagatgctcaagggaagtttactttgtaaaaccacttacctgggagatgttactgttagtctaacctgtaccatttcgtaaacctccagccattttgcagactctgatcacagtgaaacgttccatgggaacttgggccatgagaaacatccttcctaaccacgtgactgcagaaacatctttattgccagcaaaaccctggggaggaggaaaccagcttagtgccagcaccaactgccactcacaggctggggtaatcatgggactgggagggagggatctgggtggtagagcttgctgcccagcaggatatggcaaggatgtccctgcagtcaggctgttgggcctttgcccaggaggacgcgataaggatgtttctgcagtcacgtggttaggaaggatgtttctcatggcccaagttcccatggaacgtttcactgtgatcagagtctgcaaaatggctgcccgttgcctaaccaggggaaaactcagggtggggtccacagaaacaatccctctggaaggggaaagggtgtttctcatccaaaaccaagggaaaacaccactcataaggagcagaggggcctgactgccacattccccaaagggaacaggctcctcagcccaggagctgaggtttcttcttgctgcttctagacttcttctagtcattaagcatgttgagccatttttctgtgcatccgatctgacatttttgctctcagatgaaacacgacaaagtaagctgagccaccaggattcctggagggaaccttggatgcttggtcttgggctccagggcactcccagggatggtgtgtcactcctacttgccatgaaatgtgcacaaaggctgtcctcctgcccatcccatcctgctggacaggatggaggaagtgagggaacaggcagcgtggacagttgtaaggcctcactgaccaggtccttactgacaaggcctcgctgatcaggttccaccgataatgaccccat

SEQ ID NO: 27458 - DNA, 641 bp, Homo sapiens
  SIMILAR (641)..(201): 771254mologous to Homo sapiens Human lysoenzyme LYC4 polypeptide,accession number Y57396,Smith-Waterman Score=580.
  misc_feature (1)...(641): n = a,t,c or g
ttttttttttccaagttgagtaactagttggggttattctgcatcctgcatccccggatgaagcaaacttttgtctttttccatctggaactcttaaagtggtgagatcatcaaaaggattgactgaagcagcaagcagaaaagcaccttcattcacaaaatgcaactggtgagtgctgcaggggccatgcaggcggctacagcttgcaaccatccagccaccgtgccagggtatcggagtactggcagtaccgggaccaggtgggccatgctcccatcccttcttttccttttacaatggtcttggcacatttaattgtcttctctaaattaggattcagtaaagcggaacatgacataatggcagcggttcctgccatggtcgccacaccagtcactgccacgcatctgaaagaggccaaaagccagtgtagccctcacgtgtgttctcgtagatggccacttgggttgaacttgctctcgaagtaggccaggcacacccagttctcaaggctatagccctcaaaataatccaggcctccatcgtggagtttcttagccactgtgcaacgccccaagatgtaagcaccacttggaaccaccangtagccaaggagggagagaaccacggatgccttcat

SEQ ID NO: 27459 - DNA, 2271 bp, Homo sapiens
  SIMILAR (754)..(1122): 1001254mologous to Homo sapiens Human lysoenzyme LYC4 polypeptide,accession number Y57396,Smith-Waterman Score=670.
atgggctccatggaagactcggttttgctgagtggagtacactggactgcagggggaggtcaggaggcttttgctttatccacagagggcaaactcatgccctcgccggggagccggctgccacctgctctcctcagagcctgcctcagtggcccctgtttgcccagagatgaagatctgctcattcgggtgtggcctgctcatacccgctccgcactgcacccctgggcgctcttcttccttgtccttggcattcatggagagcttgtggtggaccaggaactttccatacgacctgaagaggctgggacctctgggcggcgatgggtccctgcttgctccttcacagtatttctcttggcacagcctgatgtctttctccatttcagggcactgggggcagctgagggtggctttgtcttgacatgggtgacaaagagaatgttcataaaggcaccaaaagccagcctttggaagggctggtggactggtaggcgggtatatggtgggcaggagggtaacgggcatgacaatacccagctgcaggagaagctcatcagcaaattcacttattgcttatttgatgacagttcagttgggaagaggaggtttttgttcattcattcattcaacaaagtttcattgagcacctactctgtattaggttctgttctgagttctggggataatgaagagaaaaaaccagaccaggtttctgcattcctggtgcttacactcaggagcctggagaagatgaaggcatccgtggttctctccctccttggctacctggtggttccaagtggtgcttacatcttggggcgttgcacagtggctaagaaactccacgatggaggcctggattattttgagggctatagccttgagaactgggtgtgcctggcctacttcgagagcaagttcaaccccatggccatctacgagaacacacgtgagggctacactggctttggcctctttcagatgcgtggcagtgactggtgtggcgaccatggcaggaaccgctgccatatgtcatgttccgctttactgaatcctaatttagagaagacaattaaatgtgccaagaccattgtaaaaggaaaagaagggatgggagcatgcaatatgatcaatcctggatctgtgctattccaagcctcaggtcaccaggttatactcaaagagatggggatgggtgacacagaagacctgtgctgtggttatgtagaaggcaaccaaaggacagttatccagtactccactattaatagagctcatgaatcttggcattatcactacttaaaggtctctgccatcgctgtaacagctgctagtaccccactgtatagatgttgcaggcaccaggagaaaaggttagagaaactcagtgcagctgacttaggtggggctaaagagttggaaggaattttggaaggtgaagagcggagcagcactcaccagttgcatcttgtgaatgaaggtgcttttctgcttgctgcttcagtcaatccttttgatgatctcaccactttaagagttccagatggaaaaagacaaaagtttgcttcatccggggatgcaggatgcagaataaaccaaactagttactcaacttgggccaaagggttttccagaggctccgtggaattagttgctggcaaaattaacagaagagctacaggagcaagtcagccacctgtagggtttaccattgcgcctgtggtgcagggagtcagaaagtggctgctgcttctaggatgtctgaaatgtgtaggaaactgctgccaacttcccagcaactcagcagccttgagtgaggaaatcaatggcagcagggagagttggggtggtggagcagggacggcgatgaggggttggggggaggcggcatgtggagcaccaagggacggcaggtgtggagataaggatgcttcaccctctgtggctctccctccacagccttggggcaggcaccctgttgaggtggttgaggctaccagtgggaagtgcccacagccacatagggccaggtgctgctcatatagagagatccgcccccgccagaggaaactgactttggagaatgagtcactcgttggggtctggccctcagccataatagcagcctttgtgactgtggaggttggcacaggaacggtgatgcccgccctattaacaggctgtgtaggaagacccaatggaaaaacccagcttggaggctctctagtctgttttgccatggaaacttctactacttgtaaggaatag

SEQ ID NO: 27460 - DNA, 460 bp, Homo sapiens
  SIMILAR (40)..(402): 291254mologous to Caenorhabditis elegans contains similarity to Pfam domain PF00059 (lectin_c), Score=17.7, E-value=0.00021, N= 1,accession number U39848,Smith-Waterman Score=153.
  misc_feature (1)...(460): n = a,t,c or g
gagaaaattcgagtccatatctagtgcggtggaattcgctggctcaatgtgcacacaaatgccatctgggccttcgtggggcctgtgctcttcgtgctgactgccaacacctgcatcctggcccgtgtggtaatgatcaccgtgtccagtgcccgccgccgtgccggcatgttgagcccacagccctgcctgcagcagcagatctggacccagatatgggccacggtgaagcccgtgctggtcctgctgcccgtcctaggcctgacctggctggcaggcatcctggtgcacctgagccccgcctgggcctacgctgccgtgggcctcaactccatccaggggctgtacatcttcctggtttatgctgcctgcaatgaggaggtgcggagcgccctgcanaggatggctgagatgaaaggacctatggccctagaactcctcagcattctcttcatagcaa

SEQ ID NO: 27461 - DNA, 3636 bp, Homo sapiens
  SIMILAR (387)..(2123): 291254mologous to Herpesvirus papio NTR,accession number AF200364,Smith-Waterman Score=198.
atgggggtaggcagaggttctgactgccagctcaaggccactgcaccagctgcgtccacgttttacttccggagctgccccagtgacaagtggggacaggcaatgagcccgaggtccgcagtggctatcgcctacccacagcctgcaggctttgtccttggaaacaagcagcctgtcaaagctgcccgctgtaaagtggatagatggctcttggctgccaactggacaatgcccaggctctgtggaggggagattaggccagccgtggcccaaaccagtcccaactgctccggggcctcaaatcaggatgcctcgcagacggtgaacggccacaggcgccaggccagccatagcggatcaggagtctctctgggaccccctccaactccccaggtgaatcaaggaacccttgggccccaggttgcccccgtggccgccggcgaggtggtgaagactgcaggtggggtgtgcaagttctctggacagcgactgagctggtggcaggcccaagagtcctgcgagcagcagtttggccacttggcactgcagccccctgatggggttcttgcttcacggctgcgcgatccggtctgggtgggccaaagagaggcccctctgcggagacccccacagaggcgtgcgcgcaccaccgccgtgctggtgttcgacgagaggacggctgaccgggcggcgcggctgcggagccctctgcctgagctggcagcgctgaccgcgtgtactcacgtgcagtgggactgtgcctcgcccgaccccgcagcgctcttctccgttgccgcgcccgcgctgcccaacgcgctgcagctgcgcgccttcgccgagccggggggcgtcgtgcgcgctgcgctggtggtgcgtgggcagcacgcgcccttcctcgcagccttccgcgccgacggccgctggcaccatgtgtgcgccacgtgggagcagcggggcgggcgctgggcgctgttctccgatgggaggcggcgcgctggggcgcgggggctgggcgccggccacccggtgccgtccggcggcatcctggtgctgggccaggatcaggactctctgggcggtggcttctcggtgcgtcacgccctcagcggcaacctcaccgacttccacctgtgggcgcgggcgctgagccccgctcagctgcaccgggcacgggcctgcgcgccgccctcagagggcctgctcttccgctgggacccgggcgccctggacgtcacgccctcgctgctgcccactgtgtgggtgcgccttctctgtcccgtgccctccgaggagtgccctacgtggaacccgggacctcgcagtgagggctctgagctctgcctggagccgcagcccttcctctgctgctaccggacagagccctatcgtcggctgcaggatgcccagtcgtggcctggccaggatgttatcagccgagtcaatgccttggccaacgacattgtgctcctcccggaccccctctccgaagtccatggggccctgtccccagcggaggcctccagcttcctgggccttctggagcatgtcctggcgatggagatggctcccctggggccggccgcactgctggctgttgtccgcttcctgaagagggtggtggccctcggggctggggacccagagctgttgttgacaggcccctgggagcagctgagccaaggcgttgtatctgtggccagcctggtcctggaggagcaggtggctgacacatggctctccctccgtgaaccaggcctctctggagtcaccgtgatccacagctggttcacctccagagtcttccagcacaccctagagggaccggacctagagccccaggcccctgccagctcagaggaggcaaacagggtgcagaggttcctaagcacccaggtggggtcagccatcatctcctctgaagtgtgggacgtcactggagaggtcaacgtggccatgacctttcatctccagcaccgggcccagagccccttgttccctccccatcccccaagcccatatacagggggtgcctgggccaccacaggctgctccgtggctgccctgtacctggactccaccgcctgcttctgcaaccacagcaccagctttgccatcctgctgcaaatctatgaagtacagagaggccctgaggaggagtcgctgctgaggactctgtcatttgtgggctgtggcgtgtccttctgcgccctcaccaccaccttcttgctcttcctggtggccggggtccccaagtcagagcgaaccacagtccacaagaacctcaccttctccctggcctctgccgagggcttcctcatgaccagcgagtgggccaaggccaatgaggtgggcagccagtgggtggcatgtgtggctgtcacagtcgcaatgcacttcctctttctggtggcattctcctggatgctggtggaggggctgctgctgtggaggaaggtggtagctgtgagcatgcacccgggcccaggcatgcggctctaccacgccacaggctgggtgctatctccccaaatctgtagccagccagttgcccagcctccgtctccagagacgcccagctgtagcctccaaagcagcctcagctctcccgactcccaaactactgtggctccaatgccaccccaacagcatcagagcccccagccctgctccttggacctccccagtgcccccagtacaacctccagtaggggacagctgcggcttggggggcggatcctgggtcctggagaggaaaaagcaggcgtgcctgtgggcatcgtggcggtcaccctggccatgctcccccatgactacgtggcccccggacattgctggctcaatgtgcacacaaatgccatctgggccttcgtggggcctgtgctcttcgtgctgactgggaggggcgtgttggggatggggaagtcctcttgcccactgaccccaggtctccaggccaacacctgcatcctggcccgtgtggtaatgatcaccgtgtccagtgcccgccgccgtgcccgcatgttgagcccacagccctgcctgcagcagcagatctggacccagatatgggccacggtgaagcccgtgctggtcctgctgcccgtcctaggcctgacctggctggcaggcatcctggtgcacctgagccccgcctgggcctacgctgccgtgggcctcaactccatccagtgtgtgccaggcactgtgctgggtgccaggccgcagcagcagaagaggcagcaaaaagcccctgtatttgtggagctgcccttggtagagcaggcagaccatggccacgatgaagaaatgaagtgttcagggctgtacatcttcctggtttatgctgcctgcaatgaggagggacctatggccctagaactccctcagcattctcctccattgcaaacccggagagacaggaacaagagagcggcggcgcctctgcgctcaagtgacggcgcctttgtctccgctgaatggccccgaccccaccccgcgggccactcagcggcccgagctggaagcgcggggcagcggaggctgccgggctgtgtccttcgcggggccgccaccgcccctcctgaaaggccgcggagccctcagggcatgcggatgttccgaggatggagaagctga

SEQ ID NO: 27462 - DNA, 3811 bp, Homo sapiens
  SIMILAR (2009)..(3808): 991254mologous to Homo sapiens cyclic nucleotide-gated cation channel,accession number L15296,Smith-Waterman Score=3168.
atggctcgccccgcccagccccagccagcccggccgcccgccctttcccacacaccggcccggggggttgagaactggtgcttctgtagagaccctgacagcaggtggcagaggtcccagagtcttggcccccactgtaccccccggggagctgtagtgccagctcgcctttctgggtcatgtcccccggtgctgcgaaagtcagaagtgagcggcttctctgattcagggccgggactggattggcggggcccggagctgtccatgaccctctcccgaggcgtgggcaggtcgccctgggctgtgaagttgtccccttttattgacaagcaaactgaggatcaagaaggccagctgcaccacatcccctggggatgtttggaaaatgtgaacatccccaggcctactgtcatgcagctctgatccagccagccagatgtcagtaaagtgtgttgatgacacgcatgggcagtcagtgcaccagtggctgaccgagtgtgatggggccctggcctttggttcttgcttcctcagagcggaaagagccatgaatcaaagggcagctcaactagcactggattcacaactgtggggactgttagtctcctacattagattggaggtccctgattcaggctccatgctgtgtgacttagggccacatgcagtgcttggtgcctgggttaagtctgtgccctgtggcgagtgtgcccggataccccggggtccatttgaggatgaactcggctgggtcaccctgctacaaacaggcttttacattcttgaacttcacctgggatccagtatactgcactatgtggctccaaatggagacctcgtgggaacgttccaaggctttgtaagctcccgaggctatttgcccagcgtggtcaatgccattgctgtgtttactgatacacccacttcagctacacctgccaagctcataaaacatattgtaaacctctgcttaaatttacctcctcaaatatcagctcctcatcccctgtctgtttctgccagcagcaaggccagctatttgagcagtgacaatgtggagaaaaccaagaatccagggggccctcacagctcacagctgagccacggagtctgggagacagtagcagcgtgggacctcgctgccctctcatcagccactactttgctcgtaggtgggcgtctctttgcagcaggaggtgctcgagcttgtcggggccaccaggatggtggaggccatgtcccagctccaggacgagaagacccactacaggaggagctggtggtcctacaggagaggctggccctccgcgacatgaccagcaggccacgtccacccagctgcagaaccaggtacctggggagctgggatgggcagaggccactgcccactatggagcaggggccaggaccttccccactaggaggtgacgtagatgtgagtggacaggaagtgtctgtctctgtggctgtatctgagcctcgcccacttccccaaggtctccaagcctgtctgccacatcatccccacttctgatccagtgccctggcctggctgttgggcctctgagctctgggcccagcactctgttgacagactgccttcagccctatccaccactggcttctgatcggctgctttttcaactgctgttcctgcaaggctgtgtggccccatggttaagggtgagggtttgcaagggtcagccagatgcgagttccggtcctaggtccaccacttactgtcaggtgacctcaagcctgtggggcctccaagcccaatcttctctaaaaagttccgtgccgttcctcaccggacagggctgtgaccggcagatgatctttgacatgctgaagaggcttcgcctgttgtctacctgcccaacgactatgtgtgcaagaaggaaagatgggtggcaagggggcaaaggcggcaaacttgctcacctccgggcccggctcaaagaactggccgcgcggaggcggctgcaaagcagcaagagttggtggaacagacctgatgtatgtcctatggctgttcttcgtggtgatggcctggaattggaactgttggctgattcccgtgcgctgggccttcccctaccagaccccggacaacatccaccactggctgctgatggattacctatgcgacctcatctacttcctggacatcaccgtgttccagacacgcctgcagtttgtcagaggcggggacatcattacggacaaaaaggacatgcgaaataactacctgaagtctcgccgcttcaagatggacctgctcagcctcctgcccttggattttctctatttgaaagtcggtgtgaaccccctcctccgcctgccccgctgtttaaagtacatggccttcttcgagtttaacagccgcctggaatccatcctcagcaaagcctacgtgtacagggtcatcaggaccacagcctaccttctctacagcctgcatttgaattcctgtctttattactgggcatcggcctatcagggcctcggctccactcactgggtttacgatggcgtgggaaacagttatattcgctgttactactttgctgtgaagaccctcatcaccatcggggggctgcctgaccccaagacactctttgaaattgtcttccagctgctgaattatttcacgggcgtctttgctttctctgtgatgatcggacagatgagagatgtggtaggggccgccaccgcgggacagacctactaccgcagctgcatggacagcacggtgaagtacatgaatttctacaagatccccaagtccgtgcagaaccgcgtcaagacctggtacgagtacacctggcactcgcaaggcatgctggatgagtcagagctgatggtgcagcttccagacaagatgcggctggacctcgccatcgacgtgaactacaacatcgttagcaaagtcgcactctttcagggctgtgaccggcagatgatctttgacatgctgaagaggcttcgctctgttgtctacctgcccaacgactatgtgtgcaagaagggggagatcggccgtgagatgtacatcatccaggcagggcaagtgcaggtcttgggcggccctgatgggaaatctgtgctggtgacgctgaaagctggatctgtgtttggagaaataagcttgctggctgttgggggcgggaaccggcgcacggccaacgtggtggcgcacgggtttaccaacctcttcatcctggataagaaggacctgaatgagattttggtgcattatcctgagtctcagaagttactccggaagaaagccaggcgcatgctgagaagcaacaataagcccaaggaggagaagagcgtgctgatccttccaccccgggcgggcaccccaaagctcttcaacgctgccctcgctatgacaggaaagatgggtggcaagggggcaaaaggcggcaaacttgctcacctccgggcccggctcaaagaactggccgcgctggaggcggctgcaaagcacgaagagttggtggaacaggccaagagctcgcaagacgtcaagggagaggaaggctccgccgccccagaccagcacacgcacccaaaggaggccgccaccgacccacccgcgccccggacgccccccgagcccccggggtctccaccgagctctccaccgcctgcctcccttgggagctgcgagggagaggaggaggggccggccgagcccgaagagcactcggtgaggatctgcatgagcccgggcccggagccgggagagcagatcctgtcggtgaagatgccggaggaaagggaggagaaggcggagtaa

SEQ ID NO: 27463 - DNA, 729 bp, Homo sapiens
  SIMILAR (298)..(251): 371254mologous to Homo sapiens Human secreted protein, SEQ ID NO: 7795,accession number G03714,Smith-Waterman Score=40.
atgacccataaccaggagaaaaacaaatcaaccaacacagaaatgacaatgatgatgaaactagcagacaaggatgataaaacagctatgataaatatgctccaagtagtaaaaaaggtggaggaagccatgagcatgatgagaagaaataaagatgtaaaaaatattcatggccgggcacgatgggtcaagcctatgatcccagcactttgggaggccaaggaagtagaggggaaatactctgcccataatttctggggaagctggaagtttaaatccagctcccgcagcagcagcagtgggcctgagagccctgctagaacccatgcctcattctgccagcctgatggtggacccaccaacaagctagggacaaaggcctttcgtgtgtctcctgctagcagtctactggttgacctgaacactcaggaagtagagataattaatgtgagaaaggccacccccacatgctccctggagctgggcaggaagaggagggatggagccgctgagagagcagctctggatgttgtagttgtcatctatcagctggcacctgctgctgctccaaactgcctgaacccagtgaccagcaggaggcgccacaaacaccggctccggaaggtcagggaagacggcagagttttgaagaataaatacaaagcaacagggtcatccttccgcttcctcagagatctgagaaccaaccactcagaatccttcttctga

SEQ ID NO: 27464 - DNA, 627 bp, Homo sapiens
  SIMILAR (577)..(239): 971254mologous to Homo sapiens Human glioblastoma-derived polypeptide (clone OA004FG),accession number Y27132,Smith-Waterman Score=556.
gtcaaattcataattgatgatctcttccttgttttccccagaaccctgtgtgaagagcagctggtactgtcgatttggaaagctggctggaaaaaacttattcatgaaggggctggctctgaatgatgccaaaagtcatgttctcatccaagaccctgtactggttcccgagaaagctgcttcaaatgttgcagagagatgccttctgacctgaatggtgtgggacagggccaggattcccagcacgaaagaataccatggacagcaggaggttgatgtactcctgggagaatattttgaaaaagaggtagagccccaagagtgtgcagctggcgatgatggggaagcgggcggcatcccggctggtgattgtttcaggcatgtctgaagcattcttgccgcgggcgcagcgtacggagcgcagggcgccgaagaagatgggcagcagcgccatgagcaggaggctgccgtaggccagcgcgatgccctcgggcgtggaaggcggccgcgtagtgctgttggtggggccgcctgcctcggcactgccgttatgcggatcgctgagggccgagtccatggcgagggtgcgttcgggatccgactccagctccggttgctgcagcaggg

SEQ ID NO: 27465 - DNA, 604 bp, Homo sapiens
  SIMILAR (373)..(603): 931254mologous to Homo sapiens Human glioblastoma-derived polypeptide (clone OA004FG),accession number Y27132,Smith-Waterman Score=392.
cggccgccttccacgcccgagggcatcgcgctggcctatcggcatcctcctgctcatggcgctgctgcccatcttcttcggcgccctgcgctccgtacgctgcgcccgcggcaagaatgcttcagacatgcctgaaacaatcaccagccgggatgccgcccgcttccccatcatcgccagctgcacactcttggggctctacctctttttcaaaatattctcccaggagtacatcaacctcctgctgtccatgtatttcttcgtgctgggaatcctggccctgtcccacaccatcaagccctttatgaaataagttttttccagccagctttccaaatcgacagtaccagctgctcttcacacagggttctggggaaaacaaggaaaaagatcatcaattatgaatttgacaccaaggacctggtgtgcctgggcctgagcagcatcgttggcgtctggtacctgctgaggaagcactggattgccaacaacctttttggcctggccttctcccttaatggagtagagctcctgcacctcaacaatgtcagcactggctgcatcctgctgggcggactcttcatctacgatgtcttctgggtat

SEQ ID NO: 27466 - DNA, 1244 bp, Homo sapiens
  SIMILAR (642)..(517): 971254mologous to Homo sapiens Human protein SEQ ID NO:9,accession number Y57604,Smith-Waterman Score=207.
ctagaggtaggcctgagccttgacgtagaggtagaatttcagccaggagaaggcattcttccggagccggtgtttgtggcgcctcctgctggtcactgggttcaggcagtttggagcagcagcaggtgccagctgatagatgacaactacaacatccagagctgctctctcagcggctccatccctcctcttcctgcccagctccagggagcatgtgggggtggccgcttcctgctggctggaatgtgaatatgatggctgctgcttgagcagcatattgtactttctcacattaattatctctacttcctgagtgttcaggtcaaccagtagactgctagcaggagacacacgaaaggcctttgtccctagcttgttggtgggtccaccatcaggctggcagaatgaggcatgggttctagcagggctctcaggcccactgctgctgctgcgggagctggatttaaacttccagcttccccagaaattatgggcagagtatttcccctctacttccttgccgcgggcgcagcgtacggagcgcagggcgccgaagaagatgggcagcagcgccatgagcaggaggctgccgtaggccagcgcgatgccctcgggcgtggaaggcggccgcgtagtgctgcttggtgagggccgcctgcctcggcactgccgttatgcggatcgctgagggccgagtccatggcgagggtgcgttcgggatccgactccagctccggttgctgcagcagggacgcaggcggagacaccggctctgcagggaaagccacgttcccctcatgatctaagaaggatgctaaagctctggacaccttgttcaaattgtagtccctggaagccaggatgtccatgctgccaggatcctctctctgcatctcctttctgtttttatctgctttgtcttcattctctttcacagaaaaccaggcttgctttgtatactgaacaagagccttggttgtatccataatggtggaattatgggcattgtgagtagcaagaggagatttaccaggcagagggaccgcactgatgtcatagagatcaggatgcatttgatgtggctgatggctctcagatcttaaccagccctggcgaagatctctgagaataggatcgatccttcttcctggccaccgcaccctccctgagtcagctgtgcgcatccccagagagtcgagtttgccagcatctccattccaggagtggttgatgcccagattcat

SEQ ID NO: 27467 - DNA, 783 bp, Homo sapiens
  SIMILAR (240)..(58): 1001254mologous to Homo sapiens Human glioblastoma-derived polypeptide (clone OA004FG),accession number Y27132,Smith-Waterman Score=313.
ctaactactttcctttgcatctgatcgcatacagagccagtagtgagttctctgctccttgccgcgggcgcagcgtacggagcgcagggcgccgaagaagatgggcagcagcgccatgagcaggaggctgccgtaggccagcgcgatgccctcgggcgtggaaggcggccgcgtagtgctgttggtggggccgcctgcctcggcactgccgttatgcggatcgctgagggccgagtccatggcgagggtgcgttcgggatccgactccagctccggttgctgcagcagggacgcaggcggagacaccggctctgcagggaaagccacgttcccctcatgatctaagaaggatgctaaagctctggacaccttgttcaaattgtagtccctggaagccaggatgtccatgctgccaggatcctctctctgcatctcctttctgtttttatctgctttgtcttcattctctttcacagaaaaccaggcttgctttgtatactgaacaagagccttggttgtatccataatggtggaattatgggcattgtgagtagcaagaggagatttaccaggcagagggaccgcactgatgtcatagagatcaggatgcatttgatgtggctgatggctctcagatcttaaccagccctggcgaagatctctgagaataggatcgatccttcttcctggccaccgcaccctccctgagtcagctgtgcgcatccccagagagtcgagtttgccagcatctccattccaggagtggttgatgcccagattcat

SEQ ID NO: 27468 - DNA, 1360 bp, Homo sapiens
  SIMILAR (282)..(419): 471254mologous to Homo sapiens Human secreted protein, SEQ ID NO: 7348,accession number G03267,Smith-Waterman Score=114.
ctttctatcaggggagggaggctgtgctctcactggcttcttgttagaagttctgcctgccctacagcctgcactgagggctctcatcactgcttctgagatcttaatgggggtcaacgaagatgtgggcttctctgagtttagaccatccatctgccaaggaaaaccaagccctgagactgatagagatgagagaagagaatggtaatgtccccaagacagagcaggcaggaagtttgaagcctctgagggatacaggaaaatctaacctcaaagagaagaagaatacaccaggcctacatggattcaatggtaaattctgccaaacttttaaggaagaaattataccaatcctctacaatctctttcaaaagataaaaacagaggaaataattcctaactcatcctgtgaggccaacagcaagctgaagcagatttgagaaggaatacactcagaagcttgccaaatcttcacagatcatagcagaacttcagacaaccatttcctctctgaaagaagagaacagccagcagcagcttgccatgtataaggcggctccaggatgttagacaaaagtttgaagatgagaagaagcagctgattagagataatgaccaagcaatcaaggttttacaagatgaattagaaaacccgttctaatcaggtgcgatgtgcagagaaaaaattacaacacaaagaattgggagtcacaggaacagataacttacataccgacaagaatatgaaacaaaattgaaaggatttgatgccagcatccctaagaccaagaactttgaagacaccatttcctccctaaaatcacaggttaattttctgcaaaagagagcttcccatccttcaggaagaactgactacatatcaaggcagaaggtacagcccataagcaggtaactgcacgagagaattgcaacggagtgcaatttcccaggctgtgctgtgggacttcttcccagcaggtttgaagatttggatattgtaaactgtgagatcagtggcattttttaaatccttaaatgtaattaagatcataagaaacgtggcatcattcatacactagtggggtggttttatttgtgtctgcctaagttatttttttaacattcctttatttccgattttcatgtttgtgtgcatttgagtatgtgctgagaactgcttatattgggcaaagtggatttcctatgatatgccttggttaatccttttgccatagaaattttacccagttgcggtacggttccaaatcacgtttggtaggtatcatatccaaaaattctaacctgtttacattgttttcatgttcatgttcctatgttattaaaatattattttgtactt

SEQ ID NO: 27469 - DNA, 397 bp, Homo sapiens; identical to SEQ ID NO: 2151
  SIMILAR (364)..(11): 711254mologous to Homo sapiens p40,accession number U93566,Smith-Waterman Score=400.
  misc_feature (1)...(397): n = a,t,c or g

SEQ ID NO: 27470 - DNA, 529 bp, Homo sapiens; identical to SEQ ID NO: 3741
  SIMILAR (12)..(359): 871254mologous to Homo sapiens p40,accession number U93566,Smith-Waterman Score=510.

SEQ ID NO: 27471 - DNA, 369 bp, Homo sapiens; identical to SEQ ID NO: 7968
  SIMILAR (2)..(364): 911254mologous to Homo sapiens p40,accession number U93569,Smith-Waterman Score=577.

SEQ ID NO: 27472 - DNA, 939 bp, Homo sapiens
  SIMILAR (91)..(936): 671254mologous to Homo sapiens p40,accession number U93572,Smith-Waterman Score=950.
atggggaaaaaacagaacagaaaaactggaaactctaaaacgcagagcgcctctcctcctccaaaggaacgcagttcctcaccagcaacggaacaaagctggatggagaatgactttgacgagctgagagaagaaggcttcagacgatcaaattactctgagctacgggaggacattcaaaccaaaggcaaagaagttgaaaactttgaaaaaaatttagaagaatgtataactagaataaccaatacagagaagtgcttaaaggagctgatggagctgcaaaccaaggctcgagaactacgtgaagaatgcagaagcctcaggagccaatgcgatcaactggaagaaagggtatcagcaatggaagatgaaataaatgaaatgaaaccaaatctacgtctgattggtgtacctgaaagtgatggggagaatggaaccaagttggaaaacactctgcaggatattatccaggagaacttccccaatctagcaaggcaggccaacgttcagattcaggaaatacagagaacgccacaaagatactcctcaagaagagcaactccaagacacataattgtcagattcaccaaagttgaaatgaaggaaaaaatgttaagggcagccagagagaaaggtcgggttaccctcaaagggaagcccatcagactaacagcggatctcttggcagaaaccctacaagccagaagagagtgggggccaatattcaacattcttaaagaaaagaattttcaacccagaatttcatatccagccaaactaagcttcaaaagtgaaggagaaattaaatactttacagacaagcaaatgctgagagattttctcaccaccaggcctgccctaaaagagctcctgaaggaagcactaaacatggaaaggaacaactggtaccagctgctacaaaatcatgccaaaatgtaa

SEQ ID NO: 27473 - DNA, 865 bp, Homo sapiens
  SIMILAR (1)..(711): 941254mologous to Homo sapiens p40,accession number U93569,Smith-Waterman Score=1143.
atggagctgaaagccaaggctcgagaactacatgaagaatgcagaagcctcaggagccgatgcgatcaactggaagaaagggtatcagtgatggaagatgaaatgaatgaaatgaagcgagaagggaagtttagagaaaaaagaataaaaagaaacgaacaaagcctccaagaaatatgggactatgtgaaaagaccaaatctacatctgattggtgtacctgaaagtgacggggagaatggaaccaaattggaaaacactctgcaggatattatccaggagaacttccccaatctagcaaggcaggccaacattcagattcaggaaatacagagaacgccacaaagatactcctcgagaagagcaactccaagacacataattgtcagattcaccaaagttgaaatgaaggaaaaaatgttaagggcagccagagagaaaggtcgggttacccacaaagggaagcccatcagactaacagcggatctctcggcagaaactctacaaaccagaagagagtgggggccaatattcaacattcttaaagaaaagaattttcaacccagaatttcatatccagccaaacgaagcttcataagtgaaggagaaataaaatcctttacagacaagcaaatgctgagagattttgtcactaccaggcctggcctaaaagaactcctgaaggaagcactaaacatggaaaggaacagctgggcaaagtgttcccatgcagggttatgccacacgtttccattcgagcagatggcagaaaggtttgtctgcaatgtggaacttgttaagggggaaggccttcctgatagagatcaagaaggccgctttaatttacttagtggtgggatggttt

SEQ ID NO: 27474 - DNA, 1290 bp, Homo sapiens
  SIMILAR (421)..(1287): 821254mologous to Homo sapiens p40,accession number U93564,Smith-Waterman Score=1178.
atgaaggacttcttcaaggagaacaacaaactactgctcaatgaaataaaagaggatacaaagaaatggaagaacattccatgctcatgggtaggaaggagcaatatcgtgaaaatggccatactgcccaaggcctcaaagggctccaactatccacttgcagctgctacaaaagagagtttcaaaactgcacagattcttctaatggactgtttccaaactgttcaagaaaaaaaagcggtgttgccaaactgctccaaaaaacgaaatgttcaactctgtgaggcctcaaagcgttccaaatatccacttgcaggttccataaaaagggtgtttccaaactgctcaatcaaaagaaaggttcaactctgtgagatgaatgcacatatcacaaagaagtttctcagaatgcttctgtgtagtttttggatgaagctacatgaggaaattcgaaccaatgacaaagaagttaaaagctttgtaaaaaaattagacgaatggataactagaataaacaatgcagagaaatccttaaaggacctgatggagctgaaaaccaaggcatgggagctacatgacaaatgcagaagcctcagtagccattgtgatcaagtggaagaaagggtatctgtgatggaagatgaaatgaatgaaatgaagcaagaaaagaagtttagagaaaaaagaaaaaaaagaaatgaacaaagcctccaggagatatgggactatgtgaaaagaccaaatctacgtctgattggtgtatctgaaagtgacagggagaatggaaccaagttggaaaacactctgcaggctattttccaggagaacttccccaatctagcaaggcgggccaacattcaaattcaggaaatacagagaatgccccaaagagactcctcaagaagagcaactccaagacacataattgtcagattcactaaagttgaaatgaaggaaaaaatgttaagggcagccagagagaaagctcgggttacccacaaagggaagcccatcagactaacagcaggtctctcagcagaaactctacaagccagaagagagtggggaccaatattcaacatacttaaagaaaagaattttcaacccagaatttcatatccagccaaactaagcttcaaaagtgaaagaaaaataaaatactttacagacaagcaaatgttgagagattttgtgaaaaccaggcatgccttaaaacagctcctgaaagaagcactaaacatggaaaggaaaaactggtaccagccactacaaaaacatgccaaattgtaa

SEQ ID NO: 27475 - DNA, 2840 bp, Homo sapiens
  SIMILAR (2121)..(2561): 371254mologous to Homo sapiens p40,accession number U93564,Smith-Waterman Score=163.
  misc_feature (1)...(2840): n = a,t,c or g
atgggtcctggggcgcggctggcggcgctgctggcggtgctggcgctcgggacaggagacccagaaagggctgcggctcggggcgacacgttctcggcgctgaccagcgtggcgcgcgccctggcgcccgagcgccggctgctggggctgctgaggcggtacctgcgcggggaggaggcgcggctgcgggacctgactaggtgcaatgatgaaacaataacatacctgttagataagaggttgactgttctcactgcagctaacatcccctactcgtctccggaaaacggtgcgaagagaaggcgccaagacgccttccctccaatacactacaatacccaggacgctttgctacaatacctctccggggttggctggggggcgcctccagctgcgcaagcgcatagggatgcgccctttgtggactccattgcgcaggtgctgttgcgcacttccggtggaagcgctgaagcgagtgggtggagtttacggagccggtgggcggtaggcggtgctacgggtagctgggtgctgtccaaaggcgacagggcgtcgttaggggagcgagtcgtgaccggttgggccacactcaacgtgggacgaagcttcgcctactgtttgactacgtgcgtgcagcctcccctcgatgtcggccctcgaaaagagcatgcacctcggccgccttccctctcgcccacctctacccggcagcgggggcagtcagagcggagccaagatgcgaatgggagaaggaaacagaagaccaagtcagagcctgagagatttgaagatgctgtgttgcttgccggctttaaagtggaggaagaacctgtccagagacctaggaggaaagaatggtttcagggcccaagcccagggcactgctgccctgctcagcctcaggactctgcaccttgtatcctggctactcatgctccagccagggctcaaaatgccccaggcacagcttgggccgctgctctagagggcacaagcactgtaagccttgaccacttccatgtggttggtgtagtggttgtatcaggaggtgagatcattctactcctttctttcagattctacgacaaggtactttctttgcatgaggattcaacaacccctgtggctaaccctctgcttgcatttactctcatcaaacgcctgcagtctgactggaggaatgtggtacatagtctggaggccagtgagaacatccgagctctgaaggatggctatgagaaggtggagcaagaccttccagcctttgaggaccttgagggagcagcaagggccctgatgcggctgcaggacgtgtacatgctcaatgtgaaaggcctggcccgaggtgtctttcagagagtcactggctctgccatcactgacctgtacagccccaaacggctcttttctctcacaggggatgactgcttccaagttggcaaggtggcctatgacatgggggattattaccatgccattccatggctggaggaggctgtcagtctcttccgaggatcttacggagagtggaagacagaggatgaggcaagtctagaagatgccttggatcacttggcctttgcttatttccgggaacagagctcctcaccagcaacggaacaaagctggatggagaatgactttgatgagttgagagaagaaggcttcagacgatcaaactactccgagctacaggaggaaattcgaaccaatggcaaagaagttaaaagctttgaaaaaaaattagacgaatggataactagaataaccaatgcagagaagtccttaaaggacctgatggagctgaaaaccaaggcacgagagctacgtgacgaatgcagaagcctcagtagccgatgcaatcaactggaagaaagggtatcagtgatggaagacgaaatgaatgaaacgaagcgaggagagaagtttagagaaaaaagaataaaaagaaacgaacaaagcatccaagaaatatgggactatgtgaaaagaccaaatctacgtctgattggtgtacttgaaagtgacagggagaatggaaccaagttggaaaacactctgcaggatattatccaggagaacttccccaatctagcaaggcaggccaaccgttcagattcaggaaatacagagaacgccacaaagatactcctcgagaagagcaactccaagcacacctaattgtcagattcaccaaagttgaaatgaaggaaaaaaatgttaagggcagccagagagaaaggtcgggttaccctcaaagggaagcccatcagactaacaacagctgatctctcagcagaaactctacaagccagaagacagagtgggggccaatattcaacattctctaaagaaaagaattttccaacccagaatttccatatccagccaaacctaagcttcataagtgaaggagaaataaaatactttacagacaagcaaatgctgagagatttttgtcaccgccaagcctgcccttaaaagagctcctgaaggaagaagcactaaacattggaaagggacaacccggtaccagccacttgcaaaaacattgccaaatttgtaaagaccattgaggctagggaagaaacttgcatcaacttaacgagcaaaataaccagctaacatcataatgacaggatccaaattcacacataacaatattaactttaaatgtaaatggggctaaatgctccaattaaaagacacagactgggcaaattggataaagagtcaagacccatcagtgtgctgtattcaggtaaccatctcacgtgcagagacaccataggctcaaaataaaggatggaggagatctaccnagccatggaaacaaaaaa

SEQ ID NO: 27476 - DNA, 451 bp, Homo sapiens
  SIMILAR (10)..(171): 441254mologous to Homo sapiens spiceosomal protein,accession number L21990,Smith-Waterman Score=83.
tcccctaaccccatccctccagtgtgtcagctcttgaaaggccttcccaccaggacgccccttaatggctcgggacccccgcggcgcgtgggtggctatgccacgtccccatcctctcccaagaaggaggcgacctccgggcgcaggtaaggcacaaggccgggacccccagcctcttccaagacctcgtgggagacagaggtggtttgtttgcctgagctccagcagcagagggtgcagggagaatctcgcttgctcacggcactcgcctgctggcctagaaggctctgcccccacctgtgtgctctcttttagcagtgtccgccgctacttgtcaccagagcgcctcgcctcggtgcgccgtgaggacccccgcagccggaccacatcctccagcagcaactgtagcgccaaaaaggaagggtaagacgaaatcgtcgacccgggaatt

SEQ ID NO: 27477 - DNA, 561 bp, Homo sapiens
  SIMILAR (495)..(154): 381254mologous to Homo sapiens cytoplasmic protein,accession number AF177377,Smith-Waterman Score=171.
cacggagccatcctccacactgaagataacttctttggttttgccttcctttttggcgctacagttgctgctggaggatgtggtccggctgcgggggtcctcacggcgcaccgaggcgaggcgctctggtgacaagtagcggcggacactgctgcgcccggaggtcgcctccttcttgggagaggatggggacgtggcatagccacccacgcgccgcgggggtcccgagccattaaggggcgtcctggtgggaaggcctttcaagagctgacacaccgaggcagtggtgcctaagcgcggaggcgcccggcccttgggggtgccccgcgcgcgtagcgccgctccctgttcttcgcatgcccgcaggcgacgcagagcatccgccagcgccgcctttaggaccgccagctcgtcttcctgtaactgcagccgctgctccagcgccgacacgcggtcgtccacttccataccgctcgtgcccgacaaattgtcatcgttgcagtatcgcagcagcgaggacgtgtcgtacaggccgcagaaggccgggccgcgctccgccat

SEQ ID NO: 27478 - DNA, 2766 bp, Homo sapiens
  SIMILAR (2463)..(1696): 871254mologous to Homo sapiens ubiquitin-like fusion protein,accession number AF311324,Smith-Waterman Score=1109.
ctacacgcactcgtcggggcagccgtactgcagaagcacgttgatgcactcctggctggaggcctgccgggcgtaggtcagcgctgtgttcccgtgggcatctcgggccatgacgtccaccccgtaccagatcaggagctgcgccaggaccacattccccttgcggcaggccagatggagcgccgtgcagccgtctccctccccacaggtctcgttcacctcctcacgggagccatgtgccagcagcaggatggctgtctgcaggtcctcatcagcggtggcccgcagcagctgctggcccagggacagatcagtgcagggtagtggggccagaaagagcttctcctcatatttggaaaggatccaccgttccttttcttccctcgtggacttttctgagggttttgtctgtccctggctgctcccttcccagatgctgttggctaggtcattgccaatagatgacataaccttcctgagctcaactggccagtcatccagctccagagatcgcacacgggaaaggcgggtgccaagactgcggtggatacctgagcattcaatacacatgaggactcccaagttcaaactggcccacttaggattctgggtctcacagtccacacagtgggcgttcccacgcatgttttggatcgactgcagggccatggcctcgctctggctggtcagctgggacttgcttttactgctctcgcatgactgcaggctggccaggatctggctctggatggcttggacccaggcatcccgctcctcatatgtcgtggcttcaaagtgccacgtttggccagtggcagacacaatcataaagttgttggtgcttttcttctttaggtgtttctttttattggcatgaggagaggggggcgggttgagcttggggccggtggtgctggagatactggggctgaagcatatggagtcacccagcccggtgtccatgtccttggataggtcattgcttttagagctggagatgggtgcgcaggccgatgtggctagggatggccactttcctgggactttgatggtagatgtctgaaggtcaatctcttttttatgaatattcttcatataatcacctaagcttgaataataggtgagcacgccattggaacacagggtgacgtatttctttttccatgtcttcagccatttcccacttcgctttaagagcatgccctgtttaatggggatggctctgccgctcccgatggtgtcagcatgattctccggggctttcctctctttgtctgggtcactccctttctcagatgtaaacaggttggaccagcgcatggaccgcttgcaaacgggggtgggtgtgttggcagtgggaggaacactgaactgagggtcctcctggctggtgctgggagtcgatggaatggaggaggaatagttatttaaactcccacctccatttctgttcttcgtaatgtgcacggtggaaacctgttctgcatttctacctaagacttcaccagacgggcctttaaagtccatcatgcccacgaacattctgttgatgatgatatatgtattctgtaagaatatggaggctttctctctggctctcctcttttctttctgagcccttataagagttacctttaattcaatcatctgttggaccatagctatcaacagtccacggggtggaagtacgcgtcggggttcgcggaccctttcagccccgtggtgaagacaaatggcgactctttctaaaacactagctttcaagtcctggacggtctgccgtctcttgcaggaggccaaaaaaactcctgtatgttctaactggggagaacttttcctaaagttttcttcctgaaaatgctggaggtttgtagacagcccagttccagagttctgaagcctgcctgccccacgtgtgctctgtaatctatttctgcttgtgctcccggccagtgaggcaagaaaactgatattatttacacaaccaacaggctctttggaagccttgttagtcatttctgtgatatcccgagcctcaactttggaaataacatcagatcttttcccaagtgaatcaactttaacaccttgaaagcaagtagtcctagagaaagaagaatcagttatgttttgaacatccagtgactgagaagaagaaggctgtagcttcccaaactcaaaacatttggactgtctctctggtttcaccagagaattatgtagcgacattggtgcagaacagcgaagaggtgacaagagtctattcttgtgaggacttaattcccggtagttaagaactgaagtctctactgattccccattcagcactcctgcaacatgcttgagatgctgctctggagctttcaaccctttgtcagcattagtgagtagcaactccagattcactttgcacgcaccttctaagccgctgctctgttcatcagcatttccttcttcactggacagctctccaagacctacatcttcttgttccatgaacagctttgacccaatgagatatggtaaaggacgatcaatgtatagatccaaaagggaatggttaacaaatattgcatacacaggggtgtgtgggggctccagggccgggatgacggcggctgcagttgcggcggctgcaggatgagcgggtggatccccaggaagcgcctccagtgatgcctctgaatggtcccgaggggttgtggtggccgggcagagccaggcaggagccagagtcagcatggggggtgatggagctgtggccat

SEQ ID NO: 27479 - DNA, 440 bp, Homo sapiens
  SIMILAR (20)..(118): 481254mologous to Homo sapiens type III collagen alpha 1(III) chain {alternatively spliced},accession number S79877,Smith- Waterman Score=73.
tctgctgccacacgatgctgggaggcctggggaagctggctgccgaaggcctggcccaccgcaccgagaaggccaccgagggagccattcatgccgtggaggaagtggtgaaggaggtggtgggacacgccaaggagactggagagaaagccattgctgaagccataaagaaagcccaagagtcaggggacaaaaagatgaaggaaatcactgagacagtgaccaacacagtcacaaatgccatcacccatgcagcagagagtctggacaaacttggacagggttgtggtggccgggcagagccaggcaggagccagagtcagcctgggggtgatggagctgtggccatcaccggtctgacagtggaccagtatggcatgctgtataagggggctgtgccacctgccaccttctcaccaactggactcccatctgtgtga

SEQ ID NO: 27480 - DNA, 378 bp, Homo sapiens
  SIMILAR (128)..(376): 241254mologous to Homo sapiens Human secreted protein, SEQ ID NO: 7922,accession number G03841,Smith-Waterman Score=76.
gaactgtctctttctcattcctttgactccgctggacttgccgcccccgtgacctggtgttgggtctcatcatcccaacagattcccattctaaagatgagggaaccaagaggtggaagttcatgccatggaggaagtggtgaaggaggtggtgggacatgccaaggagactggagagaaagccattgccgaagccataaagaaagcccaagagtcaggggacaaaaagatgaaggaagtcactgagacagtgaccaacacagtcacaaatgccatcacccatgcagcagagagtctgggcaaacttggacagtgaatgcacctgctaccatggcccacccttcccaagtctcaataaaaagccatgacatgtgtaaa

SEQ ID NO: 27481 - DNA, 907 bp, Homo sapiens
  SIMILAR (300)..(398): 391254mologous to Candida glabrata metallothionein- I,accession number J05133,Smith-Waterman Score=59.
tcactcagattcttccttgctggtttgccagtggccacatctttctagtgatggctgcagctcctgatgatcctcccctacagccacagctctcttcggggtctgtggacacctttcctgtccctctagacccagggagataacagctcccactcttgctggtccagggcatttctcatctctcattggttcccttaactctgtccacacttctgtgaacagccccttttcctcaagtacccattcgaatatgtcctctggcttccaccaggagcctgactgatacccacaggtgggtgaatgctggcgtgcttctgggccgaagcatgttttgtatgcagaggtcagcagctgtgtgtggggaggcccagccaggccccactcatgggtcatcatgtgaaaaacagccttgcctgagtttgtgtcctctttcacctgtttctttgttagatcaccaataaatagcatgggctcccagagctcagtgcctttgcagcctccacactggcaatggccccctggtcccactttctctcttgaactttttctcattcttttgactccgcgggactttgttgcccccacgacctggtgttggctctgatcatcccaacagattcccatttgagcttgtctcccatcagccagtgtcccggcatctccaaatgaaggcagcctggactcaggagggcagtgggcctgctctgagccctcaccctggactgagagggcagtgggcctgctctgagccctcaccctggactgggagggcagcgggcctgctctgagccctcaccctggacttgtctcctctgttcagttcatgccatggaggaagtggtgaaggaggtggtgggacatgccaaggagactggagagaaaggtacagctggctgaggtcgggcat

SEQ ID NO: 27482 - DNA, 517 bp, Homo sapiens
  SIMILAR (501)..(430): 611254mologous to Homo sapiens Human secreted protein encoded by gene 81,accession number Y00337,Smith-Waterman Score=102.
  misc_feature (1)...(517): n = a,t,c or g
gttcctctctctgcgccttggctccccttcccagagcccttcctcttggtcttgccaaatcctgcccatcctttgagaaacgcttatgcccatggctgttcttaccccttcctgctttgctgtggtatccattagtctgttctcgcgctgctaataaagacatacaaaagactgggtaatttataaaggaaagaggtttaatggactcacatttccacatggctggggaggcctcacaatcatggtggaagatgaaggaagagcaaagggactttttatgtggcggcaggaaagagagcttgtgcagggaaactcccatttataaaactgttcagatctcatgaggacttatttcactaccatgggaacacgtatgggggaaactgcccccttgatttcatttattctccacctggccctgccctttnacacgtgggggttattacaattcaaggtgagatttgggtggggacacagccaaaatatatctggcatatgcaatctgatcaccccttcc

SEQ ID NO: 27483 - DNA, 957 bp, Homo sapiens; identical to SEQ ID NO: 1825
  SIMILAR (436)..(498): 761254mologous to Homo sapiens Human secreted protein encoded by gene 20,accession number Y36243,Smith-Waterman Score=94.

SEQ ID NO: 27484 - DNA, 6102 bp, Homo sapiens
  SIMILAR (2)..(4687): 1001254mologous to Homo sapiens NEDD4-like ubiquitin ligase 1,accession number AB048365,Smith-Waterman Score=8183.
ccccgaccagttccacaacatggacctcaggggcggcccccacgatggcgtcaccattccccgctccaccagcgacactgacctggtcacctcggacagccgctccacgctcatggtcagcagctcctactattccatcgggcactctcaggacctggtcatccactgggacataaaggaggaagtggacgctggggactggattggcatgtacctcattgatgaggtcttgtccgaaaactttctggactataaaaaccgtggagtcaatggttctcatcggggccagatcatctggaagatcgatgccagctcgtactttgtggaacctgaaactaagatctgcttcaaatactaccatggagtgagtggggccctgcgagcaaccacccccagtgtcacggtcaaaaactcggcagctcctatttttaaaagcattggtgctgatgagaccgtccaaggacaaggaagtcggaggctgatcagcttctctctctcagatttccaagccatggggttgaagaaagggatgtttttcaacccagacccttatctgaagatttccattcagcctgggaaacacagcatcttccccgccctccctcaccatggacaggagaggagatccaagatcataggcaacaccgtgaaccccatctggcaggccgagcaattcagttttgtgtccttgcccactgacgtgctggaaattgaggtgaaggacaagtttgccaagagccgccccatcatcaagcgcttcttgggaaagctgtcgatgcccgttcaaagactcctggagagacacgccataggggatagggtggtcagctacacacttggccgcaggcttccaacagatcatgtgagtggacagctgcaattccgatttgagatcacttcctccatccacccagatgatgaggagatttccctgagtaccgagcctgagtcagcccaaattcaggacagccccatgaacaacctgatggaaagcggcagtggggaacctcggtctgaggcaccagagtcctctgagagctggaagccagagcagctgggtgagggcagtgtccccgatcgtccagggaaccaaagcatagagctttccagaccagctgaggaagcagcagtcatcacggaggcaggagaccagggcatggtctctgtgggacctgaaggggctggggagctcctggcccaggtgcaaaaggacatccagcctgcccccagtgcagaagagctggccgagcagctggacctgggtgaggaggcatcagcactgctgctggaagacggtgaagccccagccagcaccaaggaggagcccttggaggaggaagcaacgacccagagccgggctggaagggaagaagaggagaaggagcaggaggaggagggagatgtgtccaccctggagcagggagagggcaggctgcagctgcgggcctcggtgaagagaaaaagcaggccctgctccttgcctgtgtccgagctggagacggtgatcgcgtcagcctgcggggaccccgagaccccgcggacacactacatccgcatccacaccctgctgcacagcatgccctccgcccagggcggcagcgcggcagaggaggaggacggcgcggaggaggagtccaccctcaaggactcctcggagaaggatgggctcagcgaggtggacacggtggccgctgacccgtctgccctggaagaggacagagaagagcccgagggggctactccaggcacggcgcaccctggccactccgggggccacttccccagcctggccaatggcgcggcccaggatggcgacacgcaccccagcaccgggagcgagagcgactccagccccaggcaaggcggggaccacagttgcgagggctgtgacgcgtcctgctgcagcccctcgtgctacagctcctcgtgctacagcacgtcctgctacagcagctcgtgctacagcgcctcgtgctacagcccctcctgctacaacggcaacaggttcgccagccacacgcgcttctcctccgtggacagcgccaagatctccgagagcacggtcttctcctcgcaagacgacgaggaggaggagaacagcgcgttcgagtcggtacccgactccatgcagagccctgagctggacccggagtccacgaacggcgctgggccgtggcaagacgagctggccgcccctagcgggcacgtggaaagaagcccggaaggtctggaatcccccgtggcaggtccaagcaatcggagagaaggtgaatgtcctatactccataattcccagccagtaagccagcttccttccctgaggcctgaacatcatcactacccaacaatcgatgagcctcttccaccaaactgggaagctcgaattgacagccacgggcgggtcttttatgtggaccacgtgaaccgcacaaccacctggcagcgtccgacggcagcagccaccccggatggcatgcggagatcggggtccatccagcagatggagcaactcaacaggcggtatcaaaacattcagcgaaccattgcaacagagaggtccgaagaagattctggcagccaaagctgcgagcaagccccagcaggaggaggcggaggtggagggagtgactcagaagccgaatcttcccagtccagcttagatctaaggagagaggggtcactttctccagtgaactcacaaaaaatcaccttgctgctgcagtccccagcggtcaagttcatcaccaaccccgagttcttcactgtgctacatgccaattatagtgcctaccgagtcttcaccagtagcacctgcttaaagcacatgattctgaaagtccgacgggatgctcgcaattttgaacgctaccagcacaaccgggacttggtgaatttcatcaacatgttcgcagacactcggctggaactgccccggggctgggagatcaaaacggaccagcagggaaagtcttttttcgtggaccacaacagtcgagctaccactttcattgacccccgaatccctcttcagaacggtcgtcttcccaatcatctaactcaccgacagcacctccagaggctccgaagttacagcgctggagaggcctcagaagtttctagaaacagaggagcctctttactggccaggccaggacacagcttagtagctgctattcgaagccaacatcaacatgagtcattgccactggcatataatgacaagattgtggcatttcttcgccagccaaacatttttgaaatgctgcaagagcgtcagccaagcttagcaagaaaccacacactcagggagaaaatccattacattcggactgagggtaatcacgggcttgagaagttgtcctgtgatgcggatctggtcattttgctgagtctctttgaagaagagattatgtcctacgtccccctgcaggctgccttccaccctgggtatagcttctctccccgctgttcaccctgttcttcacctcagaactccccaggtttacagagagccagtgcaagagccccttccccctaccgaagagactttgaggccaagctccgcaatttctacagaaaactggaagccaaaggatttggtcagggtccggggaaaattaagctcattattcgccgggatcatttgttggagggaaccttcaatcaggtgatggcctattcgcggaaagagctccagcgaaacaagctctacgtcacctttgttggagaggagggcctggactacagtggcccctcgcgggagttcttcttccttctgtctcaggagctcttcaacccttactatggactctttgagtactcggcaaatgatacttacacggtgcagatcagccccatgtccgcatttgtagaaaaccatcttgagtggttcaggtttagcggtcgcatcctgggtctggctctgatccatcagtaccttcttgacgctttcttcacgaggcccttctacaaggcactcctgagactgccctgtgatttgagtgacctggaatatttggatgaggaattccaccagagtttgcagtggatgaaggacaacaacatcacagacatcttagacctcactttcactgttaatgaagaggtttttggacaggtcacggaaagggagttgaagtctggaggagccaacacacaggtgacggagaaaaacaagaaggagtacatcgagcgcatggtgaagtggcgggtggagcgcggcgtggtacagcagaccgaggcgctggtgcgcggcttctacgaggttgtagactcgaggctggtgtccgtgtttgatgccagggagctggagctggtgatagctggcaccgcggaaatcgacctaaatgactggcggaataacactgagtaccggggaggttaccacgatgggcatcttgtgatccgctggttctgggctgcggtggagcgcttcaataatgagcagaggctgagattactgcagtttgtcacgggaacatccagcgtgccctacgaaggcttcgcagccctccgtgggagcaatgggcttcggcgcttctgcatagagaaatgggggaaaattacttctctccccagggcacacacatgcttcaaccgactggatcttccaccgtatccctcgtactccatgttgtatgaaaagctgttaacagcagtagaggaaaccagcacctttggacttgagtgaggacatggaacctcgcctgacattttcctggccagtgacatcacccttcctgggatgatccccttttccctttcccttaatcaactctcctttgattttggtattccatgatttttattttcaaaccaaatcaggattgacaaaagctgtgcatgaagaactgccttcttctaagatctaaccttcaggcttctctcctctgttttcaatgaactgctagcctgtatgcaatattaaaaaacagctgtctcaaggtctgtgtatatctccacatacctccattactaacaatgaaatatgaatgcaagttaagctacacttgaccaaatggtaataaatgtttacttccatttctatcattgaagggaaaatgtgagcattaagcactccaggctttcatatgcccatgtcttctgagcagagccaccattttttataatttctaataaccaactccagaactaggagctgatcaactctttgttttcctctccatctacttttccctgtgcataatatccatccaaaggacaacagtggcaaagctgaaatttttatacattcaactcatgattcacatgtggcatcagtcccatcagccggaactagcctagacatacggtgcaaatatgacacttctaacgattaacaacagcaagaaaacacctgctgctgatgcaatgcaatgcatcccaatggttgtggggattgtgggctcaactcaagagaagtttaggagggggagcatccctagtgaatactcacaccacaagaaggacaaacttgtgcacatgtccaagaaagaaagcttcttgattgaggtagcatgaaggatgaggcttcagcccccattgtcttatgtagaatgtggcaatgccaactggagaaagggaagaaggacatattaccttggtttgaatccctgagttctgtactgttctgttttgtttagtctagccacagttcttcacaaaggaaaaaaaaatgtgtagatgataccatgacttttgttaaagccatgacttttgtttgcttggcagacaaaccctttttttaaaactttgatatttttttttcacattttttttccttttcctttcttaatcatggagttcaagttcctttgcattcgattgtccatcgggaccacactaggaagctgcagagagtgatggtgcttgttagggatcaagggcaacatagtacttctccttcacccatagtaatcctcctggggcagaaacataacaccccaaaggcacgttgatttgtatcaaaataaatatccagtttcttttagcattcagtgaaaacatatctcagaaaacttcatgttgtcagaaaaacagctgcaggctccaaagacagcctaacctctcaactacatttgaaataaacccaaccataatggt

SEQ ID NO: 27485 - DNA, 1278 bp, Homo sapiens; identical to SEQ ID NO: 8494
  SIMILAR (823)..(1128): 951254mologous to Homo sapiens NEDD4-like ubiquitin ligase 1,accession number AB048365,Smith-Waterman Score=521.

SEQ ID NO: 27486 - DNA, 870 bp, Homo sapiens
  SIMILAR (529)..(840): 321254mologous to Oryza sativa globulin-like protein,accession number U45320,Smith-Waterman Score=100.
atgatactcttttattttgtcttcaccacggggcggaaggtcgcgtcgggacagggagccttgggactgccgaagagcgccgtgggcgagagattacgtcgagtcccccggggctgtgagcgacaccggcagcgaggccgccgcctcaacaggtcctcgcggacctccgggacagtcctgtggggtccgccgccctcctcccacccagagctccggggagaagctgctgaggacgcggctgggacgagggggggcgccgggacccggactttcacttgcagtctctcctcgcgcttttctcccgagccgggaggaggaggagctggcgatgtgtgcgccgtgcccggtgtcttttgcagagtgaccgccgtacctgttttattcgtgtgtaccagtgctcgttgtgcagtgcggtgtcctatgcggtggtgtgctcgaagtacccggtgtcgtaccggctatcatacacgaaatatcaaagaacataagacagcctatactgccaatcctcaaataccagtgaggagatctgtgcctagatcattgaaaatagggtcatcatatgcaacaatacagaaaaatcgactcagttgcacaggggctgcttctctagagccgacacggccgaaacgacgggggaccggtagacggaccgcgccacgcaggacaagagaagaacgacgaacagaccagacgcacggaagaggcggaagcagtgaaggaagcggcgacggcgagaaagcagcggaagcggcaagtagaaacgaaggagatgtaagcaaacgtaaagcgagcagcgacagcggccagatagcgcgtgctgtaagacggaaaagacagagggacgagagcgagcgcacggagcaataa

SEQ ID NO: 27487 - DNA, 472 bp, Homo sapiens
  SIMILAR (223)..(471): 981254mologous to Homo sapiens dJ422F24.1 (PUTATIVE novel protein similar to C. elegans C02C2.5),accession number AL031010,Smith-Waterman Score=432.
accatgtatttcctgactcccatcttggtagccattctctgcattttggttgtgtggatctttaaaaatgccgacagaagcatggagaaaaagaagggggagcctagaaccagggccgaagctcgcccctgggtggatgaagacttaaaagacagcagtgacctgcaccaagcagaagaagatgctgatgaatggcaagaatcagaagaaaatgttgaacacatccccttctctcataaccactatcctgagaaggaaatggttaagaggtctcaggaattttatgaacttctcaataagagacggtcagtcaggttcataagtaatgagcaagtcccaatggaagtcattgataatgtcatcagaacggcaggaacagccccgagtggggctcacacaaagccctggaccttcgtggttgtgaaggacccagacgtgaagcacaagattcgaaagatcattgaggaggaac

SEQ ID NO: 27488 - DNA, 1215 bp, Homo sapiens
  SIMILAR (566)..(1117): 1001254mologous to Homo sapiens dJ422F24.1 (PUTATIVE novel protein similar to C. elegans C02C2.5),accession number AL031010,Smith-Waterman Score=968.
catgtatttcctgactcccatcttggtagccattctctgcattttggttgtgtggatctttaaaaatgccgacagaagcatggagaaaaagaagggggagcctagaaccagggccgaagctcgcccctgggtggatgaagacttaaaagacagcagtgacctgcaccaagcagaagaaggtgggaatgcagtggaaggcgtggatcagagtaaagttaatggaagagcaacagggtttgctagtaaattggatattgggaaaaggaggagagagggagagttggagactggaagctatcataagtggactcatgcctatgctctgaaaaagagtggtccatggaatccagggacatggcagcacaggaaaatcgtcagaggtttacaattttacactgtcttcttccctcatcagcctgttttggcatttttagctccagtgattgacccttctgttgcatcttcatcttctctaagatcttcaactactgataatgagcttgcagaactttctgaacaggaggatgctgatgaatggcaagaatcagaagaaaatgttgaacacatccccttctctcataaccactatcctgagaaggaaatggttaagaggtctcaggaattttatgaacttctcaataagagacggtcagtcaggttcataagtaatgagcaagtcccaatggaagtcattgataatgtcatcagaacggcaggaacagccccgagtggggctcacacagagccctggaccttcgtggttgtgaaggacccagacgtgaagcacaagattcgaaagatcattgaggaggaagaggagatcaactacatgaaaaggatgggacatcgctgggtcacagacctcaagaaactgagaaccaactggattaaagagtacttggatactgcccctattttgattctcattttcaaacaagtacatggtttcgccgcaaatggcaagaaaaaagtccactactacaatgagatcagtgtttccatcgcttgtggcatcctgctagctgccctgcagaatgcaggtctggtgactgtcactaccactcctctcaactgtggccctcgactgagggtgctcctgggccgccccgcacatgaaaagctgctgatgctgctccccgtggggtaccccagcaaggaggccacggtgcctgacctcaagcgcaaacctctggaccagatcatggtgacagtgta

SEQ ID NO: 27489 - DNA, 401 bp, Homo sapiens
  SIMILAR (266)..(150): 381254mologous to Volvox carteri reverse transcriptase,accession number X69625,Smith-Waterman Score=67.
cggccgctctcccccggaagccctcggaggcagcacgatggacgtggccacactgccctccagtggccagctcgccgaacaacacgtctgggccccttttgggggtctgggtgacgtgtccaccctctctctgccctttgctacatttgaaggtggggtttgctcatccatggttcctcttacaggtcaccaaagctgccacagtgcacactcacccaacagcaggggatttgccgccttcggtggttctcaaacttcagtgtgcacaggaatccccccttggacagttctttcaaacccggattgctgggtcccccaaccaagtcagagaatttgcatttctaacaaatcctcaggcgatgctgagctgctggtccgctggtcctggagccacacttaga

SEQ ID NO: 27490 - DNA, 1245 bp, Homo sapiens
  SIMILAR (955)..(1065): 411254mologous to Human herpesvirus 4 Epstein-Barr nuclear antigen,accession number X53316,Smith-Waterman Score=70.
ttagcactgtcgcagtgtccactcatcatgggtactaatactcgtggagccataagtaaaagccacaatggtggttggagagctgctgtcagggaagcatgtcctgggaatcgatgaaatgcagtagttctttttcttctgattggtggtttgtgtgcttctggggcttctgtctcttgccacgaggcctgttacatgctggcagctttcccagtgaattttctccaccccaggaccagcctgggtaagtccctggccattcaactcagccagcaggggaagggctgtagggagcccttcccctccccttggccggtccttggtggcactttcagtggccatgtccttgctggataatgcttctttcatccttgataaaaaacacaggggtgctactgacttcaccagctggtttggaggcttcaaagagaagatggccgtgtagcctgagctcagccagtgacactggtgaatgtcaaagaatggaagccatcgtgaccctgggggctgtgtcagttcccttgccttgctggactccagacagcggaccagcagctcagcatcgcctgaggatttgttagaaatgcaaattctctgacttggttgggggacccagcaatccgggtttgaaagaactgtccaaggggggattcctgtgcacactgaagtttgagaaccaccgaaggcggcaaatcccctgctgttgggtgagtgtgcactgtggcagctttggtgaccttcaaatgtagcaaagggcagagagagggtggacacgtcacccagacccccaaaaggggcccagacgtgttgttcggcgagctggccactggagggcagtgtggccacgtccatcgtgctgcctccgagggcttccgggggagagcggccgcgggaggacgggaacgaagccgtagcgagaacctcgccccacgccgcagcctcctgcagcagcgtcggctcgccggccccttgcgttccgagccgcccagggagctcagccgccgcagccccggcccctgtgtctcccctcgcgggccgggcctggtgtgcacgtctggatggcctcgggcccagcagctgcagcagatctggttgcctttggtcagacaagagcaggccctggtttgggggcccacagtaccccggggtggagggtgcagttggtgggagaaactcagcactaaagaagtcacagggctgtggcaaagacccgtcctctctcactcccccgccggctgtccacat

SEQ ID NO: 27491 - DNA, 1180 bp, Homo sapiens; identical to SEQ ID NO: 6149
  SIMILAR (479)..(1177): 931254mologous to Homo sapiens p40,accession number U93567,Smith-Waterman Score=1110.

SEQ ID NO: 27492 - DNA, 956 bp, Homo sapiens
  SIMILAR (191)..(271): 1001254mologous to Homo sapiens melanoma differentiation associated protein-5,accession number AF095844,Smith-Waterman Score =143.
atgccagctgctatggtcaactcaaatacaactcccaggagagatgtcatcaagagcccaccagttgcacagagcggtagaccctgcttctctaagtgggcagcggacagcggcacgcacatttcacctgtcccgcagacaacagcaccatctgcttgggagaaccctctcccttctctgagaaagaaagatgtcgaatgggtattccacagacgagaatttccgctatctcatctcgtgcttcagggccagggtgaaaatgtacatccagaggtgaaggagcagattcagaggacagtcgccacctccgggaacatgcaggcagttgaactgctgctgagcaccttggagaagggagtctggcaccttggttggactcgggaattcgtggaggccctccggagaaccggcagccctctggccgcccgctacatgaaccctgagctcacggacttgccctctccatcgtttgagaacgctcatgatgaatatctcccacctgctgaacctccttcagccccactctggggggacaagctcctagttaaagacgtctggattaagtgcatggaggaggaactgttgacaattgaagacagaaaccggattgctgctgcagaaaacaatggaaatgaatcaggtgtaagagagctactaaaaaggattgtgcagaaagaaaacctggttctctgcatttctgaatgttcttcgtcaaacaggaaaccaatgaacttgtccaagagttaacaggctctgattgctcagaaagcaatgcagagattgagaatttatcacaagttgatggtcctcaagtggaagagcaacttctttcaaccacagttcagccaaatctggagaaggaggtctggggcatggagaataactcatcagaatcatcttttgcagattcttctgtagtttcagccgcgttacctggcaaaatcggctacggttga

SEQ ID NO: 27493 - DNA, 1410 bp, Homo sapiens
  SIMILAR (283)..(939): 801254mologous to Homo sapiens putative lipid kinase,accession number AJ278150,Smith-Waterman Score=936.
atgacggtgttctttaaaacacttcaaaatcattggaagaaaactacagctgggctcttcctgctgacctggggaggccagtggctctatggaaaacactgtgataacctactaaggagagcagcctgtgaagaagctcaggtgtttggcaatcaactcattcctcccaatgcacaagtgaagaaggaaactgtttttctcaatcctgcagcttgcaaaggcaaagccaggattctatttgaaaaaaatgctgccccgattttacatttatcccagcatagagagacagttccatttgacgtcttgcagatcaagggtgaaaaggaacagcctgtgtttgcaatgactggcctttggtggggatccctcagagatgctggcatcaaagttagcagcactcttaaggagtggcctcagactcatgaaacttctatcttgtatacaggacctacagagagacctgccaatgaaccagaggagacccctgtacgaaggccttctttgtacaggagaatattacggaggcttgcatcttactgggcacaaccacaggatgccctttcccaagaggtgagccgagaggtctggaaagatgtgcagttgtccaccattgaactgtccatcacaacacggaacaatcagcttgaccgaacatgcaaagattttatgaacatctgcattgaagccgacaccgtcagcaaaggaggctttataactataggaagcctaaaggtgagaaaagccaagctggacactgagggcatggagtgtctccaagccagccagtacactttgcttgtccccaagggagcagggagctcttttagcattgacagtgaggagtatgaagcgatgcctgtggaagtgaaactgctccccaggaagctgcagttcttctgtgatcctaggaagaaagaacagatgctggcaagctccacccacctcctccacgggtgctgctattttgagagctccggctcttgtttagcttttatttcaattctatcctcagtccagaaaggagctgagtttaagaaggctagaggaagtccagttagatttgatattgaccaaacaggagactgcccagatgctattgatcccctgcacttggcagcacaaatgcccttgggtgtgcattacttcaagcaaacggaagtgtgccccgctgacagtgggaatgcctggctggggattgatgatgatgatgatgatgatgatagtgatgatgatgataatggtggtgatgatgatgatagcagtaatggaactggttctgggccagtgccagagtgggtgattgggaaatatagtgaaaaggcagccatttacaaaccaagaagagagcctttaccacagtccaaccatactggcaccctcatcccaggtctccagcctctagaaatgtga

SEQ ID NO: 27494 - DNA, 1200 bp, Homo sapiens
  SIMILAR (145)..(687): 981254mologous to Homo sapiens putative lipid kinase,accession number AJ278150,Smith-Waterman Score=944.
atgggcacaaaagaatcaaccagaagaatatgggatgtgattagagagcaggatctcagggttttagatttccaaagtggaatagttctgggtgacattaggggccaggatgtggccatggaaatgggtggatgtggtgaatcagaggagtggcctcagactcatcaagcctctatctcatacacgggacctacagagagacctcccaatgaaccagaggagacccctgtacaaaggccttctttgtacaggagaatattacgaaggcttgcgtcctactgggcacaaccacaggatgccctttcccaagaggtgagcccggaggtctggaaagatgtgcagctgtccaccattgaactgtccatcacaacacggaataatcagcttgacccgacaagcaaagaagattttctgaatatctgcattgaacctgacaccatcagcaaaggagactttataactataggaagtcgaaaggtgagaaaccccaagctgcacgtggagggcacggagtgtctccaagccagccagtgcactttgcttatcccggagggagcagggggctcttttagcattgacagtgaggagtatgaagcgatgcctgtggaggtgaaactgctccccaggaagctgcagttcttctgtgatcctatgaagagagaacagatgctcacaagccccacccagtgagcagcagaagacaagcactctgagaccacactttaggccaccggtgggaccaaaagggaacaggtgcctcagccatcccaacagtgtcgtcagagggtccccagggcattttcatgggaaggacccctctgcccccactccagcagtgcttcccaaagtgtgctctgtcacctgctttgcaatcggcttccattagcgcatgttttattttggtgtgacggttggccctcctaaacacggactttcctcaggctggttcaagacggaaaaggactttcttctgttttcttccaaagtgcaaccacagtggagagcccacggtgggcttagcctgcctaggcccttccatttctcttctttgaccgtgctaggaattccaggaaagtgcattcctgccctggtgaccttttcctatgtctaggctcctccacaggtgctgctattttgtgagctccggctcctgtttagcttttatttcagttctaacctcagtccagaaacatatgtgag

SEQ ID NO: 27495 - DNA, 776 bp, Homo sapiens
  SIMILAR (129)..(545): 991254mologous to Homo sapiens putative lipid kinase,accession number AJ278150,Smith-Waterman Score=730.
tgggaaaaaaaggagtgagagaggataaaagaatggaagacagagtaatagggacattacatgaagaccatggataaattatatttttttctctttccgcctctactaacctagcaaatctctagaagatgacggtgttctttaaaacgcttcgaaatcactggaagaaaactacagctgggctctgcctgctgacctggggaggccattggctctatggaaaacactgtgataacctcctaaggagagcaccctgtcaagaagctcaggtgtttggcaatcaactcattcctcccaatgcacaagtgaagaaggccactgtttttctcaatcctgcagcttgcaaaggaaaagccaggactctatttgaaaaaaatgctgccccgattttacatttatctggcatggatgtgactattgttaagacagattatgagggacaagccaagaaactcctggaactgatggaaaacacggatgtgatcattgttgcaggaggagatgggacactgcaggaggttgttactggtgttcttcgacgaaccagatgaggctaccttcagtaagattcccattggatttatcccactgggagagaccagtagtttgagtcataccctctttgccgaaagtggaaacaaagtccaacatattactgatgccacacttgccattgtgaaaggagagacagtttcacttgatgtcttgcagatcaagggtgaaaaagaacagcctgtatttgcaatgaccggccttcgatggggatcttttaaaag

SEQ ID NO: 27496 - DNA, 1446 bp, Homo sapiens
  SIMILAR (178)..(375): 861254mologous to Homo sapiens dJ233G16.1 (novel protein),accession number AL135959,Smith-Waterman Score=311.
gcgactgcggacaggttagagttgtggttggggcggacgcggaagcagcccaagggcagagagggagcccgagccaggccatctccaaccatgttcgacgaggcctcggccatcacttcctacgagaagtttctaacccccgaggagcccttcccactcctgggacctcctcgcggggtgggcacctgtccgagcgaggagccggactgcctggacatcaacgacttcggctgccagctgtcctcctgccatcgcaccgacccgctccaccgcttccacaccaacaggaggaacctaactttttgtggaacaagtgttgccagctcacaaggcagggaggagctgttttcatctgcgtctgttgggaaacaagaatgattcctatccccgtttaggtgatcaggacttcacttcttttgatttatttcctgaggggagtgtctgcagtgatgtctcttcttctattagcacttactgggattggtcagatagcgagtttgaatggcagttaccaggcagtgacattgccagtgggagtgatgtactttctgatgtcatacccagtattccaagttcaccttgcctgcttcctaaaaagaaaaacaagcaccggaatttagatgaactcccttggagtgcaatgacaaatgatgagcaggtggaatatattgagtatctgagtcggaaagtgagtactgagatgggtcttcgggagcaacttgatattattaagatcattgatccttctgctcaaatctcccctacagacagtgagtttattattgaacttaactgtctcacagatgaaaaactgaagcagcattttgaaggtagaacatcaaggtgcaacactaaccagtttgtgtttgtgcatcccaaggtcagaaactatatcaaggaacatagccctcgccaacggcctgcaagagaggcctggaagagaagcaactttagttgtgcaagcaccagtggagtgagcggtgccagtgccagcgccagcagcagcagtgccagcatggtcagttctgcaagcagcagtgggtccagtgttggaaactctgcttcaaactccagtgccaacatgagtcgagcacacagtgacagcaacctgtctgcaagtgcagcagagcggattcgggattcaaaaaagcgatccaagcagcggaagttacagcagaaggccttccgcaagaggcagctgaaggagcagaggcaggcccggaaggagaggctcagtgggctcttccttaacgaagaggtgctgtccttgaaagtgactgaggaagaccatgaagcagatgttgatgttttgatgtaataagggtgaatttatcaacgttctttgtgagcattaaaatactccatccttatgggtttacatgcatcttgaccaaaattttggttagggctgtgctgatgtaccattaataatttaagccagtggtt

SEQ ID NO: 27497 - DNA, 963 bp, Homo sapiens
  SIMILAR (76)..(612): 981254mologous to Homo sapiens sorting nexin 11,accession number BC000768,Smith-Waterman Score=924.
actcgggatggtggcatcgctttacatcctagggagggactctcttaccacccggaattaagatgtttccttccaatgggcttttggtgtaggatgtcggagaaccaagaacaggaggaggtgattacagtgcgtgttcaggacccccgagtgcagaatgagggctcctggaactcttatgtggattataagatattcctccataccaacagcaaagcctttactgccaagacttcctgtgtgcggcgccgctaccgtgagttcgtgtggctgagaaagcagctacagagaaatgctggtttggtgcctgttcctgaacttcctgggaagtcaaccttcttcggcacctcagatgagttcattgagaagcgacgacaaggtctgcagcacttccttgaaaaggtcctgcaaagtgtggttcttctgtcagacaggcagttgcacctattccttgcaagccagctctcggtgcctgagatagaagcctgtgtccagggccgaagtaccatgactgtgtctgatgccattcttcgatatgctatgtcaaactgtggctgggcccaggaagagaggcagagctcttctcacctggctaaaggagaccagcctaagaggccttacatccatactaccgagtccaagagtgaagtaatctgctccaagttctggtaccctaaatgtggagatgttgaagaaatgaacttcaatctccagatgctgcgtgcttctctggaggtggaacagttcatgacacgtccagagggctggtggtgtgcatatgccaccttggtgactcacagcacagcaatgcgggcatgtctgatggtgtggaaaagggaaatgtctgtagcctgcttcctgttccatgatgggatgtggaggataaaaggtgaccagctgctcaccatcaggctgcaagtgtctacagtggaaccagatgtcctctttgaggaccagcactag

SEQ ID NO: 27498 - DNA, 440 bp, Homo sapiens
  SIMILAR (261)..(353): 431254mologous to Homo sapiens Human secreted protein fragment encoded from gene 41,accession number Y25823,Smith- Waterman Score=64.
  misc_feature (1)...(440): n = a,t,c or g
aagtcagggttcccatctatagtgacaaatccataggggcttgcttgggaagtaccatcctttcgtggaaggtgccgggtgtataaaggagtacctttgggcagcctggtcccaaagctgaaagcccaggtctggtgcctctggggcaggttggctgcccaggggagaaaccaaatcattaatgtgtccacctagtgggggctgcgagattgtcgaagcctggctgagagctgatcgatatgcattctgggatgttcccctggactccccaccccttgcctgactctgttcttggggctccccagggaaaggggaactgcaacttcaggcagtgtaatttgtctaaaaagaaacacggggaaaagangtagctgcaaaacatcgagccatcntcaactttccccccacttcccacaacacctttgggacacaccagattg

SEQ ID NO: 27499 - DNA, 603 bp, Homo sapiens
  SIMILAR (331)..(600): 1001254mologous to Homo sapiens ribosomal protein L26 homolog,accession number AF083248,Smith-Waterman Score=454.
atggacaggtttgacatctacaggaaggtgcccaaggaccttacgcagccaacgtacaccggggccattatctccatctgctgctgcctcttcatcctcttcctcttcctctcggagctcaccggatttataacgacagaagtgtataggagttgcccgaagggcctccgcaggatgagccctaagacttacagagcaatcgagaggagaaagcatcacatctttggggtcttccagttgtcagaagcttgtggcccccaggaagccctacaggtttgggaacaactgaaggtcacagttctcgtcttctgggtggctggccctctgtggcaggtagttcgaggacactacaaaggtcagcaaattggcaaggtagtccaggtgtacagaaagaaatatgtcatctacatcgagcgggtgcagcgtgagaaggccaacggcacaactgtccacgtgggcattcacccaagcaaggtggttatcaccaggctaaaactggacaaggatcggaaaaaaattcttgaacgcaaagccaagtctcgacaagttggaaaagagaaaggcaaatataaagaagaacttattgagaaaatgcaggaataa

SEQ ID NO: 27500 - DNA, 375 bp, Homo sapiens
  SIMILAR (166)..(363): 651254mologous to Homo sapiens HT034,accession number AF267855,Smith-Waterman Score=197.
atggaggagctgaaaacgccagtggtagacacagtcaacaagcaaacaaaactagactgtatcgatcaggggcaagtactccaaagacaagaactaaagcagggcaggagagggacaaccttaaaagggaaaattgggaacaactctgtgttcctcgatgaggacagagaagtaagtgaggatccagccatagaagggaacgtgctggagccattcgaaatgaccctcacgggtccacaggacatgggaaatgccaatggtccccggcaacttccacgtgtccacacacagtgccacagcgcagccacagaacccagacatgacgcatgtatccacaagctctcctttggggacacgctacaggccttgggatag

SEQ ID NO: 27501 - DNA, 468 bp, Homo sapiens
  SIMILAR (356)..(436): 961254mologous to Homo sapiens F1FO-type ATPase subunit d,accession number AF087135,Smith-Waterman Score=132.
gcgcagaatttctttacaattcaaggtgctaagaggccattttttggtcatcaagtccagctgtccttgtcagatgaagaaaatgaagcttatcatcataaagaattgtccagggttccgagttagtgatagggctgagaagacccttgagctcctgttcccagtctaatattctttctactccagtattgagatgcgtattcgtttccgcttgggacacagaatgtctttcagtatgacctttaaggattcgtagcttccagccctttgagctcctgggtgtattggcgacgactcactgtccttgtgtttgtagtttaatgcgctgaaggttcccgtgcccttgtgtttgtagtttaatgcgctgaaggttcccgtgccagaggataaatatactgcccaggtggatgccgaagaaaaagaagatgtaagtagttgaggctcctgcttattctaaaattctcttga

SEQ ID NO: 27502 - DNA, 432 bp, Homo sapiens
  SIMILAR (82)..(360): 781254mologous to Homo sapiens My032 protein,accession number AF061735,Smith-Waterman Score=355.
gaaaagctgtggtttgcctgtcagagtgagcgcccccactcagggtaaccacagtttctccatagagcaataggacagcaggagtgggctgggacgactcctaccttagcagctgctggggtagaatgcagcctggtttcagaactgaatttctctttcttcttaaaggtgaaatcttgtgctgagtgggtgtctctctcaaaggccaggattgtagaatatgagaaagagatggagaagatgaagaacttaattccatttgatcagatgaccattgaggacttgaatgaagctttcccagaaaccaaattagacaagaaaaagtatccctattggcctcaccaaccaattgagaatttataaaattgagtccaggaggaagctctggcccttgtattacacattctggacattaaaaataataattataca

SEQ ID NO: 27503 - DNA, 666 bp, Homo sapiens
  SIMILAR (82)..(564): 481254mologous to Homo sapiens F1FO-type ATPase subunit d,accession number AF087135,Smith-Waterman Score=247.
cggacgcgtgggctgcggaggaccgtgggcagccagggtcggtgaaagaatccccaacatggctgggcgaaaacttgcctcctaaaaacccactgactgagtagcttttgccagagattcataccccagaacccaaaagcgccattgcctagtttcctgaaatccctggaatggagacccctcaccctccaggttgggctgctttaccctgagaatcccacccagctatcgaactgggcttaactaccaaggcccaatgttgcccaaggcttggcttgggtggatgactttgaggaagaagtttaatgccgctgaaaggttcccgtgcccagaggataaaatatactgcccaggtggatgcccgaagaaaaaagaagatgtgaaatccttgtgcctgagtgggtgtctctctcaaaggcccaggattgtagaatatgagaaagagatggagaagatgaagaacttaattcccatttgatcagatgacccattgaggacttgaatgaagctttcccagaaaccaaattagacaagaaaaagtatccctattgggctcaccaacccaattgagaatttataaaattgagtccaggaggaaagctctggcccttgtattacacattctggacattaaaaataataattatacaaaaaaaaaaaaaaaaa

SEQ ID NO: 27504 - DNA, 678 bp, Homo sapiens; identical to SEQ ID NO: 11565
  SIMILAR (289)..(636): 911254mologous to Homo sapiens Similar to ribosomal protein S2,accession number BC001795,Smith-Waterman Score=545.

SEQ ID NO: 27505 - DNA, 1357 bp, Homo sapiens
  SIMILAR (137)..(1354): 1001254mologous to Homo sapiens Human secreted protein encoded by Gene No. 24,accession number W73420,Smith-Waterman Score =2150.
gagaggacgaggtgccgctgcctggagaatcctccgctgccgtcggctcccggagcccagccctttcctaacccaacccaacctagcccagtcccagccgccagcgcctgtccctgtcacggaccccagcgttaccatgcatcctgccgtcttcctatccttacccgacctcagatgctcccttctgctcctggtaacttgggtttttactcctgtaacaactgaaataacaagtcttgatacagagaatatagatgaaattttaaacaatgctgatgttgctttagtaaatttttatgctgactggtgtcgtttcagtcagatgttgcatccaatttttgaggaagcttccgatgtcattaaggaagaatttccaaatgaaaatcaagtagtgtttgccagagttgattgtgatcagcactctgacatagcccagagatacaggataagcaaatacccaaccctcaaattgtttcgtaatgggatgatgatgaagagagaatacaggggtcagcgatcagtgaaagcattggcagattacatcaggcaacaaaaaagtgaccccattcaagaaattcgggacttagcagaaatcaccactcttgatcgcagcaaaagaaatatcattggatattttgagcaaaaggactcggacaactatagagtttttgaacgagtagcgaatattttgcatgatgactgtgcctttctttctgcatttggggatgtttcaaaaccggaaagatatagtggcgacaacataatctacaaaccaccagggcattctgctccggatatggtgtacttgggagctatgacaaattttgatgtgacttacaattggattcaagataaatgtgttcctcttgtccgagaaataacatttgaaaatggagaggaattgacagaagaaggactgccttttctcatactctttcacatgaaagaagatacagaaagtttagaaatattccagaatgaagtagctcggcaattaataagtgaaaaaggtacaataaactttttacatgccgattgtgacaaatttagacatcctcttctgcacatacagaaaactccagcagattgtcctgtaatcgctattgacagctttaggcatatgtatgtgtttggagacttcaaagatgtattaattcctggaaaactcaagcaattcgtatttgacttacattctggaaaactgcacagagaattccatcatggacctgacccaactgatacagccccaggagagcaagcccaagatgtagcaagcagtccacctgagagctccttccagaaactagcacccagtgaatataggtatactctattgagggatcgagatgagctttaa

SEQ ID NO: 27506 - DNA, 1035 bp, Homo sapiens; identical to SEQ ID NO: 9452
  SIMILAR (370)..(1032): 931254mologous to Rattus rattus ribosomal protein S2,accession number X57432,Smith-Waterman Score=1051.

SEQ ID NO: 27507 - DNA, 997 bp, Homo sapiens
  SIMILAR (197)..(937): 471254mologous to Homo sapiens Human RNA-associated protein- 25 (RNAAP-25),accession number Y70244,Smith-Waterman Score=394.
  misc_feature (1)...(997): n = a,t,c or g
aaatggcgaataaccccggtgccaacgggcaggcccgggggccctggtggcccggggatgggaaaaccccgttgctttccggcgaggttttcggcattgtcatccggggccggggttcccgcccggtggacggggccggggccgagagccgcggagctcgcgggagcaaaggccgaggataaagggattgggatgcccgtccaccaagttggggccgctttggtcaaggaccattaaagatcaaagttcccctggaaggagatctatctcttctccctgccccattaaaggaatcagagatcattgattttctttctggggggcctcctctcaaaggatgaaggttttgaatgattatgcccagtgcaagagcaagacccgtgccggcccagccgccaccagggttcaaggcattttgttgctatccgggaactaccaatggcccacgtcggttctgggtgttaagtgctcccaagaaggtggcccaccggccattccgtggggccattcatcctggccaagcttctccatcgtccccgtgcgcaagaggctactgggggaacaaaattcgcaagccccaacactgtccctttgcaaggtgacaaggccgctgcggctctgtgctggtacgcctcatcccctgcaacccaggggcactggcatcgtctccgcacctgtgcctaataagcttgctcatgatggctggtatcgatgactgctacaccctcagnccgggggctgcactgccaccctggggcaacttcgccaaggccaccctttgattgccatttctaagacctacagctacctgacccccgacctctggaaggagactgtattcaccaagtctccctatcaggagttcactgaccaactcgtcaaagaccacaccagagtctctgtgcagcggactcaggctccagctgtggctacaacatagggttttttatacaagaaaaataaagtgaattaagcgtgaaaaaaaaaaaaaaaaaaa

SEQ ID NO: 27508 - DNA, 867 bp, Homo sapiens
  SIMILAR (385)..(864): 851254mologous to Homo sapiens peptidylprolyl isomerase,accession number X52851,Smith-Waterman Score=737.
atggatgatcctgccagcgctaaaaaacctttcgaaggtaatctgaacgcaggatatcttgcacaatcaggcaatacgaaaagctcctcacttacggctgacaccaccatgacctgctggctgacagaccgttataacggctatcgagagcgcgatgtgttgaccgcgggttatggtcgtcagtttttgaatggcccggtcacagtttccgctttgaattcggtccaggtagatctgtttccaacctcagctgaggtcccctacagtcagcttcctgccattgccattttccttaatttccatctaactctaaatctgatgaagctttcacgccttcattttgaaggaggcaccgctgctgccaggagccctgtgctatcagccatggtcaaccccaccgtgttctttgacacggagcccttgggccgcatctcctttgagctgtttgcagacaagtttccaaagacagcaggaaactttcatgctctgagcactggagagaaaggatttggctataagggttcctgctttcacagaattgttccagggtttatgtgtcagggtggagacttcacatgccatgatggcactggtggcaagtccatctacagggagaaatttgatgacaagaacttcatccggaagcatacagtttctggcatcttgtccatggcaaatgctggacccaacgcaaacagttcccagtttttcatctgtgctgccaagactgagtggttggatggcaagcatgtggtcttcagcaaggtgaaagaaggcatgaatattgtggagaccatggagtgctttgggtccaggaatggcaagaccagtaagaagatcaccattgctgactgtgggcaactctaa

SEQ ID NO: 27509 - DNA, 952 bp, Homo sapiens
  SIMILAR (434)..(724): 941254mologous to Homo sapiens peptidylprolyl isomerase,accession number X52851,Smith-Waterman Score=493.
ccggcgcgcccacgcgtgcgcgaggagaaggagaaagaaagaaatgcttggggtaaatgttttaactagtcattcttcccaggagcggatgaagctgacttttaaaaagaaggctgtgaactttgcagatgctgctgccgcccagggccccctgcttccagccatggtcaaccccaccatgtttttccacattgctgtcgatggcgagcccttgggctgtgtctccttcgaggtaaggggcctggaaagcaagaagtgactgctcatctaatccataaaactatgttaacagattggagctgtttgcagacaaggttccaaagacagcagaaaatttccatgctctgagcactggagaaaaaggatttggttataagggttcctgctttcacagaattattccagggtttatgtgtcagggtggtgactgtgaagtcaccataatggcactggtggcaagtccatctacacggagaaatttgaagatgagaacttcatcctaaagcatacaggtcctggcatcttgtccatggcaaatgctggacccaacacaaatggttcccagtttttcatctgcactgccaagactgagtggttggatggcaagcacgtgctctttggcaaagtgaaagaaggcacgaatattgtggaggccatggagcgctttgggtccaggaatggcaagaccagcaagaagatcaccattgctgactgtggacaactcttaataagtttgacttgtgttttatcttagccaccagaccattccttctgtgctctcctctcaggagagcacccctctaccccatttgctcgcaggatcctaagaattttgtggctctcgctgcagttcctttggggttccatgttttccttgttccctcccatgcctagctggattgcagagttaagtttatgattatgaaataaaaactaaataacaaaaaaaaaa

SEQ ID NO: 27510 - DNA, 387 bp, Homo sapiens; identical to SEQ ID NO: 27219
  SIMILAR (202)..(324): 971254mologous to Homo sapiens fau,accession number X65923,Smith-Waterman Score=209.
  misc_feature (1)...(387): n = a,t,c or g

SEQ ID NO: 27511 - DNA, 890 bp, Homo sapiens
  SIMILAR (738)..(836): 961254mologous to Homo sapiens fau,accession number X65923,Smith-Waterman Score=167.
tctcactcaccttaggagtctgacctctcacttttccagcacgggccagggaaccatggactttacctgtagtgggaaaggaaggcaccagcaggtaagagcaagaaggtgccacccagcagaacccctcttttctcaattcaagcctttaaagagaagctgcgcccaataggtaatgagaacaaagttgcagatatttgaccttgaaatcttaagtttcatttcaggatcttccagcttctaattttatagagcactttgggggccctggtctgacctaattttagtgtggaagctgataaccagactaggatctcgtgatgtgactgaaatacaactacactctggctcagtctcccatggacgtctgtgttcaacatgagggatgtaaacaggaagaatcactctgaactgaagacagtgagaagtactctattaccataggtgtgacactcagctgtcaggactatgcaccccacactcactagacgcttaccggtacttcaaagaacattcctctctcactcacctccaaagcatgcgggcctggttacttcccagggtaagtcagggccttccaccccgcacttggcccagaagtgggcctcatccctccaaggggcggcgccttgccaaggaagcacgagcttgatctttccgggggcaatgccttcccagttgaaggctacatggagcctttgatcttgggcgaaccgttttccttggccggtgctggaaaagtgacaggtcgggctaagcggcggatgcagtacaaccggcgctttgtcaacgttgtgcccacctttggcaagaagaagggccccaatgccaactcttaagtcttttgtaattctggctttctctaataaaaaagccacttagttcagtaa

SEQ ID NO: 27512 - DNA, 1959 bp, Homo sapiens
  SIMILAR (198)..(1697): 1001254mologous to Homo sapiens transglutaminase X,accession number AF035960,Smith-Waterman Score=2677.
cagctaccatggcccaagggctagaagtggccctcacagacctccagagctccagaaataatgtgcggcaccacacggaggagatcactgtggaccacctgcttgttcgccggggccaggccttcaacctcaccctgtacttcaggaaccggagcttccagccaggcctggacaacatcatcttcgtggttgaaactgaggatgctgtctacttggacagtgaaccccagaggcaggagtatgtcatgaatgattatggcttcatctaccaaggcagcaagaactggatccgcccatgtccctggaactatggacagtttgaagacaaaatcatagacatctgcctgaagctgctagacaagagcctgcacttccagactgacccagccacagactgtgctctgcggggaagccccgtctacgtcagcagagtggtgtgtgccatgatcaacagcaatgatgataatggggtgctcaatggaaactggagtgagaattacacagacggcgccaaccctgcggagtggacgggcagcgtggccatcctgaagcagtggaacgccacaggctgccagcccgtgcgctacgggcaatgctgggtctttgctgccgtcatgtgcacagtgatgaggtgtctggggatccctacccgtgtgatcaccaacttcgactctggccacgatacagatggaaacctgatcatagatgagtattatgacaacacaggcaggattttggggaataagaagaaggatactatctggaacttccatgtctggaatgagtgctggatggcccggaaggatctgccccctgcatatggaggctggcaggtgctggacgccacacctcaggagatgagcaacggcgtctactgctgtggccctgcctctgtcagagccatcaaagaaggagaagtggacctgaactatgacacgccctttgtgttttcgatggtgaatgctgactgcatgtcctggctcgtccagggagggaaggagcagaagcttcaccaggacacgagttctgttggcaattttatcagcacaaagagcatccagagtgacgagcgggatgacatcacagagaactacaagtatgaagaaggatccctccaggagaggcaggtgtttctgaaggctctgcagaagctgaaggctagaagcttccatggctcccaaagaggagcagagttgcaaccttccaggcccacatcactgagccaggacagccctcggagcctgcatacaccttcccttcgacccagtgatgtggtgcaagtctccctgaaattcaagctgctcgacccgcccaacatgggccaggatatatgctttgtcctgctggccctcaacatgtcctcccagttcaaggacctcaaagtgaacctgagtgcccagtctctgctgcacgatggcagccccctgtccccattctggcaggacacagcgttcatcacactctctcctaaagaagcaaagacctacccctgcaaaatctcctattcccagtacagccagtacctgtcaacagacaagctgatccgcatcagtgccctgggtgaagagaaaagcagtcctgagaaaatcctggtgaacaagatcatcaccttatcttatccaagcatcacgattaatgttctaggagcagccgttgtgaaccagccactctccatacaggtgatattttcaaacccccctctcggagcaggttgaggactgtgtgctgactgtggaaggaagtggcctcttcaagaaacagcagaaagtcttccttggagtcctcaaaccccaacaccaagcaagcatcattctggagaccgtccccttcaagagtggacaaaggcagatccaagctaatatgagaagcaacaagtttaaggacattaagggttacaggaatgtttatgtagactttgcattataaattctggaacaacgcgccagacgtgtgagtttc

SEQ ID NO: 27513 - DNA, 759 bp, Homo sapiens
  SIMILAR (1)..(318): 991254mologous to Homo sapiens transglutaminase X,accession number AF035960,Smith-Waterman Score=566.
atggcccggaacgatctgccccctgcatatggaggctggcaggtgctggacgccacacctcaggagatgagcaacggcgtctactgctgtggccctgcctctgtcagagccatcaaagaaggagaagtggacctgaactatgacacgccctttgtgttttcgatggtgaatgctgactgcatgtcctggctcgtccagggagggaaggagcagaagcttcaccaggacacgagttctgttggcaattttatcagcacaaagagcatccagagtgacgagcgggatgacatcacagagaactacaagtatgaagaagggctagaagtggccctcacagacctccagagctccagaaataatgtgcggcaccacacggaggaaatcactgtggaccacctgcttgttcgccggggccaggccttcaacctcaccctgtacttcaggaaccggagcttccagccaggcctggacaacatcatcttggtggttgaaactgtcctggggtcctgtgatctggtgccggtcagagcagtcaaggaggggacgctggggctgaccccagcagtgtcagacctttttgctgccataaatgcctcatgtgtggtctggaagtgctgtgaggatgggacactggagttgactgactccaacacaaagtatgttggcaacaacatcagcaccaagggtgtgggcagtgaccgctgcgaggacatcactcagaactacaagtatcctgaaaggtttctcaaccccatttga

SEQ ID NO: 27514 - DNA, 2604 bp, Homo sapiens; identical to SEQ ID NO: 13561
  SIMILAR (310)..(2172): 991254mologous to Homo sapiens transglutaminase X,accession number AF206510,Smith-Waterman Score=3321.

SEQ ID NO: 27515 - DNA, 1680 bp, Homo sapiens
  SIMILAR (1)..(315): 1001254mologous to Homo sapiens transglutaminase X,accession number AF035960,Smith-Waterman Score=565.
atggcccggaaggatctgccccctgcatatggaggctggcaggtgctggacgccacacctcaggagatgagcaacggcgtctactgctgtggccctgcctctgtcagagccatcaaagaaggagaagtggacctgaactatgacacgccctttgtgttttcgatggtgaatgctgactgcatgtcctggctcgtccagggagggaaggagcagaagcttcaccaggacacgagttctgttggcaattttatcagcacaaagagcatccagagtgacgagcgggatgacatcacagagaactacaagtatgaagaagaacattttgaggcatttcagtcagttgctcaatgtacctataaccagaccgttcagctggatattacggcctttttaaagaccgtaaagaaaaataagcacaagttttatccggcctttattcacattcttgcccgcctgatgaatgctcatccggagttccgtatggcaatgaaagacgcaaagacctaccccggcaaaatctcctattcccaggacagccaggacctgtcaacagacaagctgatccgcatcagtgccctgggtgaagagaaaagcagtcctgagaaaatcctggtgaacaagatcatcaccttatcttatccaagcatcacgattaatctgctggcccgggtgctaagcccctcactgcccgggccggcagggctggccagccgctccgagtacgggcccgccaaacccacgcccaccgggaactctagctggcccgcaagcgccgcgcgcagccccggttcccgcccgtgcctctccctccacacctccccgcaagctgagggagccggctccggcctggaccagcccagagaaaggctcccacagtgcagcggcgagctgaagggctcctcaagcgcggccagaatgggcgccgagaacgaggaggcaccgagagcgagcgagggctgccagggctgccagcaagctgtcacctctcaacaggacggggggcccttgctccagaaccgtttcttctgggactgtggggatgagaatggggcagatgctgtctacttggacagtgaaccccagaggcaggagtatgtcatgaatgattatggcttcatctaccaaggcagcaagaactggatccgcccatgtccctggaactatggacaggctgccagcccgtggcgctacgggcaatggtgggtctttgctgccgtcatgtgcacagccctgggtatcaagagctgtgactttcaggcagcaagaaacaatgaggagcaccacaccaaggccctcagctcccggcgcctctttgtgaggagggggcagcccttcaccatcatcctgtacttccgcgctccagtccgtgcatttctgcctgccctgaagaaggcaaataaagggaaactagagagcttttcttatatctgcttcttctcaattgtcttcggctcaaagaattcttatgccaaagtggcatatttggaggtggcatatcctgccaccttacagaatggtgcccttcgtaaatatctggttctaggagcagccgttgtgaaccagccactctccatacaggtgatattttcaaaccccctctcggagcaggttgaggactgtgtgctgactgtggaaggaagtggcctcttcaagaaacagcagaaagtcttgatcccctga

SEQ ID NO: 27516 - DNA, 1656 bp, Homo sapiens; identical to SEQ ID NO: 13560
  SIMILAR (712)..(1164): 991254mologous to Homo sapiens transglutaminase X,accession number AF206510,Smith-Waterman Score=852.

SEQ ID NO: 27517 - DNA, 2204 bp, Homo sapiens
  SIMILAR (9)..(2168): 1001254mologous to Homo sapiens transglutaminase X,accession number AF035960,Smith-Waterman Score=3817.
cagctaccatggcccaagggctagaagtggccctcacagacctccagagctccagaaataatgtgcggcaccacacggaggagatcactgtggaccacctgcttgttcgccggggccaggccttcaacctcaccctgtacttcaggaaccggagcttccagccaggcctggacaacatcatcttcgtggttgaaactggaccgctgtcagacctggccttggggactcgggctgtgttcagcctggcacgccatcacagccccagcccctggattgcctggctggagaccaatggggccacctccacagaggtgagcttgtgcgctcctcccacggcggccgtgggtcggtacctcttgaaaatccacatcgactccttccaggggtctgtgacggcctaccagctaggggagttcatcctgcttttcaatccctggtgcccagaggatgctgtctacttggacagtgaaccccagaggcaggagtatgtcatgaatgattatggcttcatctaccaaggcagcaagaactggatccgcccatgtccctggaactatggacagtttgaagacaaaatcatagacatctgcctgaagctgctagacaagagcctgcacttccagactgacccagccacagactgtgctctgcggggaagccccgtctacgtcagcagagtggtgtgtgccatgatcaacagcaatgatgataatggggtgctcaatggaaactggagtgagaattacacagacggcgccaaccctgcggagtggacgggcagcgtggccatcctgaagcagtggaacgccacaggctgccagcccgtgcgctacgggcaatgctgggtctttgctgccgtcatgtgcacagtgatgaggtgtctggggatccctacccgtgtgatcaccaacttcgactctggccacgatacagatggaaacctgatcatagatgagtattatgacaacacaggcaggattttggggaataagaagaaggatactatctggaacttccatgtctggaatgagtgctggatggcccggaaggatctgccccctgcatatggaggctggcaggtgctggacgccacacctcaggagatgagcaacggcgtctactgctgtggccctgcctctgtcagagccatcaaagaaggagaagtggacctgaactatgacacgccctttgtgttttcgatggtgaatgctgactgcatgtcctggctcgtccagggagggaaggagcagaagcttcaccaggacacgagttctgttggcaattttatcagcacaaagagcatccagagtgacgagcgggatgacatcacagagaactacaagtatgaagaaggatccctccaggagaggcaggtgtttctgaaggctctgcagaagctgaaggctagaagcttccatggctcccaaagaggagcagagttgcaaccttccaggcccacatcactgagccaggacagccctcggagcctgcatacaccttcccttcgacccagtgatgtggtgcaagtctccctgaaattcaagctgctcgacccgcccaacatgggccaggatatatgctttgtcctgctggccctcaacatgtcctcccagttcaaggacctcaaagtgaacctgagtgcccagtctctgctgcacgatggcagccccctgtccccattctggcaggacacagcgttcatcacactctctcctaaagaagcaaagacctacccctgcaaaatctcctattcccagtacagccagtacctgtcaacagacaagctgatccgcatcagtgccctgggtgaagagaaaagcagtcctgagaaaatcctggtgaacaagatcatcaccttatcttatccaagcatcacgattaatgttctaggagcagccgttgtgaaccagccactctccatacaggtgatattttcaaaccccctctcggagcaggttgaggactgtgtgctgactgtggaaggaagtggcctcttcaagaaacagcagaaagtcttccttggagtcctcaaaccccaacaccaagcaagcatcattctggagaccgtccccttcaagagtggacaaaggcagatccaagctaatatgagaagcaacaagtttaaggacattaagggttacaggaatgtttatgtagactttgcattataaattctggaacaacgcgccagacgtgtgagtttc

SEQ ID NO: 27518 - DNA, 431 bp, Homo sapiens
  SIMILAR (407)..(12): 291254mologous to Homo sapiens Human N-methyl-D-aspartate receptor subunit encoded by clone NMDA22,accession number W87503,Smith-Waterman Score=107.
tgcctgtccgtccaccagcacatcccactgcagaggcgccacctgcagttgctccaggacgagctggttcaggagtccttcaacactcgcttcgccactgcgcttcagggaggggattctccagcagatgcccagcttgctgtggatctccaggcctcgggcttcccgccgctcttcctccagctgcttggggtttgcaaattgccccttctccccaggggactccgggaaactctcaaagttgaacttgtccacttgaatagccattcgctggcactcaccggcgtgcaggatgagtgcctcgctgctcctggtgctgacggtcagctcatgctcggtggagttgaagacatccaggagcaggtgacactgccgggtactggttgctgggagggtgctgactcgggtgaaaaatacagacggctcgactt

SEQ ID NO: 27519 - DNA, 1707 bp, Homo sapiens
  SIMILAR (681)..(845): 251254mologous to Gallus gallus metallthionein (AA 1 - 63),accession number X06749,Smith-Waterman Score=60.
atgaatgtaggaggaattatggaaatagaaaagtcaccatttggcaaacacataatcattgaaggtgtgcgcacactcaaacacaatacacgcacagccaggggcctccctgcagttcacccttctgacctgaggaaaaaggcaacaccttccaggacccgcctgaccacctgggagcctgagtggagcacaggtcctggctgtgtcctccgcagccccagggcctttactccagctgctgcttctccctgcctcttccactggcctctgggtccctcttactcctcaaggctcacctttgacagcgccctcagagaccctcctcacttcctttactcctctttggcccacgtggccttccgcttcctgtgctctcacctcacgtcaccacgcagtcaattctcacgtacctttcacgagccaggcccccggctaatggatggtgccacccacactgacggtggatcttcaccacacagtcccccaactcacacgccagtcccctcagggacacacccagcggcaacgcgttaccagttctccaggtattcctcaatccagtcaagaaagcagccctgtgatactggaggaaggcacaatgtcttgggaggccctgacgtgctggacaaaggggccttccctggagttgcacagtcctgccagaggcccggtgcctgcctctggaaccctcagtctgcccgtgtagatggggacggagaaaagaagaggctgccaagtgttcggatgcccttcactgtagaggcatccgacacattggatgtagagccaatgtctgtgatatttctagggctgtacacattttcaccttcagctgcaacagctgtgtttgaatttggcaagttccttaacttgatgaggccccagagaacgcatgcgcagcatcaagccaggctgggtctgccaagcaagctgtcgccctgcttcctctttgacggtgctgttatcctctggacgctgccatcagtggctgctttacctctcagaaatcctcagaaagaatattccagggcaagacagggtcttaccgtcacccagactggagtacaatgtacccggcagtgtcacctgctcctggatgtcttcaactccaccgagcatgagctgaccgtcagcaccaggagcagcgaggcactcatcctgcacgccggcgagtgccagcgcgtaccgtcggtcagctctgatgtcttcaatggcagcacgtgtggcacgctgaccgtcaatgttcactccatgccaccccccgaacacgggttctcagtttaccgccttgcctggtgttggctgtgggctcacgtggagcaaggcatcgaaagacgcttcttcaggccgattcccggtgaagtcacagtgccctgtcctttatcagtggccttcagtgtgaccctggaagctgtcctgaatttcaaatactctggaggcccgggccacactgaaggatattacaggaatctctccctggggctgcatgtagaagtcgagccgtctgtatttttcacccgagtcagcaccctcccagcaaccagatccgtgccatggggccaagttgctgagcctctctgggatgtaggtttttctttaggaaaccaggtgttacatgagaactgcctctcaggtggtctgccagcagccttcgggaagcaggtgctcttcacctccgagctcgtcctggtgttcgtgtccggctag

SEQ ID NO: 27520 - DNA, 298 bp, Homo sapiens
  SIMILAR (163)..(29): 481254mologous to Mus musculus SLM-1,accession number AF098796,Smith-Waterman Score=100.
  misc_feature (1)...(298): n = a,t,c or g
gcacgagccgacatgctgcgtgatggtgtggcttcctcgcccctctctggggtgggtgtgggggtggagtggccttncccacgcctctcacctctgccttcatttgtgctgccaccctgcccctccctcgtcctcctctcccacttcctcctctctgtgtgcctcagtctcctgccggaagaaatgggttgagcccgaaaggaggctgtctgaggaagggagagggagggcctggggtnnntnnnnnnnnnnnnnnnnnnnnnnantntntnntnnntnnnnnnnnnnnnnnnatttt

SEQ ID NO: 27521 - DNA, 1299 bp, Homo sapiens
  SIMILAR (179)..(718): 691254mologous to Homo sapiens dJ1009E24.3 (A novel protein),accession number AL109804,Smith-Waterman Score=574.
  misc_feature (1)...(1299): n = a,t,c or g
tcccttcctcgtgctcggcgttgagctcctgcagccgccgccgctgcagtggtcgtccctgccctccccggccccggggtgcaccccgcaaggctcccgctggtgtccctggagcatgggaggctgctgagcgtgagtggcggtgtctggcaggagctgcgtggcagggagggcgtccatggctgcagccaacaagggcaacaagcccagagtccggagtatccgctttgcggcaggccacgatgcagaaggatcccacagccacgtccactttgatgagaagctgcatgactcggtggtcatggtcacccaggagagtgacagcagctttctggtcaaggtttggcttcctgaaaatcctgcacaggtatgagatttactttcactctggcccccagtgcacaggcttgagcaaggatgttccgcgaggcaccttgttccccagcctgcacctcaagctcctcagcgtgggtgccccgtccctgaaggttatagtttcaagtgtgagtactcggcgcacaaagagggcgtccttcaaaagaggagataattgttagcctgcgaaggtggcactggcacctgtgtgcgcgtgacggtgcaggcccgcgtcaatggaccggcaccacggcacgcccatngcttgctggaattgttgtcaagttgtgtgggcgccgagctggaatacgactcagagcacagcgactggcacggctttgactgaggcccgaggccccgcctgccccgggcccctcagccttaaaccccgccttgtccccccgacatgctgcgtgatggtgtggcttcctcgcccctctctggggtgggtgtgggggtggagtggccttgcccacgcctctaacctctgccttcatttgtgctgccaaccctgccccctccctcgtcctcctctccccacttcctcctctctgtgtgccctcagtactctgccggaaaaaaatgggttgagcccgaaagaaggctgtctgaggaagggaaagggaggggcctggggtgggtcccccactcccccaccccaagccacagggactcccaccaagggtttgggaaaggaccgaagctggctctgtggcgtcgtggccccattactgctgccttgcttcagccacctctcctgcccctccctagtccccactgctgtccaccaatgagtaggagggaggtgcagtccccggcccccccccctcaggtttgtgtttcttggtttttaaacgactggttgggatagaaccctaaagaaataaacttccagtgggttccggaaaaaaaaaaaaaaaaaaa

SEQ ID NO: 27522 - DNA, 2301 bp, Homo sapiens; identical to SEQ ID NO: 8646
  SIMILAR (685)..(2286): 921254mologous to Homo sapiens putative p150,accession number U93563,Smith-Waterman Score=2594.

SEQ ID NO: 27523 - DNA, 1719 bp, Homo sapiens; identical to SEQ ID NO: 5398
  SIMILAR (1523)..(1717): 961254mologous to Homo sapiens putative p150,accession number U93569,Smith-Waterman Score=317.
  misc_feature (1)...(1719): n = a,t,c or g

SEQ ID NO: 27524 - DNA, 1902 bp, Homo sapiens; identical to SEQ ID NO: 2162
  SIMILAR (1845)..(1901): 891254mologous to Homo sapiens putative p150,accession number U93565,Smith-Waterman Score=97.

SEQ ID NO: 27525 - DNA, 2784 bp, Homo sapiens; identical to SEQ ID NO: 6553
  SIMILAR (1267)..(2781): 871254mologous to Homo sapiens putative p150,accession number U93563,Smith-Waterman Score=2247.

SEQ ID NO: 27526 - DNA, 756 bp, Homo sapiens; identical to SEQ ID NO: 2152
  SIMILAR (642)..(701): 501254mologous to Homo sapiens p40,accession number U93570,Smith-Waterman Score=43.

SEQ ID NO: 27527 - DNA, 1743 bp, Homo sapiens; identical to SEQ ID NO: 23634
  SIMILAR (115)..(1740): 811254mologous to Homo sapiens putative p150,accession number U93563,Smith-Waterman Score=2198.

SEQ ID NO: 27528 - DNA, 1410 bp, Homo sapiens; identical to SEQ ID NO: 4326
  SIMILAR (64)..(1398): 761254mologous to Homo sapiens putative p150,accession number U93572,Smith-Waterman Score=1655.

SEQ ID NO: 27529 - DNA, 461 bp, Homo sapiens
  SIMILAR (36)..(389): 941254mologous to Homo sapiens serine/threonine protein kinase,accession number AJ250839,Smith-Waterman Score=597.
cgggtcgacccacgcgtccgacgtggtgcaaggggatggtggccctgctgaggaagaaagggaggttgaactgcgatcccacatttgagcttgaagagatgattctagaatccaagccacttcacaaaaagaagaagcgattggcaaagaacagatccagggatggcacaaaggacagctgcccgctgaatggacacctgcagcactgtttggagactgtccgggaggaattcatcatattcaacagagagaagctcaggaggcagcagggacagggcagccagctcttggacaccgacagccgagggggaggccaggcccaaagcaagctccaggacgggtgcaacaacaacctcctcacccacacctgcacccgtggctgcagcagctgagcccacacttgttgctgctcaacaggactgcactcgtctctgccctgcccacccagagcccctctttgt

SEQ ID NO: 27530 - DNA, 2505 bp, Homo sapiens
  SIMILAR (2505)..(1288): 841254mologous to Homo sapiens pre-stromelysin-2 (AA -17 to 459),accession number X07820,Smith-Waterman Score=1813.
tcacttcatttcattcatttcatcttccatcgttgataccctttcttccagttgatcacattggctcctgaggcttctgcattcttcacgtagttctcgagccttggttttcagctccatcagctcctttaagcacttctctgtattggttattctagttatacattcttctaaatttttttcaaagttttcaacttctttgcctttggtttgaatgtcctcccatagctcagagtaatttgatcgtctgaagccttcttctctcagcttgtcaaagtcattctccatccagctttgttctgttgctggtgaggaactgcattctatttcttcagcttgatcaattgtgctgttaagagactctgatgcattcttcagcatgtcaattgcattttttagtttcagaatgtttgcttgattccacgtaattatttcaatgtctttgttaaatttatttgataggattctgaattccttctccatgttatcctggattttgatgagcttcctcaaaagagcaattttaaattctttgtctgaaaggtcacatatctctgtctctccaggattggtctgtggtgccttatttagtttgtttggtgaagtagtgtttttctgggtgatcctccaatactcattggcaacaaagaaatgtgtctttccagtgtccttctcataaatggcagcatcaattttcttcaccctttcagggaagacaaaggagctgtagacgtccctggggtagccactcagcagttgatcctcctgaacgacccagtgcttactgcttctgaaatccttggtccttgtttcatcattatcaaaatgaacatctcctccgatacctggtccaggtgggaatgcatgagcaagacaaccatcatgtccataaaagggagaattgtcatggagatctgctccatccttggtccagttttcatcctcatcaaaatgagtgtcaccacccagacccggaccaggaggaaaggcatggccaagcactcccaagggaccatcaaaatagcgaggacaccgaccatggactcgagtcctaaaggcaatcatgatgtctgcaatcccctttgaaatcttggtgaattttagtggagtgactttgctccacacttctaaaccttcttggatagcctcatccacagcagctcgtgccatatccggagtatagtttattattctgtaggtgaggttgtattttctccacccagggagggtgtagccatactggcccacatcaggcaccccacacctgggtgtcttcatgatctcaagggtgtttgagtccagttttccagtcactgtcaatccaaaaaatgcttgcatttcccgaattttgtcatctatgagactcctattcttgctttgaacaagatgattcccttctatttcaagagagtagaactggttgagatatgcctgagccagttgcatattttcttcattttccgtcatccggactttaaaaataaaaacggtgtccctgctgttaacttcatatgcagcatccaaatatgatggaagagagggccaaaatgcagaaatcaaatgaaattcaggttcagggttccagtgggatcttcgccaaaaatatctgtctttaaagaacagatattctcccctcagagtgctgatggcatcgaaggacaaagcaggatcacacttggctggcatctcagatcccgaaggaacagattttgtgggcaccaggggttcctcagtagaggcagggggaggtccgtagagagactgaatgccattcacatcatcttgcgaaaggcggaactgggcgagctctgtgaatgagttgtagagtgggtacatcaaagcttcagtgttggctgagtgaaagagccccagggagtggccaagttcatgagcagcaacgaggaataaattggtgcctgatgcatcttctgtccatttttcatcatcatcaaagtgaatatctccataaagcccaggtccaggtgggtaggcatgagccaaactgtgtcctttaactgcaaaagagatcattatatcagcctctccttcatacagcctggagaatgtgagtggagtcacctcttcccagactttcagagctttctcaatggcagaatcaacagcatctcttggcaaatctggtgtataattcacaatcctgtatgtaaggtgggttttcctccacttcggcatgccaggaaaggagctgaagtgaccaacgtcaggaactccacacctgggcttgcgcatcacctccagagtgtcagtgtctagcttccctgtcacctccaacccaaggaacttctgcattccttggatttttttaacaatgagattactgtcctttcttctaaactgtttcacatccttttcgaggttgtagtacttttctaggtattgctgggcaagatccttgttggagtcctcctcttttgctgccccactcagaggataggcagagcagactggcagacacaacagcacaaggaatgcaagatgcatcat

SEQ ID NO: 27531 - DNA, 1941 bp, Homo sapiens; identical to SEQ ID NO: 2182
  SIMILAR (988)..(1938): 961254mologous to Homo sapiens p40,accession number U93569,Smith-Waterman Score=1553.

SEQ ID NO: 27532 - DNA, 1046 bp, Homo sapiens
  SIMILAR (102)..(797): 891254mologous to Homo sapiens p40,accession number U93570,Smith-Waterman Score=1071.
cccaaagtaggtctgtgggctatagtttgtcaacccttgatatagagcatagccaggagaaacagctgtatacaaaggctaaaaaccaaaccaaaacaaaaaaggcacaaaacaacaacaacaacaacaacaacaacaacaacgaagtccaggaacgcagttcctcaccagcaacagaacaaagctggatggagaatgactttgatgagttgagagaagaaggcttcagacgatcaaattactctgagctacgggaggacattcaaaccaaaggcaaagaagttgaaaactttgaaaaaaatttagaagaatgtataactagaataaccaatacagagaagtgcataaaggagctgatggagctgaaaaccaaggctcgagaactacgtgaagaatgcagaagcctcaggagccaatgcgatcaactggaagaaagggtatcagcgatggaagacgaaatgaatgaaatgaagcgagaagggaagttgagagaaaaaagaataaaaagaaatgagcaaagcctccaagaaatatgggactatgtgaaaagaccaaatgtacgtctgattggtgtacctgaaagtcatggggagaatggaaccaagttggaaaacactctgcaggatattatccaggagaacttccccaatctagcaaggcaggccaacattcagattcaggaaatacagagaacaccacaaagatactcctcgagaagagcaactccaagacatataattgtcagattcaccaaagttgaaatgaaggaaagaatgttaagggcagccagagagaaagaaatacaaactaccatcagagaatactacaaacacctctatgcaaataaactagaaaatctagaagaaatggataaattcctcgacacatacactctccgaagactaaaccaggaagaagttgaatctctgaatagaccaataacaggagctggaattgaggcaataatcaatagcttaccaaccaaaaagattccaggaccagatggattcacagccgaattctaccagaggtacaaggaggaactg

SEQ ID NO: 27533 - DNA, 3588 bp, Homo sapiens
  SIMILAR (1267)..(3462): 941254mologous to Homo sapiens putative p150,accession number U93563,Smith-Waterman Score=3584.
atgcatgtaggaggattttataggccaggcctggaagtagtgcatactacttcttctcacatttctctggctagaacacagttacgtgaccacaaaagggaaatggatttgactgtatgctcagtaggaggaggaaatgggtttgatgagcatctagcagtctctgccatggtggcagctaggaaaacaaaaagccagttgattaggtttcagataattgccagcacacttgcgttaggaaggagatacctcaagaatgccccaacctatacaaatcagaggatgctgagaagatctgaagaaaactcagaagatagctgccactgtggatttatgaccaaagcttcaggaagtaagacaggctgcagcaagagttaccgctgctggtacccaggcaaacagggtctggagtggacctctagcaaactccaacagacctgcagctggggatcctgtctgttagaaggaaaactaacaaacagaaaggacatccacaccaaaaacccatctgtacatcaccatcatcaaagaccaaaagtagataaaaccacaaagatggggaaaaaacagagcagaaaaactggaaactctaaaaagcagagtgcctctccccctccaaagcaacgcagctcctcaccagcaatggaacaaagctggacggagaacgactttgaccagttgacaggagaaggcttcagacgatcaaactactccaagctacaggaggaaattcaaaccaaagccaaagaagttgaaaactttgaaaaaaatttagacgaatgtataactagaataaccaatacagagaagtgcttaaaggagctgatggagctgaaagccaaggctcgagaactacgtgaagaatgtagaagcctcaggagccgatgcgatcaactgcaagaaagggaatcagtgatggaagacgaaatgaatgaaatgaagcgagcagtgaagtttacaaaaaaaagaataaaaagaaatgaacaaaccctccaagaaatatgggactatgtgaaaagaccaaatctacgtctgattagtgtacctgaaagtgacagggagaatggaaccaagttggaaaacactctgcaggatattatccaggagaacttccccaatctagcaaggcaggccaacattcagattcaggaaatacagagaacgccacaaagatactcctcgagaagagcaactccaaggcacataattgtcagattcagcaaagttgaaatgaaggaaaaaatgttaagggcagccagagagaaagaaatacaaactaacatcagagaatactacaaacaccgctacgcaaataaactagaaaatctagaagaaatggataaattcctcaacatatacacccttcgaagactaaaccaggaagaagttgaatctctgaacagaccaataagaggctctgaaattgtggcaataatcaatagtttaccaaccaaaaagagtccaggaccagatggattcacagccgaatactaccagaggtataaggaggaactggtaccattccttctgaaactattccaatcaatagaaaaagagggaatcctccctaactcattttatgaggccagcatcatcctgataccaaagccgggcagagacacaaccaaaaaagagaattttagaacaatatccttgatgaacattgatgcaaaaatcctcaataaaatactggcaaaccgaatccagcagcacatcaaaaagcttatccaccatgatcaagtgggcttcatccctgggatgcaaggctggttcaatatacgcaaatcaataaatgtaatccagcatataaacagaaccaaagacaaaaaccacgtgattatctcaatagatgcagaaaaggcctttgacaaaattcaacaactcttcttgctaaaaactctcaataaattaggtattgatgggacatatctcaaaataaaaagagctatctatgacaaacccacagccaatatcatactgaatgggcaaaaactggaagcattccctttgaaaactggcacaagacagggatgccctctctcaccactcctattcaacatagtgttggaagttctggccagggcaattaggcaggagaaggaaataaagggtattcaattaggaaaagaggaagtcaaattgtccctgtttgcagatgacatgattgtatatctagaaaaccccattgtctcagcccaaaatctccttaagctgataagcaacttcagcaaagtctcaggatacaaaatcaatgtacaaaaatcacaagcattcttatacaccaataacagacaaacagaaacccaaatcatgagtgaactcccattcacaattgcttcaaagagaataaaatacctaggaatccaacttacaagggacgtgaaggacctcttcaaggagaactacaaaccactgctcaatgaaataaaagaggatacaaagaaatggaagaatattccatgctcatgggtaggaagaatcaatatcatgaaaatggccatactgcacaaggtaatttatagattcaatgccatccccatcaagctaccaatgactttcttcacagaattggaaaaaactactttaaagttcacatggaaccaaaaaagagcccgcattgccaagtcaatcctaagccaaaagaacaaagctggaggcatcatgctacctgacttcaaactatactacaaggctacagtaaccaaaacagcatggtactggtaccaaaacagagatatagatcaatggaacagaacagagccctcagaaataacgccgcatatctacaactatctgatctttgacaaacctgagaaaaacaagcaatggggaaaggattccctattcaataaatggtgctgggaaaactggctagccatatggagaaagctgaaactggatcccttctttacaccttatacaaaaattaattcaagatggattaaagacttaaacgttagacctaaaaccataaaaaccctagaagaaaacctaggcattaccattcaggacataggtatgggcaaggacttcatgtctaaaacaccaaaagcaatagcaacaaaagccaaaattgacaaattggatctaattaaactaaagagcttctgcacagcaaaagaaactaccatcagagtgaacaggcaacctacagaatgggagaaaattttcgcaacctactcatctgacaaagggctaatatccagaatctacaatgaactcaaacaaatttacaagaaaaaaacaaacaaccccatcaaaaagtgggcaaaggacatgaacagacacttctcaaaagaagacatttatgcagccaaaaaacacatgaaaaaatgctcaccatcactggctatcagagaaatgcaaatcaaaaacacaatgagataccatctcacaccacttagaatggcaatcattaaaaagtcaggaaacaacagagcctcaaggtcagccagaggtgagagcttagggccttctcaatcctttcctgagcacgtgcattgccctgggccgttgcacacagccctacacagacccatgacctttcagattcccagggatatgttggaagtttctagtgcccactag

SEQ ID NO: 27534 - DNA, 1191 bp, Homo sapiens
  SIMILAR (438)..(136): 891254mologous to Homo sapiens p40,accession number U93566,Smith-Waterman Score=479.
tcaccgggtaagaagacatccttcaggtggagagccagggtgccgttgtgccttaaatgctgctggcccgcaagccttccccattccataggttctctccacctcctgtccttcccaccaacaggaaaaggggaagctaacttcatcttcagtcctttcttccatttgatcgcatcggctcctgaggcttctgcattcttcacgtagttctggagccttggttttcagctccatcagctcctttaagcacttctctgtattggttattctagttatacattcttctaaatttttttcaaagttttgaacttctttgcctttggtttgaatgtcctcccatagctcggagtaatttgatcgtctgaagccttcttctctcagctcgtcaaagtcattctccatccagctttgttccgttgctggtgaggaactgcattcagcacagatcttatcttgctctgcaataattgagggcagtaaagggtgggatggcagggagtgatttactccttgatcttgcctgaggtgggaatcagagaagagctgacatttggcctgcatctggaaggaagagggggacttagttctctcacaccgcccaactgtgataacgagaatgttttcatattttgtcaaatgtctgctagcaggaaaaatcatccccattttgataatcattggcgttgaggaacagtttttgttgttgttgttattgttttgcgtattaatcttatattcgacaaacttgatgaacacatttaatagttcttctgagagctcaggctttctggctggaacctgagccagaccaagcttcttctgttctggaatgcaactgctgtgctccttatgatatggtttgtccgtatccccccaccaaatctcatgttgaattgcagttcccacaatccccatgtgtcgtgggagggaccctgaactgtatccatctcttgctttagaacacatttgaaatttgataaaatccaacatcccttcatgaacaaagccctcacaaaaccaatcatcaaaggaacatatccgaaaataagaagacccatctatgaaaaacctttttctgcctttctgagccaaaatggagttctcagtcattcttttacttaacctgacatcgaccatctcattaagtgtgaaaatatcagaagcacaatcaatgtttgctgaaactcccat

SEQ ID NO: 27535 - DNA, 2233 bp, Homo sapiens
  SIMILAR (1)..(390): 791254mologous to Homo sapiens p40,accession number U93567,Smith-Waterman Score=542.
atggggaaaaaacagagcagaaaaactggaaactctaaaaagcagagtgcctctcctcctccaaaggaacgcagttccacaccagcaacggaacaaagctggtcggagaatgactttgacgagttgagagaagaaggcttcagacgatcaaactactccaagctacaggaggaaattcaaaccaaaggcaaagaagttaaacactttgaaaaaaatttagacgaatgtataactagaataaccaatagagagaagtgcttaaaggagctgatggagctgaaagccaaggctcgagaactacgtgaagaatgcagaagcctcaggagccaatgcgatcaagtggaagaaaggactgctagcaagactaataaagaagaaaagagagaagaatcaaatagatgcaataaaaattgataaaggggatatcaccaccaatcccacagaaacacaaactaccatcagagaatactataagcacctctacacaaataaactagaaaatctagaagaaatggataaattcctggacacatacaccctcccaagactaaaccaggatgatgttgaatccctgaatagaccaataacaggttctgaaattgaagcaataaatcatagcctaccaaccaaaaaaagtccaggaccagacagattcacagccaaattctaccagagcctcccaagcagctgtgactacgggcatgcaccagcacacccagatgtgttcagagtttcttccttctggtgggttcgtggtcttgctggctcaggtgtgaagctgcagaccttcgcggtgagtgttacagctcttaaggcagcgcgtctggagttgttcattcctcccgactcaggtgcccagctggcttcacccagtggatccctcaccaggactggaggtggagctgcctgccagtcccatgcagtgtgcccacactcctcagcctttgggtggtcgatgggactgggtgccatggagcagggggcagcgctcatcggggaggctcgggcctcacgggagcccatggaggaggtgggaggctcaggcatggcagcctgcaggtcccaagccctgccccgtgggcagctaaggcccagtgagaaatcgagggcagcgccggaacacagttcctcaccagcaatggaacaaagctggatggagaatgactttgacgagctgagagaagaaggcttcagacgatcaaattattccgagttacgggaggacattcaaaccaaaggcaaagaagttgaaaactttgaaaaaaatttagaagaatgtataactagaataaccaatacagagaagtgcttaaaggagctgatggagctgaaaaccaaggctcgagaactacgtgaagaatgcagaagcctcaggagccgatgcgatcaactggaagaaagggtatcagcaatggaagatgaaatgaatgaaatgaagcaagaagggaagtttagagaaaaaagaataaaaagaaatgagcaaagcctccaagaaatatgggactatgtgaaaagaccaaatctacatctgattggtgtacctgaaagtgacggggagaatggaaccaagttggaaaacactctgcaggatattatccaggagaacttccccaatctagcaaggcaggccaacattcagattcaggaaatacagagaacaccacaaacatactcctcgagaagagcaactccaagacacataattgtcagattcaccaaagttgaaatgaaggaaaaaatgttaagggcagccagagagaaaggtgattctgtagaaaggagtttctccaataaagcagagcttctctttcaactccatggacatcagagagagtccctttcaaaaaaggaggctcaggtctggagagacaaaggcctctactttcgaaaaggcctcttggatcaagcccagagctggtctcggcaagtggcgtccatcttgggggctcagatccaggtcgaagggtcaccggagcagcggttggagaacgtggaactagctggaggacacctgaatactcttaaagcaatccccatggtggcagttgcaggtggaatatcttttaaatgtggggctgtcctgctattgggggcagcagagttgctgccagtggtttgtacttcagctccagtggcagcagccagcagtggtgatgactgtgggcagggaacgtcattggggctccagggatgtagagatgcagggagcgttgagcccgagggcaggatgtag

SEQ ID NO: 27536 - DNA, 1596 bp, Homo sapiens
  SIMILAR (382)..(1023): 881254mologous to Homo sapiens p40,accession number U93570,Smith-Waterman Score=978.
atggtcctgcctctgaaactgctctttgcccaggggctgtcatctctactgtactgccaggactgccagcgctgccatgggaatgcacatgtttatgcccgggtgctcttgatgttctcagagctgcgggcactgcccttaccagaggactgcgggtacaaagaagtgcacaagagcccccaccccatcgccactactaccaatacagccagtccctcgcggtgtggcgtacaccaccctggctgcttcctgctgctgcccctgccttgtccactccccctgcgcggagagccccgggctccctcgccccgagagcgcggctcagcggggagcccagggggcctaggggctcagatctgctggagccaccgacgccaaggggaacacaaatcctcaccagcaacggaacaaagctggacggaaaatgactttgatgagttgagagaagaaggcttcagacgatcaaactactccgagctacaggaggaaattcaaaccaaaggcaaagcagttaaaaactttgaaaaaagtttagacgaatgtataactagaataaccaatacagagaagtgcttaaaggagctgatggagctgaaagccaaggctcgagaactacgtgaagaatgcagaagcctcaggagccaatgcgatcaactggaagaaagggtatcagtgatggaagatgaaatgaatgaaatgaagcaagaagggaagtttagagaaaaaagattaaaaagaaacgaacaaagcctccaagaaatatgggactatgtgaaaagaccaaatctacgtctgattggtgtacctgaaagtgacggggagaatgggaccaagttggaaaacactctgcaagatattatccaggagaactttcccaatctagcaaggcaggccaccgttcacattcgggaaatacagagaacgccacaaagattctccttaagaagaagcactccaagacacatcgtgagattctccaaggttgaaacaaaggaaaaaatgttaagggcagccagagagaaagaaatacaaactaccatcagagaatactacaaacacctttacacaactaaactagaaaatctagaagaaatggaaaaattcctggacacatacaccctcccaagactaaaccagaaagaagttgaatccatgaaaagaccaataacaagttctgaaattgaggcagtcattaatatcctaccaatcaaaagaagtccaggacctgatggattgacagccacattctatcagaggtacaaagaggaactggaacgcagttcctcaccagcaacggaacaaagctggatggagaatgattttgacgagctgagagaagaaggcttcagacgatcaaattactctgagctacgggaggacattcaaaccaaagtcaaagaagttgaaaactttgaaaaaaatttagaagaatgtataactagaataaccaatacagagaagtgcttaaaggagctgatggagctgaaaaccaaggctcgagaactacgtgaagaatgcagaagcctcaggagccgatgcgatcaactggaagaaagggtatcagcaatggaagatgaaatgaatgaaatgaagtga

SEQ ID NO: 27537 - DNA, 1806 bp, Homo sapiens
  SIMILAR (520)..(1611): 711254mologous to Homo sapiens putative p150,accession number U93569,Smith-Waterman Score=1267.
atggagggagattctgtggagaatagatcaattgtgagactttgctttgaacctattcatacctcattacagcagaaagcaaaatcagacaaaattcagatatatggaggttttacaaaatctaacccaactattgaatcttatgtggagagacgttatgctacttctaagctaaatcctaactgttgcagagaaacaggcacctctacagatagcagagatattcagagacacacaacagacctcctacaggcagtcaaagagaaacccagtcaaaaagggaaggaggaaggaaaactaacaaacagaaaggacacccacaccaaaaacccatctgtacatcaccatcatcaaagatcgaaagtagataaaaccacaaagatagggaaaaaacagagcagaaaaactggaaactctaaaaagcagagctcctctcctcctccaaaggaatgcagctcctcaccagcaacggaacaaagatggatggagaatgactttgacgagctgagagaagaaggcttcagacgatcaaactactctgagctacaggaggaaattcaaaccaaaggcaaagaagttgaaaactttgaaaaaaatttagaagaatgtataactagaataaccaatacagagaagtgcttaaaggagctgatggagcttaaagccaaggctcaagaacttcttgaagaatgcagaagcctcaggagccaatgtgatcaactggaagaaaggcaccacaccacacctattccaaaattgaccacatacttggaagtaaagctctccccagcaaatgtaaaagaacaagttataacaaactgtctctcagaccacagtgcaatcaaactagaactcaggattaagaaacccactcaaaacccctcaactacatggaaactgaacaacctgctcctgaatgactactgggtaaataaagaaatgaagtcagaaataaagatgttctttgaaaccaacgagaacaaaaacacaacataccagaatctctgggacgcattcaaagcagtgtgtagaggcaaatttatagcactaaatgcccacaagggaaagcaggaaagatccaaaattgacaccctaacatcacaattaagagaactagaaaagcaagagcaaacacattcaaaagttagcagaaggcaagaaataactaaaatcagagcagaaccgaaggaaatagagacacaaaaaacccttcaaaaaattaatgaatccaggagctggttttttgaaaggatcaacaaaattgatagacggctagcaagactaataaagaagaaaagagagaagaatcagagagacgcaataaaaaatgatgaaggggatatcaccaccgatcccacagaaatacaaactaccatcagagaatactacaaacacctctatgcaaataaactagaaaatctaaaagaaatggataaattcctcaacacatacaccctcccaagactaaaccaggaagaagctgaatctctgaatagaccaatagcaggctctgaaattgtggcaataattaatagcttaccaaccaaaaagagtccaggaccagatggattcacagccgaattctaccagaggtacaaggagaaactggtatttggtgcaggttattttggaatgtgggccttggctgcacttcccagcaacttgctaaagctgtctcaactctgtcaggaggcagcagaagtgaacgtcctggtacaatttgtctgtatttgtcctgcacaggaacctaccgaaattgacgtgcttttttctgtgttaccccctctttcccttatcttaaactag

SEQ ID NO: 27538 - DNA, 2110 bp, Homo sapiens
  SIMILAR (415)..(1335): 891254mologous to Homo sapiens p40,accession number U93564,Smith-Waterman Score=1405.
atgcttgttgatcttgtcactggggcctgcatgtcagggaaacatcctcagagcatgtctgagggcagagctctgacggtaatcagagcaggcagatgtcaccgacagctggagctaatgggctgtcagacagggccggaccaacctgggacatcctccgtgctccctggcacgagtccagtccagaccgagggcactcaagcatgggacgccaggggaacggctttgatgcctactggaaaagccaaacttggttgctttggcaacaggggtcttggtgagaagctggtacacaagcaggtgcttccagtgtgccagagaaaggcacagggccttcttcgccccgagtcttcttacttctctgatggagctgagtcatgcatcacctcttgtttaatggtggtgaaatatactcaggaatgcagttcctcaccagcaacagaacaaagcttgacggagaatgactttgacgagttgagagaagaaggcttcagacgatcaaactactccgagctacaggaggaaattcaaagcaaaggcaaaaaagttaaacactttgaaaaaaatttagacgaatgtataactagaatcaccaatagagagaagtgcttaaaggagctgatggagctgaaagccaaggctcgagaactacgtgaagaatgcagaagcctcaggagccaatgcgatcgactggaagaaagggtatcagtgatggaagatgaaatgaatgaaatgaagcgagaagggaagtttagagaaaaaggaataaaaagaaacgaacaaagcctccaagaaatatgggactatgtgaaaagaccaaatctacatctgattggtgtacctgaaagtgacagggagaatggaactaagttggaaaacactctgcaggatattatccaggagaacttccccaatctagcaaggcaggccaacattcagattcaggaaatacagagaatgccacaaagatactcctcgagaagagcaactccaagacacataattgttagatacaccaaagttgaaatgaaggaaaaaatgttaagggcagccagagagaaaggtcgagttacccacaaagggaagcccatcagactaacagctgatctcttggcagaaactctacaagccagaagagagtgggggccaatattcaacattcttaaagaaaagaattttcaacccagaatttcatatccagacaaactacgcttcataagtgaaggagaaataaaatactttacagacaagcaaatgctgagagattttgtcaccaccaggcctgccctaatagaagctctgaaggaagtgctaaacatggaaaggaacaaccgatcccccagttcctcaccagcaacggaacaaagctggatggagaatgattttgacgagctgagagaagaaggcttcagacgatcaaattactctgagctacgggaggacattcaaaccaaaggcaaagaagttgaaaactttgaaaaaaatttagaagaatgtataactagaataaccaatacagagaagtgcttaaaggagctgatggagctgaaaaccaaggctcgagaactacgtgaggaatgcagaagcctcaggagccgatgcgatcaactggaagaaagggtatcagcaatggaagatgaaatgaatgaaatgaagcgagaagggaagtttagagaaaaaaacaataaaaagaaatgagcaaagcctccaagaaatatgggactatgtgaaaagaccaaatctacgtctgattggtgtacctgaaagtgatgtggagaatggaaccatgttggaaaacactctgcaggatattatccaggagaacttccccaatctagcaaggcaggccaacgttcagattcaggaaatacagagaacgccacatagattctcctcgagaagagcaactccaagacacataatttctcatccagatctcatcaaacatgaaccattgttttcttcaccaagtgtccaaagggtcagtatcaatggtcaagggtccactctaaatgccctggccctgcagccacccttaagaacttttgttaacatttccactggagtatttgggaatattcgccaagagttacaaagaaaacatggctag

SEQ ID NO: 27539 - DNA, 6896 bp, Homo sapiens
  SIMILAR (4112)..(5581): 951254mologous to Homo sapiens putative p150,accession number U93572,Smith-Waterman Score=2459.
tggggaatgggggtcacttcaaatattaaggttatattttgcacgtaaaaatgattttataaatatcaaaggtttttcatgtttcctacctaattgggttctccccataatcttgtaatttgaagtggggcagaagtgtttaacccctttggcagatgcagaaaacggaggcacagagagggcgtgacttgtctgaggtcacacgtgaatcagtcatggagatgggaccagaacccaggcttcccagctccaagtccagggctttttctgcatctgatgttttcaggggtgagacagggaccatcagggcacaaacaggggctctgggtgggcagggcagagacgagtacagtcctgttgagcagcaacaagtgtgggctcagctgctgcagccacgggtgcaggtgtggcaaagaaaaaatttccatgttaaagacattctcttcatactgaaaaggaacggcaacattttgatcttcaaggacagagacttaagaccaggaaaatgggcctggggccaagatggccgaaaaggaacagctccggtctacagctcccagtgtgagcgacgcagaagatgggtgatttctgcatttccatctgaggaatgcagctcctcaccagcaacggaacaaagctggagggagaatgactttgacgagttgagagaagaaggcttcagacgatcaagctactgcgagctacaggaggaaattcaaactgaaggcaaagaagttgaaaactttgaaaaaaattcagacgaatgtataactagaataaccaatagagagaagtgcttaaaggagctgatggagctgaaagccaaggctcgagaactacatgaagaatgcagaagcctcaggagccgatgcgatcaactggaagaaagggaagaagttgaatctctgaatagaccaataacaggctctgaaattgtggcaataatcaatagcttaccaaccaaaaagagtccaggaccagatggattcacagccgaattctaccagaggtacaagggggaactggtaccattccttctgaaactattccaatcaatagaaaaagagggaatcctccctaactcattttatgagggcagcatcatcctgataccaaagctgggcagagacacaaccaaaaaagagaattttagaccaatatccttgatgaacattgatgcaaaaatcctcaataaaatactggcaaaccgaatccagcagcacatcaaaaagcttatccaccatgatcaagtgggcttcatccctgggattcaaggctggttcaatatacacaaatcaataaatgtaatccagcatataaagagaaccaaagacaaaaaccgcatgattatctcaatagatgcagaaaaggcctttgacaaaatccaacaacgcttcatgctaaaaactctcaataaattaggtattgatgggacatatctcaaaataataagagctgtctatgacaaacccacagccaatatcatactgaatgggcaaaaactggaagcattccctttgaaaactggcacaagacagggatgccctctctcaccactcctattcaacatagtgttggaagttctggccagggcaattaggcaggagaaggaaataaagtgtattcaattaggaaaagaggaagtcaaattgtccctgtttgcagatgacatgattgtatatctagaaaaccccactgtctcagcccaaaatctccttaagctggaaagcaacttcaggaaagtctcaggatacaaaatcaatgtacaaaaatcacaagcattcttaaacaccaataacagacaaacagagagccaaatcatgagtgaactcccattcacaattgcttcaaagagaataaaatacctaggaatccaacttacaagggacgtgaaggacctcttcaaggagaactacaaaccactgctcaaggaaataaaagaggatataaacaaatggaagaacattccatgctcatgggtaggaataatcaatatcgtgaaaatggccatattgcccaaggtaatttatagatacaatgccatccccatcaagctaccaatgactttcttcacagaattggaaaaaactactttaaagttcatatggaaccaaaaaagagcctacatcaccaagtcaatcctaagccaaaaggacaaagctggaggcatcacgctacctgacttcaaactacactacaaggctacacagggtactccaacagacctgcagctgagggtcctctctgttagaaggaaaactaacaaacagaaaagacatccacaccaaaaacccatctgtacatcaccatcatcaaagacccaaaagtggatcaaaaccacaaagatggggaaaaaaaacagagcgggaaaatctggaaactctaaacagcagagcgcctctcctcctccaaaggaaagcagctcctcatcagcaacggaaccaaagcttggagggagaatgactttgatgatttgagagaagaagtcttcagacgatcaaactactctgagcttacaggaggaaattcaaaccaaaggcccaagaagttgaaaacctttgaaaaaaaatttagaccgaatgtataactagaataaccaataccagagaagtgcttaaaggagctgatggagctgaaaaccaaggctcgagaactacgtgaagaatgcaaaagcctcaggattgcattccagttcatgcgatcaactggaagaaagggtatcagagatgaaaagatgaaacgaaagaaaatgaatgaaatgaagcgagaagcgaaggaaacccatctcacgtgcagagacacacataggctcaaaataaaaggatggaggaagatctaccaagcaaatgggaaacaaaaaaaggcagggggtgcaatcctagtctctgataaaacagacattaaaccaacaaagatcaaaagagacaaagaaggccattacataatggtaaagggatcaattcaacaagaagagctaactatcctaaatacatatgcacccaatacaggagcacccagattcataaagcaagtcctgagtgacctacaaagagacttagactcccacacaataataatgggagactttaacaccccactgtcaacattagacagatcaacgagacagaaagtcaacaaggatacccaggaattgaactcagctctgcaccaagcagacctaatagacatctacagaactctccaccccaaatcaacagaatatacatttttttcagcaccgcaccacacctgttccaaaattgaccacatacttggaagtaaagctctcctcagcaaatgtaaaagaacagaaattataacaaactgtctctcagaccacagtgcaatcaaactagaactcaggattaagaatctcactcaaaaccgctcaactacatggaaactgaacaacctgctcctgaatgactactgggtacataacgaaatgaaggcagaaataaagatgttctttgaaaccaacgagaacaaagacacaacataccagaatctctgggacacattcaaagcagtgtgtagagggaaatttatagcactaaatgcccacaagagaaagcaggaaagatccaaaattgacaccctagcatcacaattaaaagaactagaaaagcaagagcaaacacattcaaaagctagcaggaggcaagaaataactaaaatcagagcagaactgaaggaaatagagacacaaaaaacccttcaaaaaatcaatgaatccaggagctggttttttgaaaggatcaacaaaattgatagaccgctagcaagactaataaagaaaaaaagagagaagaatcaaatagacacgataaaaaatgataaaggggatatcaccactgatcccacagaaatacaaactagcatcagagaatactacaaacacctctacgcaaataaactagaaaatctagaagaaatggataaattcctcgacacatacaccctcccaagactaaaccaggaagaagttgaatctctgaatagaccaataacaggagctgaagttgtggcaataatcaatagtttaccaaccaaaaagagtccaggaccagagaattttagaccaatatccttgatgaacattgatgcaaaaatcctcaataaaatactgggagccaaagacaaaaaccacatgattatctcaatagatgcagaaaaagcctttgacaaaattcaacaacccttcatgctaaaaactctcaataaattaggtattgatgggacgtatttcaaaataataagagctatctatgaccaacccacagccaatatcatactgaatgggcaaaaactggaagcattccctttgaaaactggcacaagacagggatgccctctctcaccactcctattcaacatagtgttggaagttctggccagggcaattaggcaggagaaggaaataaagagtattcaattaggaaaagaggaagcgaaattgtccctgtttgcagacaaaatgattgtatatctagaaaaccccattgtctcagcccaaaatctccttaagctgataagcaacttcagcaaagtctcaggatacaaaatcaatgtacaaaaatcacaagcattcttatacaccaacaacagacaaacagagagccaaatcatgagtgaactcccattcacaattgcttcaaagagaataaaatacctaggaatccaacttacaagggatgtgaaggacctcttcaagcagaactacaaaccactgctcaaggaaataaaagaggatacaaacaaatggaagaatattccatgctcatgggtaggaagaatcaatatcgtgaaaatggccatactgcccaaggtaatttacagattcaatgccatccccatcaagctaccaatgcctttcttcacagaattggaaaaaactactttaaagttcatatggaaccaaaaaagagcccgcatcgccaagtcaatcctaagccaaaagaacaaagctggaggcatcacactacctgacttcaaactatactacaaggctacagtaaccaaaacagcatggtactggtaccaaaacagagatatagatcaatggaacagaacagagccctcagaaataatgccgcatatctacagctatctgatctttgacaaacctgagaaaaacaagcaatggggaaaggattccctatttaataaatggtgctgggaaaactggctagccatatgtagaaagctgaaactggatcccttccttacaccttatacaaaaatcaattcaagatggattaaagacttaaacgttagacctaaaaccataaaaaccctagaagaaaacctaggcatcaccattcaggacctaggcatgggcaaggacttcatgtccaaaacaccaaaagcaatggcaacaaaagacacaattgacaaatgggatctaattaaactaaagagcttctgcacagcaaaagaaactaccatcagaatgaacaggcaacctacaaaatgggagaaaattttcacaagctactcatctgacaaagggctaatatccagaatctacaatgaactcaaacaaatttacaagaaaaaaacaaacaaccccatcaaaaaatgtcaacaggcctcacagctgaaggctttacccacccaatcctgctccccctcttctaacagctatgaaaccttcctagtttcaccccttcacccgttccagttttacataagttttcctcactacacagagatggttcctcccttgacacctgaggattacaattcgagaggagattttggtggggacacagagacaaaccatattatttcaaagttccacaggtctctagagcaggtgcaaaatgctgccagtcggaggagccaagatggccgaataggaacagctcctgtctacagctccggtctacagctcccagcgtgagcgacgcagaagacgggtgatttctgcatttccatctgaggaacgcagttcctcaccagcaatggaacaaagctggatggagaatgactttgaggagctgagagaagaaggcttcagacgatcaaattactctgagctacgggaggacattcaaaccaaaggcaaagaagttgaaaactttgaacaaaatttagaagaatgtataactagaataaccaatacagagaagtgcttaaaggagctgatggagctgaaaaccaaggctcgagaactacgtgaagaatgcagaagcctcaggagccgatgtgatcaactggaagaaaggatatcagtgatggaagatgaaatgaatgaaatgaagcgagaagggaagtttagagaaaaaagaataaaaagaaatgagcaaagcctccaagaaatatgggactatgtgaaaagaccaaatctacgtctgattggtgtacctgaaagtgatggggagaatggaaccaagttggaaaacactctgcagcatattatccaggagaacttccccaatctagcaaggcaggccaacgttcagattcaggaaattcagagaacgccacaaagatactcctcgagaatagcaattccaagacacataattgtcagattcaccaaagttgaaatgaaggaaaaaatgttaagggcagccagagagaaaggtcgggttaccctcaaagggaagcccatcagactaacagcagatctctcggcagaaaccctacaagccagaagagagtgggggccaatattcaacattcttaaagaaaataattttcaacccagaatttcatatccagccaaactaagcttcataagtgaagaagaaataaaataccttacagacaagcaaatggtgagagattttgtcaccaccaggcctgccctaaaagagctcctgaaggaagcactaaacatggaaaggaacaaccggtaccagctgctgcaaaatcatgccaaattctaa

SEQ ID NO: 27540 - DNA, 678 bp, Homo sapiens; identical to SEQ ID NO: 11565
  SIMILAR (289)..(636): 911254mologous to Homo sapiens Similar to ribosomal protein S2,accession number BC001795,Smith-Waterman Score=545.

SEQ ID NO: 27541 - DNA, 1357 bp, Homo sapiens; identical to SEQ ID NO: 27505
  SIMILAR (137)..(1354): 1001254mologous to Homo sapiens Human secreted protein encoded by Gene No. 24,accession number W73420,Smith-Waterman Score =2150.

SEQ ID NO: 27542 - DNA, 1035 bp, Homo sapiens; identical to SEQ ID NO: 9452
  SIMILAR (370)..(1032): 931254mologous to Rattus rattus ribosomal protein S2,accession number X57432,Smith-Waterman Score=1051.

SEQ ID NO: 27543 - DNA, 1040 bp, Homo sapiens
  SIMILAR (133)..(957): 391254mologous to Rattus norvegicus ribosomal protein S2,accession number U92697,Smith-Waterman Score=267.
aaatggcgaataaccccggtgccaacgggcaggcccgggggccctggtggcccggggatgggaaaaccccgttgctttccggcgaggttttcggcattgtcatccggggccggggttcccgcccggtggacggggccggggccgagagccgcggagctcgcgggagcaaaggccgaggataaagggagtggaatgccgttcaccaagttggggccgctttggtcaaggaccattaaagatcaaagttcccctggaaggagatctatctcttctccctgccccattaaaggaatcagaggatcattgattttctttctggggggcctcctctcaaaggatgaaggttttgaatgattatgcccagtgcagaagcagacccgtgcccggccagccgcacccaggcttcaaggccatttgttgctatcggggactacaaatggccacgtcggtctgggttgttaagtgctccaaggaaggtggccaccggccatcccgtgggggcaatcatccctggccaagctttccattcgtccccggtgcgcagaagggtatttggggaacaaagtattggcaaagccccaacactgtccctttgcaaggtgacaagggccgttgcggcttctgtgctggtacgccttcatcccttgcaccccaggggcaactggcattcgtctccgcacctgtggcttaaaaagctgctcatgatggcttggtatcgatgactgctacaccctcagccccggggctgcactgccacccttgggcaaatttggccaagggccaccctttgatgccatttctaagacctacaagctaccttgaccccccgacctctggaaggagactgtattcaccaaagtttccctatcaaggagttcacttgaccacctcgtcaaagacccacacccagagtcttccgtgcagcaggactcagagctccagcttgtggctacaacatagggtttttatacaagaaaaataaagtgaattaagcgtgtaaaaaaaaaaacacagggcggccgctctagagtatccctcaa

SEQ ID NO: 27544 - DNA, 1737 bp, Homo sapiens
  SIMILAR (76)..(843): 951254mologous to Escherichia coli O157:H7 rhsC protein in rhs element, interrupted,accession number AE005248,Smith-Waterman Score=1299.
atgtgcacaaccctcggttggaatacaccgcgtcctcttttacggccagcacgtaaccgctgctgtcgaccgcgtcacacgtgggacgacaccggcgaactcatcggcatcagcagccgccgccagaccgggagtcacagctacagcaccaccgccaggctgaccggcgttcacaccaccgcagcgaatctgaatatccgcatcccgtatgccacagacccggcaggtaaccgcctgcccgacccggagctgcacccggacagcaccctcagcatgtggccggataaccgtatcgcccgtgacgcgcactatctttaccggtatgaccgtcacggcaggctgacagagaaaaccgacctcatcccggaaggggttatccgcacggatgatgagcggactcaccggtaccattacgacagtcagcaccggctggtgcactacacgcggacacaatatgaagagccgctggtcgaaagtcgctatctttacgacccgctgggccgcagggtggcaaaacgggtgtggcggcgtgaacgggacctgacgggctggatgtcgctgtcacggaaaccgcaagtgacctggtacggctgggacggcgaccggctgaccacaatacagaacgacagaacccgcatccagacgatttatcagccggggagcttcacgccactcatcagagttgaaaccgccaccggtgagctggcgaaaacgcagcgccgcagcctggcggatgcgcttcagcagtccggcggcgaagacggtggcagtgtggtgttcccgccggtgctggtgcagatgctcgaccggctggaaagtgaaatcctggctgaccgggtgacgccccgcggcctctggagccccttcagtgaccaagatacagagatcaggacgcctttgcgccgcacaccaggtgcacagcccatagctggctctgcttggaccgcgagggaaggtgaggtcgggggcggagccggggcgtgacagccggggtgtgtgtccgccgggcttggtgcctccggtggccctgcagcaccgtcccacctctgccaccctccgatggggccgctacctgtgtgcctgccaatcatgctgctcctgctactgccgtcgctgctgctgctgctgcttctacctggccccgggtccggcgaggcctccaggatattacgtgtgcaccggcgtgggatcctggaaactggcaggaactgggggttgtgttggtccccgaacccccatcgcctatatgaaatatggttgcttttgtggcttgggaggccatggccagccccgcgatgccattgactggtgctgccatggccacgactgttgttacactcgagctgaggaggccggctgcagccccaagacagagcgctactcctggcagtgcgtcaatcagagcgtcctgtgcggaccggcagagaacaaatgccaagaactgttgtgcaagtgtgaccaggagattgctaactgcttagcccaaactgagtacaacttaaagtacctcttctacccccagttcctatgtgagccggactcgcccaagtgtgactgactaccttgacttgaaatgctcttttgcacaaggaaataaagcgtcctctcagtaatgaacaacagcattcagttatttgcagaagggaaccgaagccaagtgataaagccacaaccttgtgtttgctttccctcccaatcccagaactcaggactggagcccatgtggtttgcaggaat

SEQ ID NO: 27545 - DNA, 4090 bp, Homo sapiens
  SIMILAR (2563)..(3783): 971254mologous to Homo sapiens coronin homologue,accession number X89109,Smith-Waterman Score=2069.
atgggtcccgcgggggtcgcggcgaggccagggcgctttttcggcgtctacctgctctactgcctgaacccccggtaccggggccgcgtctacgtggggttcactgtcaacactgctcgtcgggtccagcagcacaatgggggccgcaaaaaaggcggggcctggcggaccagcgggcgagggccctgggagatggtgctcgtcgtgcacggcttcccgtcctccgtggccgcccttcggtttgagtgggcttggcagcacccgcacgcctcgcgccgcctggcgcacgtggggcctcgcctgcgaggagagacagccttcgctttccacctgcgcgtgctggcgcacatgctgcgcgcaccgccctgggctcgcctcccgctcacgctgcgctgggtgcgcccagacctccgccaggacctctgcctcccgccgccgccgcacgtgcctctggccttcgggcctccaccgccccaggccccggccccaaggcgccgcgcaggtccctttgatgacgcggagcctgagccagaccagggggatccaggggcctgctgctccctgtgcgcccagaccatccaggatgaagaggggcccttgtgttgcccccaccctggctgcctgctaagggcccatgtgatctgcctggcagaggagtttcttcaggaagaaccagggcagcttctgcccctagagggccaatgcccttgctgtgagaagtcactgctttggggagacctgatctggctgtgccagatggacactgagaaagaagtagaagactcagaattagaagagggcagagagcagccctacactccctacaccacacccatactcagcccctgcaggcaaggagagaacaggtcaggttcccgagagctcaggaacatggagctgatccaggacacctcccgcccgccactggagtacgtgaagggggtcccgctcatcaagtactttgcagaggcactggggcccctgcagagcttccaggcccgacctgatgacctgctcatcaacacctaccccaagtctggcaccacctgggtgagccagatactggacatgatctaccagggcggcgacctagagaagtgtaaccgggctcccatctacgtacgggtgcccttccttgaggtcaatgatccaggggaaccctcagggctggagactctgaaagacacaccgcccccacggctcatcaagtcacacctgcccctggctctgctccctcagactctgttggatcagaaggtcaaggtggtctatgttgcccgaaacccaaaggacgtggcggtctcctactaccatttccaccgtatggaaaaggcgcaccctgagcctgggacctgggacagcttcctggaaaagttcatggctggagaagtgtcctacgggtcctggtaccagcacgtgcaggagtggtgggagctgagccgcacccaccctgttctctacctcttctatgaagacatgaaggagaaccccaaaagggagattcaaaagatcctggagtttgtggggcgctccctgccagaggagaccatggacttcatggttcagcacacgtcgttcaaggagacgaagaagaaccctatgaccaactacaccaccgtcccccaggagctcatggaccacagcatctcccccttcatgaggaaaggcatggctggggactggaagaccaccttcaccgtggcgcagaatgagcgcttcgatgcggactatgcggagaagatggcaggctgcagcctcagcttccgctctgagctagagatcttggtagaggagagcaacgtgcagagggtggactcgccagtcacagtgtgcggcgacatccatggacaattctatgacctcaaagagctgttcagagtaggtggcgacgtccctgagaccaactacctcttcatgggggactttgtggaccgtggcttctatagcgtcgaaacgttcctcctgctgctggcacttaaggttcgctatcctgatcgcatcacactgatccggggcaaccatgagagtcgccagatcacgcaggtctatggcttctacgatgagtgcctgcgcaagtacggctcggtgactgtgtggcgctactgcactgagatctttgactacctcagcctgtcagccatcatcgatggcaagatcttctgcgtgcacgggggcctctccccctccatccagaccctggatcagattcggacaatcgaccgaaagcaagaggtgcctcatgatgggcccatgtgtgacctcctctggtctgacccagaagacaccacaggctggggcgtgagcccccgaggagccggctacctatttggcagtgacgtggtggcccagttcaacgcagccaatgacattgacatgatctgccgtgcccaccaactggtgatggaaggttacaagtggcacttcaatgagacggtgctcactgtgtggtcggcacccaactactgctaccgctgtgggaatgtggcagccatcttggagctggacgagcatctccagaaagatttcatcatctttgaggctgctccccaagagacacggggcatcccctccaagaagcccactggacgtgtggacaagaatgcgcccacggtctgtggccacacagcccctgtgctagacatcgcctggtgcccgcacaatgacaacgtcattgccagtggctccgaggactgcacagtcatggtgtgggagatcccagatgggggcctgatgctgcccctgcgggagcccgtcgtcaccctggagggccacaccaagcgtgtgggcattgtggcctggcacaccacagcccagaacgtgctgctcagtgcaggttgtgacaacgtgatcatggtgtgggacgtgggcactggggcggccatgctgacactgggcccagaggtgcacccagacacgatctacagtgtggactggagccgagatggaggcctcatttgtacctcctgccgtgacaagcgcgtgcgcatcatcgagccccgcaaaggcactgtcgtagctgagaaggaccgtccccacgaggggacccggcccgtgcgtgcagtgttcgtgtcggaggggaagatcctgaccacgggcttcagccgcatgagtgagcggcaggtggcgctgtgggacacaaagcacctggaggagccgctgtccctgcaggagctggacaccagcagcggtgtcctgctgcccttctttgaccctgacaccaacatcgtctacctctgtggcaaggtggcctcgtcgggcgggggtgacagctcaatccggtactttgagatcacttccgaggcccctttcctgcactatctctccatgttcagttccaaggagtcccagcggggcatgggctacatgcccaaacgtggcctggaggtgaacaagtgtgagatcgccaggttctacaagctgcacgagcggaggtgtgagcccattgccatgacagtgcctcgaaagtcggacctgttccaggaggacctgtacccacccaccgcagggcccgaccctgccctcacggctgaggagtggctggggggtcgggatgctgggcccctcctcatctccctcaaggatggctacgtacccccaaagagccgggagctgagggtcaaccggggcctggacaccgggcgcaggagggcagcaccagaggccagtggcactcccagctcggatgccgtgtctcggctggaggaggagatgcggaagctccaggccacggtgcaggagctccagaagcgcttggacaggctggaggagacagtccaggccaagtgctgccatggccacgactgttgttacactcgagctgaggaggccggctgcagccccaagacagagcgctactcctggcagtgcgtcaatcagagcgtcctgtgcggttaccatgccagcaatgattccttttgagtttctgacagaagatagtggttttcatccaaataagtcaactactctaccccatccctaagccacttgtatggaaagaaaaagaggaagaagccagtactgtgactgcgtaagcttcccccagcatcacccgctatgagatgtgtggcagctgagaccctggaactgctcg

SEQ ID NO: 27546 - DNA, 723 bp, Homo sapiens
  SIMILAR (440)..(505): 451254mologous to Bromheadia finlaysoniana extensin,accession number Y13141,Smith-Waterman Score=42.
tcacatgcacatcaagtttaaatgggtgccccgatcagctacccatagggcttgtgcctgctgaatagcctgtttggctgccaggaaggtggtttcagccgcatcatcccaattccaggcaagaggctgcgttgctgcttctaaatagtggcaccatcccagttctgttgtcaagtggcctatcaaatccatgatagacggcacagctgccaagccgtgcaaaacatccacccacagcctgtcctcaggcatgggagagacatccacagtgcataagcagggagctaagcggccgatgccgaggtccaaagatacaggtttcactttcactgaccagctttcataaccgtcaataaatgcagctctgcccggaaacttattcaggtttagggaccagtggcttgccgagtccacatattgcctttggttgtccggtgtccccccaagcccggcaccactgggtgagcctgtaacggaggttcgtcctcctccctgcactgcgtccagcagggactgggcatgcccttccagcagcacagtcacaaatgcccatctgactctgttggcaaaggcacactccttctcggtcctgtgcatttccaggtgcttcagcaccttctccacactcgtggagggcctgtccactgccgcccatgtttccaccagagcccatccttgcagcacggctgccactgggtgccacagctcatgctgtggctgcat

SEQ ID NO: 27547 - DNA, 990 bp, Homo sapiens
  SIMILAR (448)..(600): 371254mologous to Mus dunni reverse transcriptase,accession number AJ233595,Smith-Waterman Score=90.
acatgggcggcagtggacaggccctccacgagtgtggagaaggtgctgaagcacctggaaatgcacaggaccgagaaggagtgtgcctttgccaacagagtcagatgggcatttgtgactgtgctgctggaagggcatgcccagtccctgctggacgcagtgcagggaggaggacgaacctccattacaggctcacccagtggtctgccagaaaatagagcatgaacagccactgggccccaagggtgggcctagagaccccctaccataaacctgaataagtttccgggcagagctgcatttattgacggttatgaaagctggtcagtgaaagtgaaacctgtatctttggacctcggcatcggccgcttagctccctgcttatgcactgtggatgtctctcccatgcctgaggacaggctgtgggtggatgttttgcacggcttggcagctgtgccgtctatcatggatttgataggccacttgacaacagaactgggatggtgccactgtgtggtggacttggccaatgcattcctcttaatcgacattgctccagagagccaggaacactttgcagccaaacaggctattcagcaggcacaagccctatgggtagctgatcggggcacccatttaaacttgatgtgcatgtgaccagatagttttgactggggcttagaacctgacacttggcatgacagtggtaagtaccatatacatgttggctaatagtataattcactggtctttctttttttaaataagagtaaaattaataatggtggttacctacgagaggtgaacggtcagaaactgagtgaaaacggggacaagagtgagaaggaaagtgttagggtgcatgttttaaatgtacttttaattttagagttgattgcattgcaggtctgtgccttggagtaggcggggagggaacgtctgcgcaggcgtgacccccgcccctacacattcactggcctgaagcccccg

SEQ ID NO: 27548 - DNA, 858 bp, Homo sapiens
  SIMILAR (469)..(561): 831254mologous to Homo sapiens Human secreted protein, SEQ ID NO: 4922,accession number G00841,Smith-Waterman Score=124.
atggggatattagtagatgacaaggagaaggaggggtggctgatgacaaagctgctggtatgcatgtcaaaggagctgggagttggaaggaagatggaggcaagagtcaagcaggtcacaaggaatgtgagatatactgtgagtgtgagaagaaagtctgcatccaagagaaacagggtgaaattggtgtccacaggagaaaggcctcgttctgatgaggccttagggaagagccttgggaaggactatacttctgacacactggcgaagcctcaggaacgcattgggaatattgccaaggccggcagccaggcaagagggaagaccagctcacagtgtggagctggagtgtttttctttttcctgatgcagacttgcctctcagttagtgcttccctctctcatagatcctatcctcccatgcccccacctttccacccccacccacaccctacatttctctactcagaacctcctcagaaagcaatagaagaactgcttaaggaggcaaaacgtgggaaaactagagctgaaacaatgggacccatgggttgccagaaagagcaaaaatggtcactgatcatcccagagcatataccacatctggtccctttccaaccaacccctcttacacaccatgaaaagatctggatgacaagccctagccttgagctatcagtgggttcatccagctcctgcagcgttcatccaactcctgcagagcaggacactggaactgccttcaatgggaccatcttgtttctgaaggagcttgaggaccaccagtggagggctggggatacacagattagcttacccatctgccattcactcaacaaacacattaaactcctctga

SEQ ID NO: 27549 - DNA, 454 bp, Homo sapiens
  SIMILAR (75)..(290): 971254mologous to Homo sapiens Human secreted protein, SEQ ID NO: 4922,accession number G00841,Smith-Waterman Score=370.
cacgaggttatgggacagagcccccgatccgccagcaccacctgaggatccagaaaccgccccagcgatggatagaggatcatgagctggagaggaaagcaatagaagaactgcttaaggaggcaaaacgtgggaaaactagagctgaaacaatgggacccatgggttggatgaagtgtcctcttgctagcaccaataaaagatttctaattaacacaattaaaaacacattgccctctcataaagagcaagaccatgaacaaaaagagggcgataaggaaccagcccaagagccaggcccagaaagaagaaaacccgaagaaacacagaagccatccttacaagcacagcttccgcgctcgaggttccgccagttactccccgccacgaaagcggagcagccaggacaagtacgaaaagcggtccaaccggcggtgaggctggaaccagggct

SEQ ID NO: 27550 - DNA, 769 bp, Homo sapiens
  SIMILAR (109)..(249): 431254mologous to Homo sapiens CGI-203,accession number AF285118,Smith-Waterman Score=89.
tttcgtgttgatgggtgacccggggagaggtatccggccagaggcgagtcctgcggagtggtagcgcgcacggcctgcggtgtgacacccagcccctgccagtcccccatggccccgtggagccgagaggcggtgctgagtctctatcgggctctgttgcgccagggccgacagcttcgctacactgatcgagacttctactttgcctccatccgccgtgaattccgaaaaaatcagaagctagaggacgctgaggcccgggagaggcagctggagaagggcctggtctttctcaacggcaaattggggaggatcatttaggatcctccaagggaaagaggacaaaggtgccttctgtagacactcctgctctcttccatccccatcttacagatgtattaagaagcctcagatgagcaatggcaggcgctggtgagcgcataggcaagaaggatgacaatggcattggcacggccattgactttgtgctctccaatgccccgactagtgctgggggtgggtggagcggccatgctgggcatcgccacgctggcagttaagcggatgtacgatcgggcgatcagtgcccctaccagccccacccgcctgagccattcggggaaaaggagctgggaagaacccaactggatgggctccccacgactgctgaacagggacatgaagacgggcctgagccggtccttgcagacccttcccacagactcctccaccttcgacacagatacattctgcccgccccggcccaagc

SEQ ID NO: 27551 - DNA, 1392 bp, Homo sapiens
  SIMILAR (1392)..(4): 1001254mologous to Homo sapiens putative human phenylalanine tRNA synthetase,accession number AD000092,Smith-Waterman Score= 2422.
tcacgcagcctcctgtgtgggagggggcctcggctcggcatccaggcggcacaggggactgtcatacaccatctgcaggttcaccttgtggcccaccagctcccggatattgttgatgccatatttgatcatcgttgggcgctccagggagaggccccaggcaatgaccgacacgttctcgggaagccccatgggcagcagcatctctggacggaagacccccgagtttccgacctccacccacttcttcaggccttggtggtagctgaacacctccatgctgggctctgtgtatgggttgtaggctggcttgaagcggagttgcgtgatacccagcttggtgaagaactcccgcagaacgcccatgaggtggcccaaggtgagaccatgatccgccaccacgccctcgatctggtggaactcagccaggtgcgtggcgtccagggtctcattccggaatacgcggtcgatggagaagtacttgaccggagtgaagggcttcttctgggcaaggcggtagagcgcacgggcgctggctgatgtggtgtgggttcgcagtaggtttttccgggcctcgtccagcttccagttatacttgtacccctgtgagccgtagccgccctgagagtgggtccgcttgacccgctggacatagtccattgggagctgcagggcctccgctggatctcgaaggaagaaggtgtcgtgctggtcacgggctgggtgctgctggggctggaagagggcgtcaaagttccagaaggagctctcaatgaagttatcagtcggcatctcggtgaaccccatctccaggaagatctgtcggaactgggagcggaccttgagcagcgggtgaaggtggccgctgtcggggaggacaccgtgggccaagaagttgtagggcttgaagggccggtcccgccaagagccactggagatcatctctgggctcagctctgtctcttgcttggagatgctggtactaaaggcactgcctttgctcacccagtaggtcttcagagtcacttcagccaacagcttcctcttcctcagctcgctcctctccttctcccccagcttctcagcctgtcccccccggaccagctggagccgccgctgcacctcatcctccatgctgtccacccgaatccacttgttggacatggccttgctgaagcccactttgccactgggcagtcgcataagctcgctctgggccaggccctctgggggaatgcttcgaaacacacgggcctcatggctgccctcccgggcaatctcctcgccctccgcagtaagctcccagtgcttggtggaccgaagttcagcctcgatgacctcgcccagcgcctgaaggctcttcacggcgcccaccaccgcctggtgctccat

SEQ ID NO: 27552 - DNA, 1269 bp, Homo sapiens
  SIMILAR (419)..(511): 561254mologous to Homo sapiens PRO2831,accession number AF119901,Smith-Waterman Score=86.
atgggctctggtggccagaaaaagtcctacggcaaagaaatgcagatactagcagttggacctccagccagtgtagtggatggaatttgggcaaaatttagaaattatgaaaagttatacggcacagttgtgctagcttttgccgagctgccagctgctgccacagttttgccaactatcctctgccttgtagtcgtgcctctgctgctcacccagccctggcttctcttgatatctgctttggggaagcaaaatgctgccccagaacatgggggtgcccgtgaaggtctcaaatccaacggggaacagacagggctcccaaatgcacaagtgggccgccggcacagagtcgcccaaccgcaagatgatgcgccccgggaagagccgccctaccttcccaatgggatgccgcccggaagagacgctcctcacttgccagactgggcagccagccagaggggctcctcacatcccagacgatggccgcccagccagagacgctccttacttcccagacgggttgccgaccggccagaggctgcaatctcggcactttgggaggccaaggcaggcggctgggagaccctcccggaaatggaaataaccatacataacaaaacccgacaatcgaagcgcataactcaccagacaaatcgcccgaatacatcatcaaagacaatcagaatcaccaaaaccgacctaaccagctgggaaactcaatcccccggctcccccgaccgtcatcgcaaaccgagtacagcaaccaagcacaaccgattttcgaaaatttatagcagatttagcatcttccaatgtgaccaagggctcaatgggcgatgtggacaggggaagggggcaggcaaggagcaaaggatgcaggagcaaggagaaaacttccaggctcctcccttccaaagtcacccagccttgagatcattgcagatgcaacaggtgcaaacagaagaacactttgggaccttggaatgcgggaagctggctcagtgttccttccaccctactagagaagaagacaggaaccaggatgggaagacggacatgttacattttaagctggagcttcccctgcagtccacggagcacgttctcggtgtgcagctcatcctgactttctcctatcgattacactcatgtggtattccgagcgtccttagccggtatccttatttctccatgttagcttttggcatcctttcccgtaccttaaggcgattcgtcacggtgtcaagccttttaattacaggaatttag

SEQ ID NO: 27553 - DNA, 1779 bp, Homo sapiens
  SIMILAR (1456)..(272): 1001254mologous to Homo sapiens putative tRNA synthetase-like protein,accession number U07424,Smith-Waterman Score=2079.
tgggggcaactgcccactttattagacaataggtggcccacaggtctcctcagggcccaccctcacagtagacacaccacacaggacaacagaaggaacctgctacccagtcctctgtccctgggattctggtcctgggacaggtgggaaagaggaaggtgggggctggcctcacagagcctcataaatacaaggtcactggccagggatgcaaaggagcgcagcagcagggactcggggaggatgacctgtcctagagtggcccatgtcacgcagcctcctgtgtgggagggggcctcggctcggcatccaggcggcacaggggactgtcatacaccatctgcaggttcaccttgtggcccaccagctcccggatattgttgatgccatatttgatcatcgttgggcgctccagggagaggccccaggcaatgaccgacacgttctcgggaagccccatgggcagcagcatctctggacggaagacccccgagtttccgacctccacccacttcttcaggccttggtggtagctgaacacctccatgctgggctctgtgtatgggttgtaggctggcttgaagcggagttgcgtgatacccagcttggtgaagaactcccgcagaacgcccatgaggtggcccaaggtgagaccatgatccgccaccacgccctcgatctggtggaactcagccaggtgcgtggcgtccagggtctcattccggaatacgcggtcgatggagaagtacttgaccggagtgaagggcttcttctgggcaaggcggtagagcgcacgggcgctggctgatgtggtgtgggttcgcagtaggtttttccgggcctcgtccagcttccagttatacttgtacccctgtgagccgtagccgccctgagagtgggtccgcttgacccgctggacatagtccattgggagctgcagggcctccgctggatctcgaaggaagaaggtgtcgtgctggtcacgggctgggtgctgctggggctggaagagggcgtcaaagttccagaaggagctctcaatgaagttatcagtcggcatctcggtgaaccccatctccaggaagatctgtcggaactgggagcggaccttgagcagcgggtgaaggtggccgctgtcggggaggacaccgtgggccaagaagttgtagggcttgaagggccggtcccgccaagagccactggagatcatctctgggctcagctctgtctcttgcttggagatgctggtactaaaggcactgcctttgctcacccagtaggtcttcagagtcacttcagccaacagcttcctcttcctcagctcgctcctctccttctcccccagcttctcagcctgtcccccccggaccagctggagccgccgctgcacctcatcctccatgctgtccaccactcggaacacccggggcccgtcagccgcactcttgtccacccgaaatccacttgttggacatggcctttgctgaagcccactttgccactgggcagtcgcataagctcgctctgggccaggccctctgggggaatgcttcgaaacacacgggcctcatggctgccctcccgggcaatctcctcgccctccgcagtaagctcccagtgcttggtggaccgaagttcagcctcgatgacctcgcccagcgcctgaaggctcttcacggcgcccaccaccgcctggtgctccatgcccagctcagccgccaactcggcgctgtccaggccgccatcagacgcctccagccgccggagcagcagttccgc

SEQ ID NO: 27554 - DNA, 1115 bp, Homo sapiens
  SIMILAR (921)..(1094): 341254mologous to Lycopersicon esculentum extensin (class I),accession number X55683,Smith-Waterman Score=65.
atggaactctcatgtattacttgtggaagtctaaattgtataactgtttttggagagctctttggcattatcaaagttggagatatgcttctcagcaattctacttgtcatcgggctgaacttcggtccaccaagcactgggagcttactgcggagggcgagagattgcccgggagggcagccatgaggcccgtgtgtttcgaagcattccccagagggcctggcccagagcgagcttatgacctagtgattcagctgctctacaaggctgtgcagctggggcagcggcggctcccgtggccctaccagcggcgcgacccccggccacccaccaagagcgatgaagctcctgttcacgccggtttggcctcgagcttggccagaaggcagctcctggggtctgcatctagcctgctacatgggcagcaagatgggctctggtggccagaaaaagtcctacggcaaagaaatgcagatactagcagttggacctccagccagtgtagtggatggattggggaatccgttgggggacccttaaggccgccaatacccccggtgttattaaagccaaaggccccccacccgctatagcccccgattggaaccgtttccgcaaaaaagtaaaacgcccaaataacagctccaggacagaaaccgatcaggtctggctggagacaggagataagacttccacttctggaaccacactcggggatgggggaagggtaacagcaacaaccgtgctgatggcgggacttggcacgagctccccgccagcattatcagacaccccagacgttggaggctgctatcaggtctcgctggccctgcccaggcctggagctcacggaaaacgtgggaaacaggctaggtgtacggtcatctttcatcaagcaacacgtagcgtaatcacgcgctacgttcatcgttctctaccaaactcaacccgcgcgggcggcaagcggcccccatctccgcatgtcttcgtcgcggtccacattccccgccccgtatcggtcgacccgtccccaatccccccccggggtgttccgtatccgtcgtacccgtccccttatgccgctacgccgcatcgcaccgctacgcaatcgtag

SEQ ID NO: 27555 - DNA, 223 bp, Homo sapiens
  SIMILAR (61)..(150): 391254mologous to Haemophilus influenzae Rd anaerobic glycerol-3-phosphate dehydrogenase, subunit C (glpC),accession number U32751,Smith-Waterman Score=57.
  misc_feature (1)...(223): n = a,t,c or g
cgtggccantattgnaccttnaattccaccacctttcataaagccaccagcagaagatgatgtgtcaaatgtacaaataatgtgtgcctggtgccagaaagtgggaatcaagcgctattccctgagtatgggaagtgaggtgaaaagcttctgcagcgagaagtgctttgcggcctgccgacagcctacttcaagagaaataaggtttatcctttgtctgtgt

SEQ ID NO: 27556 - DNA, 2376 bp, Homo sapiens; identical to SEQ ID NO: 2492
  SIMILAR (10)..(129): 601254mologous to Arabidopsis thaliana putative glycine-rich protein,accession number U93215,Smith-Waterman Score=124.

SEQ ID NO: 27557 - DNA, 553 bp, Homo sapiens
  SIMILAR (142)..(288): 411254mologous to Homo sapiens Human testis secreted protein fs40_3,accession number W88402,Smith-Waterman Score=67.
ccgcgctcgcaccccgccgctctggccgcgcgcccgcggcccgggatcccgagtgtccggagctccgtggtttctgttggacctcgcgggaggcggttttctcccgcctgctgtgctctgtgacctctctgctgcctcctccacggtctctgggcggagcaatccacactgctgagcctggggtggtttggaattcttcggcgaagtggagcgggccgagagtgggtttcccgtccccgagccctccctcatctcggagatgccgcacttgtgagcgacagggcttcatttgaattttcgcacctcgcgagttgcggagcctgcatctctgaagctgcctcggtgaagagccacagcattattttttttctctttgggagagtagctgtctgggatttgagatcctatcttccctgcaaattaccaggttgcatcttcactgataggaatacatttcttcaccaaaggacatggatgaaaatgaaagcaaccagtctctgatgacaagcagccaatatcctaaagaggcagtaagaggacgtcaaaattcagt

SEQ ID NO: 27558 - DNA, 1405 bp, Homo sapiens
  SIMILAR (246)..(485): 411254mologous to Caenorhabditis elegans contains similarity to TR:Q9Z9R4,accession number AC024758,Smith-Waterman Score=173.
ggttttgcctcctgtgacttaattcctgtgcagaatttggtttgtttttacaatctagccttgacctggccttcagacttggtttctagctcatcctccccaaaactgcatgttttatcccagtggttcttaattctcaacatccatagtcctgcgcagaatcttaaagtttggttaagtgaaacagattttagaatttagtgtatatctcaaaggtcagaattaagaaattgccatgtttcttcaggtggtttatgaaataccagcatgtagacccagaagaagctgtaaggattcacactgatgtccaaacaaagaaatctatggcaattcactggggaacttttgccttagcaaatgagcattacttagagcctccagtgaagctgaatgaagctctagagagatacggacttaacgctgaagatttttttgtcttgaagcatggagaatcaagatacctaaataataatgatgaaaacttttaataaatgtgagcacaggcacttttaatgaaaaaggcatcatctaagtttaaaaacaaatgaaaagacttagaaattcatgaatattgtgattattttacatttggaaacaacttctgcaagtttatgttttatgttttgtgtaataacttgcttcctagtatgatcagctcatgtacactatgagagggttcaggggtgggtcatttaaataatgaattggctaatgtggattttaaatttcatatcatgatataagcactgcaatggaaatgtttttactaaaacattatatttttgtggtactagaatttcctgaggtgaaaaaccgatattgaagattcatttttcttttttccattcttcaggaccttcggcaaggtgagtcaaggctctctacctacctagatgtttttcagaggcctacaaatacaagtatctttcttatatgcacattctaataaatgatgaaattcagtccaacatgcttattataaacatagcaattcttgctctatcaaattagcttatatgccaaatattaaatatcggtttatttaggtaagcataaaaacataggggctatcatttttaaagacttgattttcccctattgggggaaaatatataaatacatatttgcccattttaaacatttacccattttaacccatttttaagtgtacagttctttcgcattaatgcacccatgacccaccattcacttaaatttttaaaagaacagtatattctttttttcctagaagccttcagatgagagggaacagtatattctattgcacgtctacaattcccaaaagacctcttactttgggaggccaaggtgggtgggtcacttgaacccaggagttttgacatcaacctgggcaacatgggtgacctcccgtctctctcggaaa

SEQ ID NO: 27559 - DNA, 1570 bp, Homo sapiens
  SIMILAR (426)..(1253): 381254mologous to Saccharomyces cerevisiae Lpg6p,accession number U43281,Smith-Waterman Score=478.
ggctgatagtgggtttcccgtccccgagccctccctcatctcggagatgccgcacttgtgagcgacagggcttcatttgaattttcgcacctcgcgagttgcggagcctgcatctctgaagctgcctcgttcttcaccaaaggacatggatgaaaatgaaagcaaccagtctctgatgacaagcagccaatatcctaaagaagcagtaagaaaacgtcaaaattcagcacggaattccggagcaagtgattcttctaggttttctaggaaaagcttcaaactgggattatagactagaagaaggtgtaactaaatccaagaaaggaaaagatgggagatttgtgaatccgtggccaacatggaaaaacccctctattccaaatgttctcagatggctgataatggagaaagatcacagcagtgttccaagttctaaagaggaactagacaaagaactcccagtgcttaagccatattttatcactaaccctgaagaagctggagtgagggaagctggcttaagagtcacatggctgggacatgccacggtaatggtggaaatggatgagctcatatttctcacggatcccatctttagctctcgtgcttcaccatcgcagtacatgggtccaaagcgatttcgtcgttccccgtgcacaataagtgaactccctccaatagatgcggtccttatcagtcacaaccactatgaccatctggactacaattctgtcattgctttgaatgagcgatttggtaatgagttgagatggtttgtgcctttgggtctccttgactggatgcaaaaatgtggctgtgagaatgtgattgagttggactggtgggaggagaattgtgtccccggacatgataaggtcacttttgtctttacaccttcccagcactggtgtaaaaggactctaatggatgacaacaaggtgctatggggcagctggtctgtcttggggccttggaatcgattttttttcgcaggagatactggttattgccctgcttttgaagagataggaaaaagatttggaccttttgaccttgcagctattcccatcggagcttatgaaccgaggtggtttatgaaataccagcatgtagacccagaagaagctgtaaggattcacactgatgtccaaccaaagaaatctatggcaattcactggggaacttttgccttagcaaatgagcattacttagagcctccagtgaagctgaatgaagctctagagagatacggacttaacgctgaagatttttttgtcttgaagcatggagaatcaagaataccttaaataataatgatgaaaacttttaataaataatttcctgaggtgaaaaaccgatattgaagattcatttttcttttttccattcttcagagaccttcggcaagagccttcagatgagagggaacagtatattctattgcacgtctacaattcccaaaagacctcttactttgggaggccaaggtgggtgggtcacttgaacccaggagtttgacatcaacctgggcaacatggtgacctcccgtctctctcggaaaaaaaaaaaa

SEQ ID NO: 27560 - DNA, 474 bp, Homo sapiens
  SIMILAR (323)..(472): 1001254mologous to Homo sapiens RAB9-like protein,accession number AB036693,Smith-Waterman Score=250.
attgggtcagaactgaaccaaattacaggaccatctgctagtccatttacccatggcactcagccattttcctggcacaacaaaagacctcagaaaaacaagacctatttttccccttatgcaaaattagtgttatttcttctgctgtactacatcaattaatgagcataaatcagagaagttgaatgagaaggccttataattcagagaaatttgctatgaagttgatttcagtttcaggtttaactgttttccctcctacttttccttttattttcaggttctcttggttacaaactccttcccttctggtgctgcaaaaatgagtgggaaatccctgctcttaaaggtcattctcttgggtgatggaggagtagggaaaagttcgcttatgaaccgttacgtaaccaacaaatttgactcccaggcttttcacaccataggggtagagttcttaaatcgtgatctggaggt

SEQ ID NO: 27561 - DNA, 1050 bp, Homo sapiens
  SIMILAR (287)..(889): 981254mologous to Homo sapiens RAB9-like protein,accession number AB036693,Smith-Waterman Score=1049.
gcgagcggcacgtgtcaggccaccgaggtccaagccgcacttgctgccccattgaggacgaggaggcagcaggagcagtgacggtgactctaaggagccggattcccggcacgcagagctgacctgcctggcacccgcggccctctcctgtttccttcccattgtgttggcaccctaaaaagaaagaataaaacaacaacaggaaaaaaaggaaaatatttaaattgtgacaaaaacccactgggttctcttggttacaaactccttcccttctggtgctgcaaaaatgagtgggaaatccctgctcttaaaggtcattctcttgggtgatggtggagttgggaaaagttcgcttatgaaccgttacgtaaccaacaaatttgactcccaggcttttcacaccataggggtagagttcttaaatcgagatctggaggtagatggacgctttgtaaccctccagatctgggacactgcagggcgagaacgtttccagaagcttaggacacctttgtacaggggagcagactgctgcctcttgaccttcagcgtggatgatcggcagagcttcgagaatcttggtaactggcagaaagaatttatttactatgcggatgtgaaggaccctgagcatttcccctttgtagttctgggtaacaaggtagacaaagaggataggcaagtgactactgaggaggcacaaacctggtgcatggagaatggggattacccttatttagaaactagtgccaaagatgatactaatgtgacagtggcctttgaagaagctgtcaggcaggtgctggctgtagaggaacagctggagcattgcatgttgggtcacaccattgacttgaacagtggctccaaagcagggtcttcgtgctgttaaagatagggagccttttaaaaatgtgccccaaattgatcagtcagtagtgtaagaataactgtgcccctctaagagtgcacacacacgcacacaagagggtaagagacaaggttctgattgtgaaacagagcctttcaaattgaagtgtagattgattt

SEQ ID NO: 27562 - DNA, 457 bp, Homo sapiens
  SIMILAR (316)..(456): 1001254mologous to Homo sapiens dJ68O2.3 (apolipoprotein L, 2),accession number Z82215,Smith-Waterman Score=253.
atgggcagcagttgtatgattttgggtcatacgattttgcagaggaacatgcctgatctgggtggtttcttgattgggaagtgtaaaacgatgggtatatctgggaggccggaggacgtgtctggttattacacagatgcacagctggacgtgggatccacacagctcagaacagttggatcttgctcagtctctgtcagaggaagatcccttgagagaggtggggaaaacagcttagatgggttcacaaagctccccgggctcagctctggttctgacaccctcagacacggccagctgaccccagaagaaaggacaagaggaccctgccttggtgtgagagtgagggaagaggaagctggaacgagggttaaggaaaaccttccagtctggacagtgactggagagctccaaggaaagcccctcggtaacccagccgctggcaccatgaacccag

SEQ ID NO: 27563 - DNA, 1497 bp, Homo sapiens
  SIMILAR (486)..(1322): 991254mologous to Homo sapiens bK212A2.2 (apolipoprotein L, 2),accession number Z95114,Smith-Waterman Score=1402.
  misc_feature (1)...(1497): n = a,t,c or g
tgcttggtcatgagctgctgggaagttgtgactttcactttccctttcgaattccagggtatatctgggaggccggaggacgtgtctggttattacacagatgcacagctggacgtgggatccacacagctcagaacagttggatcttgctcaatctctgtcagaggaagatcccttggacaagaggaccctgccttggtgtgagagtgagggaagaggatgctggaacgagggttaaggaaaaccttccagtctggacagggactggagagctccaaggaaagcccctcgggaacccagccgctggcaccatgaacccagagagcagtatctttattgaggattaccttaagtattttcaggaccaagtgagcagagagaatctgctacaactgctgactgatgatgaagcctggaagggattcgtggctgctgctgaactgcccagggatgaggcagatgagctccgtaaagctctgaacaagcttgcaagtcacatggtcatgaaggacaaaaaccgccacgataaagaccagcagcacaggcagtggtttttgaaagagtttcctcggttgaaaagggagcttgaggatcacataaggaagctccgtgcccttgcagaggaggttgagcaggtccacagaggcaccaccattgccaatgtggtgtccaactctgttggcactacctctggcatcctgaccctcctcggcctgggtctggcacccttcacagaaggaatcagttttgtgctcttggacactggcatgggtctgggagcagcagctgctgtggctgggattacctgcagtgtggtagaactagtaaacaaattgcgggcacgagcccaagcccgcaacttggaccaaagcggcaccaatgtagcaaaggtgatgaaggagtttgtgggtgggaacacacccaatgttcttaccttagttgacaattggtaccaagtcacacaagggattgggaggaacatccgtgccatcagacgagccagagccaaccctcagttaggagcgtatgccccacccccgcatgtcattgggcgaatctcagctgaaggcggtgaacaggttgagagggttgttgaaggccccgcccaggcaatgagcagaggaaccatgatcgtgggtgcagccactggaggcatcttgcttctgctggatgtggtcagccttgcatatgagtcaaagcacttgcttgagggggcaaagtcagagtcagctgaggagctgaagaagcgggctcaggagctggaggggaagctcaactttctcaccaagatccatgagatgctgcagccaggccaagaccaatgaccccagagcagtgcagccaccagggcagaaatgccgggcacaggccaggacaaaatgcagacnnnnnnnnnnnnnnnnnnnnnnnngggaaagggagcctcctttttcccccaaggggggactgcaggggttaattttgggtatgttggaaattccccctcgggggtacacc

SEQ ID NO: 27564 - DNA, 1142 bp, Homo sapiens
  SIMILAR (385)..(468): 481254mologous to Gallus gallus sprouty 1 protein,accession number AF177875,Smith-Waterman Score=58.
ttaccgactgatttctgctgccaagcggctggctccagaccgactaggcaacaatccggtctccaccttcttgccccaccgtccttgctcaggagggctgagacttggccctctgtccaagagtggggtggtttccaagtctgatttcccctcattgttctgggctttttcccgggtcttaaaggccttaaagttgtgggtgggatcaggtttgggaccgggcagcttctcaatgtggccctctaagctgattccccatccgtacaatgggcacgcaagcatgcctattccatcatgtggcttggtggagctgatgcttaggaacacgtagaacagctcctggcttgtgaaaggctctcgatggttcattaccaatatccttactctaagtgcaggtacctggtaggcactggggtggtgtctgtttcctgcctgcttagatgccaaccgccagccaggaattgccttcttgctgccactcgtagctggcccctcagacacaaggaagattaattggcagtagctgggccgtgtgcaaaggattagcaggtgatgagggacatagcaggctatgcaggttcggaattctttgtctacctccacaaggttgcggcccaaggcttcagccactggatgtttaagactgtaaactccaagcctgtggaaggaggtcatacgggctttcagagcctgcacgaaggggaggatccagtggtggcgcagaaccacactctgggacaggctgaggtggaacaccttcatcctaaccagccggggtacatatgtctgggcatggggcagcaacacatcaagcagatccaggaactcctccttggcttcatatggtacatagacgtgggtggcccagttgcctcgctcgtgggggaaggtgcgcacccgtcctccgtgttttgtgcagtcatctacaggcccctcctcggtgcccgggaacatgttcagcacactgtcaggtacaggaaatctcagcctgggaagggggctatggccgcgacggtggctcaccatcccccggcgtggtccgcataccgtcctcggaatcatcctcggagccgctgctgctgtagcccaccaggggcgcaaagctcatggggcaacatccaagtccaccagagcaggtccac

SEQ ID NO: 27565 - DNA, 744 bp, Homo sapiens
  SIMILAR (103)..(405): 801254mologous to Homo sapiens NAG13,accession number AF194537,Smith-Waterman Score=400.
atgaagaagaaagcacttagctgtgtctgcagacatcctcctggaagagcagatgtgggccttggctgtcaaaggacaagaaatatttgcatagcaacattacaggaagagcaaattgtatgtgtaaaggctcagaacaatgagaaagcattgcacagattgagaaccacagaaatacaaactaccatcagagaatactacaaacacctctacacaaataaactagaaaatctagaagaaatggataaattcctcgacacatacaccctcccaagactaaaccaggaagaagttgaatctctgaatagaccaataacaggctctgaaattgtggcaataatcaatagcttaccaaccaaaaagagtccaggaccagatggattcacagccgaattctaccagaggtccctcgactatagggtcaccgtcgacagcgacacacttgcatcggatgcagcccggttaacgtgccggcacggcctgggtaaccaggtattttgtccacatacccgtgcgcaaaatgttgtggataagcaggacacagcagcaatccacagcaggcatacaaccgcacaccgagtaaccacccttgcccccaattatgcatttgtgagttttgatcattgtttaataaacttagaagctgctgtacttgttctagccacctcaaattcctggctctgccctcaggtctccgctcctccagccagagaaggtcacctgactgccaagaataaagcttag

SEQ ID NO: 27566 - DNA, 588 bp, Homo sapiens
  SIMILAR (454)..(561): 501254mologous to Hordeum bulbosum chitinase,accession number AJ400135,Smith-Waterman Score=79.
tcaacattttccttgcagcatcagaacgtgatgtaactctgtgtattcatgtatttcaaacttgtgaagaggaccggtgccatatctgtgccgtgacttaaaagcacgacctgtttcctcaacaagctggtttccttcaatgtttgctttctcacagtggtaccgatttctgctctttccatttccaaaagtatcgctaatttgccagattgccttccccaagctccagaatgtgaaaaatgccatccttgccatagtgacgtcaccaggacattgctggttgcccttatgggctccagctgggcttctagttacaccagtcatgcactctaaatcaagcatgttgtcttccttgggatttgcagcctcttgaccccgaaccccatctaccaacaatgacagtccacaggaacttgcagtgttccgtaagtgttccttaagacaaatctgggcgccgccgaagccgctcagacgcgagggcgcggccgctggcgggcggggagcggggaggcgggacccggcgcgacggggctgccccgccccccgatgatgcggcggccgccgactcgcccccacgctgtcactcat

SEQ ID NO: 27567 - DNA, 795 bp, Homo sapiens; identical to SEQ ID NO: 9749
  SIMILAR (1)..(237): 1001254mologous to Homo sapiens Human laminin A chain,accession number W50892,Smith-Waterman Score=474.

SEQ ID NO: 27568 - DNA, 698 bp, Homo sapiens
  SIMILAR (77)..(127): 881254mologous to Homo sapiens fatty acid binding protein homologue,accession number M94856,Smith-Waterman Score=76.
  misc_feature (1)...(698): n = a,t,c or g
agcttgatccggctgcaggaattcggcacgagccgacgcagacccctctctgcacgccagcccgcccgcacccaccatggccacagttcagctgctggaaggaagatggcgcctggtggacagccaaaggctttgatgaatacatgaaggagcctaggagtgggaatagctttgcgaaaaatgggccgcaatgcccaagcccagattgtatcatcacttgtgatggtaaaaacctcacccataaaaactgagagcactttgaaaacaacacagttttcttgtaccctgggagagaagtttgaagaaaccacagctgatggcagaaaaactcagactgtctgcaactttacagatggtgcattggttcagcatcaggagtgggatgggaaggaaagcacaataacaagaaaattgaaagatgggaaattagtggtggagtgtgtcatgaacaatgtcacctgtactcggatctatgaaaaagtagaataaaaattccatcatcactttggacaggagttaattaagagaatgaccaagctcagttcaatgagcaaatctccatactgtttctttcnnnnnnnnnncattactgggttcaattatctttatcataaacattttacatgcagctatttcaaagggtgttggattaattaggatcatccctttggttaataaataaatgtgtttgtgctaat

SEQ ID NO: 27569 - DNA, 2162 bp, Homo sapiens
  SIMILAR (1533)..(1802): 481254mologous to Homo sapiens fatty acid binding protein homologue,accession number M94856,Smith-Waterman Score=223.
tttcctttttttttcagaatacaaggcaaagttgctttctttcagagataaacaaatggaaatacatagatctcttcttaaaagggctcttcctgtcctagtacatacaccatattgtactatgattttgttgttcgtttctccattttcattacttctttggatactactgagtttaaagttaaacactttctgtagtagtccattttcatactgctataaagaactgcctgagaataggcaggaagaggtttaattgactcacagttctgaatggctggggagacctcaggaaacttacaatcatggcagaaggcaaaggagaagcaagtaccttcttcacaaggcagtagggagagagaggggaaaagggggaagccccaggacacttacccaaaaaaccagatctcatgagaactccctcactatcatgcaaacagcatgggggaaactgcccctatgattcagtcacctcccatcaggtccctcccttgacacatggggattacaattggagatgagatttgggtggagacacagagtcaaacccatatcattcctacccctggcccctcccaaaatctcatgtccttctcacatttcaaaaccaaatacgccttcccaacagaaccccaatgtcttaattcgttccaacattaactcaaaagtctacagtccaaagtctcatcctagacaaaacaagttccttccacttacaagcctgtaaaatcaaaagcaagttagttacttcctagatacaatggggggtacaggtattgggtaaatacagctgttccaaatgagagaaattggccaaaacaaaggggctacaggtctcacacaagtctgaaatgcagtgagacagccaaatatttaaagctccaaatttgatctcctttgactccaggtcttacatccagatttgtcttaaggaacacttacggaacactgcaagttcctgtggactgtcattgttggtagatggggttcggggtcaagaggctgcaaatcccaagaaattggtgcttcttgaagaaatggctgattctggatctggagaaggaaatgaaaaagatgaacctagaacatcttgccatatcagtacttttggaaatggaaagagcagaaatcggtaccactgtgagaaagcaaacattgaaggaaaccagcttgttgaggaaacaggtcgtgcttttaagtcacggcacagatatggcaccggtcctcttcacaagtttgaaatacatgaatacacagagttacatcacctccatggcagccttgaaaaccaacagcctcacatccatggaaactatgaacatcagcagcttaccagtcactggaagttgaacacagatttgaagctctttgagaagccctgtacccaaagaaatgtcattttgacttgtcttgaaatccctcttcttccatctctgtgcaattgtagaagagaaagaagctatggagagatgggtagggggtgggatgtaaccacccttgcccccaattatgcatttgtgagttttgatcattgtttaataaacttagaagctgctgtacttgttctagccacctcaaattcctggctctgccctcaggtctccgctcctccagccagagaagaaagggaagaaaggaaagggaaacggactcaagggaaacggactcaagatggatcattggttcagcatcaggagtgggatgggaagaaaagcacaataacaagaaaattgaaagatgggaaattcatggtagactgtgtcatgaacaatgtcacctgttctcagatctataaaaaaatttgtcttaaggaacacttacggaacactgcaagttcctgtggactgtcattgttggtagatggggttcggggtcaagaggctgcaaatcccaagttcctaacgggttacacgtctacagcccaggggatggggacacctgtcttagttcatctggactgcagtaacaaaataccatacactgagtggcttataagtaacagaaatttggaggatgggaagttcaggatcaaggcaccagcagatttagtgtctagtaaagacttgcttccacctagacagccatcttcttcctgtgtcctcacagggtggaagggtctctctcaagcctcttttataaaggcactcatcccaccttcatga

SEQ ID NO: 27570 - DNA, 787 bp, Homo sapiens
  SIMILAR (430)..(555): 771254mologous to Homo sapiens PRK1-associated protein AWP1,accession number AJ251095,Smith-Waterman Score=188.
  misc_feature (1)...(787): n = a,t,c or g
gttcacatctccatgggaggttagcagagaaaagcaaatatcgaagctgtgttctttgttaacagttccttcagaggtattatttgatctttcttaaataaatgccaagactgccttctgacagtaggcttattctcacatcgtagtgtttggatttgaaaaatgttttacattttcaacctagcaactgtgtttttgttaagaagtaattgttgccatatcacaggtgaagaaacaagctcagaggactttctctagggcaaacctgcgtttgtagataggaataagaaatgaagctctcaggtagtgaataagaatgtagtttgtgagacagtgtatttagaatgattctttagtctacattgctgccctaaatatattgtgctgttcagtattaattatgccaaagaccttaatatttcatccttcaactcatgtatgtgtattactccatttccagggtttgaatgccggtgtggaaatgtttactgtggtgtacaccgttactcagatgtacacaattgctcttacaattacaaagcagatgctcaagaattttgtattccagcaggagttcaaatcttttggatcttttcaccaacaactactggaatacaaaattcttgagcatctgcaaactaaaaattgacttgaggnnnnnnnnnnnctagccattgggaatgtagagcagtgtatcttgcatgtcatcggaagaatagatttttgttttggttttgttttgaaaatgactctgaacatttatttccattgcaatttctgtggctga

SEQ ID NO: 27571 - DNA, 1388 bp, Homo sapiens
  SIMILAR (260)..(631): 781254mologous to Homo sapiens 21-MAY-1997 Human UCSP-2 cDNA,accession number X78444_cd1,Smith-Waterman Score=452.
atggctcaagaaactaatcacagccaagtgcctatgctttgttccactggctgtggattttatggaaaccctcgtacaaatggcatgtgttcagtatgctataaagaacatcttcaaagacagaatagtagtaatggtagaataagcccacctgcaacctctgtcagtagtctgtctgaatctttaccagttcaatgcacagatggcagtgtgccagaagcccagtcagcattagactctacatcttcatctatgcagcccagcccttgtatcaaatcagtcacttttatcagaatctgtagcatcttctcaattggacagtacatctgtggacaaagcagtacctgaaacagaagatgtgcaggcttcagtatcagacacagcacagcagccatctgaagagcaaagcaagtctcttgaaaaaccgaaacaaaaaaagaatcgctgtttcatgtgcaggaagaaagtgggacttactgggtttgaatgccggtgtggaaatgtttcctgtgaaagtacaccgttactcagatgtacacaattgctcttacaattacaaagccgatgctgctgaggaaaatcagaaaaggaaaatccagtagttgttggtgaaaagatccaaaagatttgaactcctgctggaatacaaaattcttgagcatctgcaaacttaaaaattggacttgaggttttttttttcctagtcattgggaatgtagagcagtgtatcttgcatgtcatcggaagaatagatttttcgttttggttttgttttgaaaatggactctgaacatttatttccattgcaatttctgtggctgaggagacttaaactttacaagtattatccttttaagatcattttaattttagttgagtgcagagggcttttataacaaaccgtgcagaaattttggagggctgtgatttttccagtattaaacatgcatgcattaatcttgcagtttattttctcattgtgtatgtatatatcgcttttctctgcagcacgatttctcttttgataatgccctttagggcacaactagttatcagtaactgaatgtatcttaatcattatggctgcttctgttttttcattaacaaaggttattcatatgttagcatatagtttctttgcacccactatttatgtctgaatcatttgtcacaagagagtgtgtgcctgatgagattgtaagtttgtgtgtttaaacttttttttgagcgagggaagaaaaagctgtatgcatttcattgctgtctacaggtttctttcagattatgttcatgggtttgtgtgtatacaatatgaagaatgatctgaagtaattgtgctgtatttatgtttattcaccagtctttgattaaataaaaaggaaaaccag

SEQ ID NO: 27572 - DNA, 1092 bp, Homo sapiens
  SIMILAR (382)..(684): 921254mologous to Homo sapiens Keratinocyte peptidoglycan recognition protein-like protein,accession number Y96962,Smith- Waterman Score=478.
atggaaaatgccagaagcttcctggtgggccaggatggtggcgtgtatgaaggggttggatggcacatccaaggctctcacacttatggattcaacgatattgccctaggaattgccttcatcggctactttgtagaaaagcctccaaatgctgcagcgctggaggcggcccaggacctgatccagtgtgccgtggttgaggggtacctgactccaaactacctgctgatgggccacagtgacgtgaatatcaaagataaagctgtcattgatgaaatattccaaggcctggatgctaatcaagatgaacagggcgactttcaagaattcatatccctggtagccattgcgctgaaggctgcccattaccacacccacaaagacttcctggttggggatgatggcagggtgtatgaaggtgttggctggaacatccaaggcttgcacacccagggctacaacaacatttccctgggcatcgccttctttggcaataagataagcagcagtcccagccctgctgccttatcagctgcagagggtctgatctcctatgccatccagaagggtcacctgtcgcccaggtatattcagccacttcttctgaaagaagagacctgcctggaccctcaacatccagtgatgcccaggaaggccaaatatgtcatcatcatccacaccgctggcacaagctgcactgtatccacagactgccagactgtcgtccgaaacatacagtcctttcacatggacacacggaacttttgtgacattggatatcaacgcttaggtggccccagcagtgtgccaggccctgtactggcccaggagacggagcgaggggagcaggtgcagccctcggggagtccaagccggcagggagaaggcacgcgggcagcaaagaggcactacgaggccggggccgagtccatgggcgcttgcggtctgggcacaatctgcaccaattttccccaggcagctgcggttgatgcccacgaaggcacatccttcctgccacagtcaaacaggagtaacagacagcaacaatcacacgcctcacccgatgccagtggaatggttcttcaatgctga

SEQ ID NO: 27573 - DNA, 471 bp, Homo sapiens
  SIMILAR (50)..(334): 541254mologous to Homo sapiens 26-DEC-1995 Human chemotactic cytokine I DNA,accession number T85774_cd1,Smith-Waterman Score= 199.
tgtagctccacattcctgtgcattgaggggttaacattaggctgggaagatgacaaaacttgaagagcatctggagggaattgtcaatatctccccccaataatcagttcggaaggggcattttgacaccctctctaaagggtgagctgaagcagctgcttacaaaggagcttgcaaacacccatcaagaatatcaaagataaagctgtcattgatgaaatattcccaaggccctggatgctaatcaagatgaacacggtcgactttcaagaattcatatcccctggtagccattgcgctgaaggctgcccattaccacacccacaaagagtaggtagctctctgaaggctttttacccagcaatgtcctcaacgagggtcttttctttccctcaccaaaacccagccttgcccgtgggggagtaagagttaataaacacactcacgaaaaaaaaaaaaaaaagaagatct

SEQ ID NO: 27574 - DNA, 522 bp, Homo sapiens
  SIMILAR (406)..(519): 921254mologous to Homo sapiens My016 protein,accession number AF060511,Smith-Waterman Score=192.
atgttgaaagtgaccttgggctttcataaaccaggagattataaaaatggatcttcgttctacaagagaagttctgaaaaactccttgcacatctcaggctattcttcatttctgcacttcatgaaggaacagagtgttccctgggaactctgggtagccttgtggagaatgagcttccctgggctgcttgtccttatgctacaggtcagaaatacaaagcattgcctgaattgccgatgtcacttgatggtcagtcagtaaaaaaaaaaaggctggactaccgccagggaactcagcgccaattacctccaggagaagctgcagcgggacctggaggcggagcatgtggaggtggaggacacgaccttcaacctgtagcttccgagtcctggtggtgtcagctgctgcttcagagacaccagctggtgaatgcgtgcctagcagaagagctcccacacatccatgcctttgaacagaaaaccctgaccccagagcagtgggcccgtgagcagcagaaatga

SEQ ID NO: 27575 - DNA, 434 bp, Homo sapiens
  SIMILAR (136)..(312): 901254mologous to Homo sapiens My016 protein,accession number AF060511,Smith-Waterman Score=275.
  misc_feature (1)...(434): n = a,t,c or g
agtggctcctgtaaggcatctaggtagcgtggccggcgccccgagctggggttgtgtccctgctgggctgccgttccagctggactgccgccatggaactcagcgccgaatacctccgcgagaagctgcagcgggacctggaggcggagcatgtgcttccgagtcctggtggtgtcggccaagttcgaggggaaaccgctgcttcagagacacaggctggtgaacgcgtgcctagcagaagagctcccgcacatccatgcctttgaacagaaaaccctgaccccagaccagtgggcacgtgagcggcaggaatgagggactgggatctgcacagccattaaattataaatctggaccnnnnnnnnnnnnnnnnngggggggccgttttaaaggatccttgggggggcccaagtttacccgtgcttgcaacgttt

SEQ ID NO: 27576 - DNA, 628 bp, Homo sapiens
  SIMILAR (454)..(627): 961254mologous to Homo sapiens DC49,accession number AF271775,Smith-Waterman Score=277.
ggaattcgccggcgcccgagctggggttgtgtccctgctgggctgccgttctagctggactgccgccatggaactcagcgccgaatacctccgcgagaagctgcagcgggacctggaggcggagcatgtggtgagttgagccgccggacaaggggaaaagagctcggggggcgggttcggcaccattcatattcttccgctcggtaggaggtggaggacacgaccctcaaccgttgctcctgtagcttccgagtcctggtggtgtcggccaagttcgaggggaaaccgctgctttcagagacacaggttctgtacagagtaatgagatgtgtgacggctgcaaaccaggtgtttttttctgaggctgtgttgacagctgctaaagagcgtggcatagtcttgcccctcaggtgtgtatcctagcacagactatacattgtgacatgggcatgtacatatggattataccaactggagaattggcagacttgcggcaccaattatatcatctcagtcttgaatttactcacgctgattgttgaacagataaatacgaaactgccatcatcatttgtagaaaaactgtttataccatcatctaaactactattcttgcgttatcataaaa

SEQ ID NO: 27577 - DNA, 947 bp, Homo sapiens
  SIMILAR (778)..(888): 911254mologous to Homo sapiens My016 protein,accession number AF060511,Smith-Waterman Score=183.
gcacgagcgtgcccctctcctgtttggaggcgggtgtagaattccgaccgcggaagccagactgctgtccagtcggcgagcgcgtaccattcagcatcggctccgcccgagtcccacctttctcaggctctgattggctgacacatggcaagcgcgaaaagcctggaccgctggaaagcccggttgcttgagggcggaagtactgccgtgacgtacgccttagtaagggcggaagtgagttttccagcggaagtggctcctgtaaggcagcaaaggtagcgtggccggcgcccgagcttgggttgtgtccctgctgggctgccgttccaggtggactgccgccatggaacttcagcgccgaatacctccgcgagaagctgcagcgggaccttggaggcggagcatgtggaggtggaggacacgacccctcaaccgttgctcctgtagcttccgagtcctggtggtgtcggccaagttcgaggggaaaccgctgctttcagagacacaggtaaggccctgggagcaccttgcctagctcctgtaccacaaccccagccactccccctacccctgcaacctgactcccgcactccccctggcgtggctcagggaccttgaggatcccgccttcgtgacccctgcttcgagtatttcgatgtaaaccctctctccaagtacgtgttcccacggcctggggactacaaccttggtgacaccagtctaatgaatcaccctagcctcggggtgtgcgatcaccgctggccttttcctaaccccatctctcgccccaggctggtgaacgcgtgcctagcagaagagctcccgcacatccatgcctttgaacagaaaaccctgaccccagaccagtgggcacgtgagcgacagaaatgagggactgggatctgcacagccattaaattataaatctggaaaaaaaaaaaaaaaaa

SEQ ID NO: 27578 - DNA, 404 bp, Homo sapiens; identical to SEQ ID NO: 12906
  SIMILAR (97)..(123): 881254mologous to Homo sapiens calbindin D28K,accession number S46006,Smith-Waterman Score=40.
  misc_feature (1)...(404): n = a,t,c or g

SEQ ID NO: 27579 - DNA, 990 bp, Homo sapiens
  SIMILAR (990)..(874): 821254mologous to Homo sapiens Human secreted protein, SEQ ID NO: 6532,accession number G02451,Smith-Waterman Score=168.
ttacataggagggcaggtctgggcagccagtgggagagcagctgccagcatctggctggctggtggggctgcttctgaggcaggactcagcttcaggcctgaggatttccagccagtgtccctccactcaggacctgggtgatcacagttgagggtgtggcccacgttccaaagggctacctgagtgctgcctggctgctgccccagtgaagtggtgaagcgctgccaccacccctctgttcccatcgcccaacgaagcctccttcccccaacaagagctccttgttcactgctgtgactctcagctctgccctctgggccctctagctgcatatagagaatgggttgtactgatctaggataaaagccaggaaactgggtgggatgcttgtgtaggccaataggagatggcttaacctgtcttcggtgaccctgctcaaaatctttctcccaccagctcttgaaaggggaagtgcggccaagcatgtgaccctggatagggcctcctgacattcgatctttgttcattttgccacttgatgcccacgacacagcgaggcacttggaatgtgacaggtagatgctgtgtgagtcatgtgctgggatcagctgcagcttttctgaaggcagtctggcagccactcccagagcccctggaactctggcccaaggctctctgactgactccttcccagatcgtctcagcttagcagctgaagactgacactgcctgattgcctcggaagccccctgctcctctctggttgaagcctgaccctcccacttgccttcctcctccgcacccatccgcttctcactacagtccagcgaagggcagagcttcctttcacatcctggatttgtttcctgagccctgatgatagcttctgttgttgtgcagaagctctttagtttgattagatcccatttgtcaattttggcttttgttgcaattgcttttggtgttttagtcataaagtctttgcccat

SEQ ID NO: 27580 - DNA, 657 bp, Homo sapiens
  SIMILAR (168)..(299): 551254mologous to Homo sapiens calbindin D28K,accession number S46006,Smith-Waterman Score=116.
atcgcccggctgattaattcggcacgagctgacacttaagtcagagcattctgtagctgtattttacagaactgtaattgcacagattgttcctcttacaagagaaatatccagagctctaagaaaacaactgatgaaaacgacatgcgtgacatttggtgctgaagacccaggtcagagagactcctttgggggaccagtccgctgtccttgccctcactctgtgaggagacccacctacgacctcgggtcctcagaccaaccagctcaaggaacatctcaccaatttcaaatcgggaccccactggaaaatggactgtccaactcacccggcagccacttccagagcccctggaactctggcccaaggctctccgactgactccttcccagatcttctcggcttagcagctgaagactgacgctgcccgatcgcctcggaagcctgacacttatactttctgctcccccggctccttcagttgtacccactctttgttgagtcccacaattaccattgttctcggcccggacttcaatccggtctcccacattattccagataccacacctgaccctcatgactgcatctctctgatccacctgacgttcaccccatttccccacatttccttcttccctgtttctcaccctcat

SEQ ID NO: 27581 - DNA, 894 bp, Homo sapiens; identical to SEQ ID NO: 23925
  SIMILAR (284)..(451): 471254mologous to Homo sapiens Human secreted protein, SEQ ID NO: 7678,accession number G03597,Smith-Waterman Score=110.

SEQ ID NO: 27582 - DNA, 1699 bp, Homo sapiens
  SIMILAR (540)..(1): 881254mologous to Homo sapiens Amino acid sequence of a human tissue repair protein,accession number B07448,Smith-Waterman Score =814.
ctgtgtgcggttgaatgccactcttgcaaagacagcttgggacacactggccctcttcagctcatctctgacttgctggtagatatctggagagacttccacggaagagttggttggctctggcttaactgctctggggatgggtggatggttcaggaactgctggttgatggcttgaggatgctggtgagccaggagccggctaacggcaatctgttggtttatcagatgggccatggctatttgttgccttacaagttgtggactaagctggggagaaagaagaccagggctcatgatgggctgtaatgcgggcacttggtttcggattggagtactgtggtgaatttggctgtgaggagactgttcgttggttttccccagggatgccagctggttcatatttggtaaatgcattggacgctggcccagaacacaatagtctgaaaggttttctcgttccactctttccactggcagccactcccagagcccctggaactctggcccaaggctctctgactgactccttcccagattttctcagcttagcagctgaagactgacgctgccggatcgcctcggaagcccctagatctgatgatttaataagagggtatttttccttttgctcagcacgtctcctttctgctgccatgcgtagagggatgtgtttgctttcccttctgtcattactgtaagtttcctgaggcttctccaaccagatataacgatttttatcttcacaggattcatctaaagcatttccatttggattatacgctatgcagttctttgtattaaaagtttcaaatgatggaaatctgccatgagaaattatgttccaagagcgaagtagagaaggcacgatgtgtactttttcagaaagaacagcgttgaattgttgaagctgagcgggccctccacactgggtggcattggtggttttgttggtatgcagaacctccattctccatgcttttttgctgcattctgtgcagctgagctctgacaactgtatcacacagtcttcctcaccctctggcttctgtctgttttcaaccattggaaagcattggtaggagaagagaagctctacctttggaatatcaaatatctggcctagtgtcttttcaatgacaaaaacaagagtaagattatccacttcaataagcaaaaagcagtaatttaatttgatgtgatttttaagaaaatctttgtttcctctgaggaactggtatgttgtctctccagaattcaggagaaatgtgtaattgaccagaccagaggtccccaagccccaggccacagaccggtactgtggcctgttaggaaccctgtagctgccagtggggtggttgccctccacttgcaagggcaaagggccagtgtgacagcctccacctgcacttagtgggtcccaagcttttgtccagcgtccaagaagaatgaggtcacacttgacaactgaagaatggtaagagtggagaattttattgagcgatgaaaacagttctagagtctccactggagcactgcctagtcgagctctgagaagagggccaccattctccaaaccccagaatggtgatccattgacagtttgcaacatgtgcttgggaaagctgcagccactaagcacagccaggagtggggctgtaccctgcaaagccacaggggcagagattcccaaggccat

SEQ ID NO: 27583 - DNA, 952 bp, Homo sapiens
  SIMILAR (715)..(939): 701254mologous to Homo sapiens neutral protease large subunit,accession number M27826,Smith-Waterman Score=246.
aaggcggaggtttcagtgaccgagatcgcaccatcgcactccagcctgggcaacaaatatggatgtggggaataggcaagcaggtaggtggatgtggctggctgcgtggaaagaacagggtggtgggggcagccaaggatcaatcaggcactggtgagaagttctacttcatcccgaaggcaatgggagccatggagggctctggacagaggagaacattgccagacccaggtgctcacaggaacccttctgggggctacagcgcaacagattgtgaagggagccggcctgcaccaggtgaaataaacagccatgcttctcacacaaagcctgtttggtggttcttcacacagacgcgcatgaaatttggtgccgtgactcggatcgggggcctcccttgggaggtcaatcccctgtcctcctgctctttgctccgtgagaaagatccacctacgacctcaggtcctcagaccgaccagcccaaggaacatctcaccaattttaaatccggagcttgctacacttgctggaaatctggccactgggccaaggaatgcccgcagcccgggattcctcctaagccgcgtcccgtctgtgtgggaccccactgaaaatcggactgttcaactcacctggcagccactcccagagcccctggaactctggcccaaggctctctgactgactccttcccagatcttctcggcttaacggctgaagactgaaactgcccgattgccttggaagccccctagaccattcacggacgccgagcttcgcgtaactctcacagcggaaggtaagcctgtccccttcttaatcaatacggaggctacccactccacgttaccttcttttcaagggcctgtttcctttgccttcataactgttgtgggtgttgacggccaggcttctaaacctcttaaaactccccaactcgaattccaacaga

SEQ ID NO: 27584 - DNA, 5307 bp, Homo sapiens
  SIMILAR (5302)..(3590): 1001254mologous to Homo sapiens KIAA0962 protein,accession number AB023179,Smith-Waterman Score=2970.
ttcgcggccgcgtcgacttttttatcagacattaaaatagtttatttctttttccattctgtaatcttaaaataacatcagcttcagtgcctgttcacaatacaaaaaaagtcaaaaaacaaaaacaacacccaaaacataaaaaagaaacaatttgccaaataagttatttgttcctaagagtatcaaaagtgcaaaatattcaccttcttttcagatctctccccaagcataattaccctccttgaacaaactgaacagacagattcagcagctgccacactgcacttgtttttaggggacaatgtcaggacaggtgggatgtgaactacagttcctctgtaaagatgtttggggcatcaggcttttaaaggaattctaggttaacaaaacaggtctgagtatgtgcttccaatctctattcccaaacaaaggaaatcactaaaaaaacagatcacacttctttttataacagaaaaatatttatgtaatgatggcagctgcaaattgattgggatgttaataaataaaaaggaacaagtatccacaagctgcaaatgaggaagaaaccaacctacctgaaaactacaaccaaattctcatggctaataagtgatggcagtgagaccatggcccctaatggaagttagggcagcctcacccactgaaatgttgtttagttggagctgatagcctcagtgttagataaaaattgtgcaacacctgagcaacaaatttttttttttttttggaaattggcatgtattctgcaaagacttgttttaggccagttttaccccatctgctaaacgcaatgcatagtctgtatcaaccagaagaacccatctctaaaaacatcaatgttgatagtcaaagaccactgtgttagaaccaaaatcaggtcttgtatgattacatacatcagacagagcaatggtggcacaggctgagcatgacaatggctcatatgtttgacgcaaaagtaaacaaattcatggatgcattcaggaggaatgccttgcatggacaagggtaaagttcaatttaaaataaaagctccctaatattctcatagggcaccagctctaaaccggtctgtagaagagcttttgggctgaaacatctgccaggaacattgccaatcccatcactaccttcatttcctagtgcaaatggaaggtgcagctgtttgaaggtgctttttaaaagatcaaaagatgacttgaagagataaaaatgtttaaaaatgaacaaatctggcatggtggctcatattgataatcccagcactttgggaggccaaggtggaaggactgcttgaggccaggagtttgggaccagcctgggcaacatagcaagacctcgtctctattaaaaaaaatataaataaatacacttggagagtttttggttttcagaaattaaagtcaggaatttcattagtacagaaattaaaaataaaaacctactaccaaaccaaaagaccactcatataagcaatctggccataaaatacctagaaagtaatattgaggactgatgtatcaaggagccaaatgaattccttgaccatttctagttggaccaggtgccatgagatacagcattcagaggaagtgtccatttttagaggatcatatggaagaatgaagcctggcagtgatttattttttaataaagctacagactccatgaaaactacaggaattcctggccttaaataatttattacttaccaatgtagctcaagatttaaattattcaggatccaagtggcttagtttaaagcattaagattaaagaaatactaacttagccgggagtggtggctcacgcctgtaatcccagcagcactttgggaggctgaggcaggcagatcacctgaggtcaggagttcatgaccagcctgatcaacatggagaaatcccgtctctactaaaaatacaaaattagccgggctaattacatggtggcacatgcctgtaatcctagctactcaggaggctgaggcaggagaatcacttgaacctgggatgtggaggttgcggtgaaccgagatcgcaccatttcactccagcctgggcaacaagagtgaaactctgtctcaacaactaaaaaaaaaaaaaaaaaaagaaatacttagtaaatgtcccatcactgattttcacccttcacaaagccaccaaaggcaccttgctttgacatttgaacggaccactctttgaagctgtccaaactcaaactcagaaccactggtcattctgccctgaaaaataaaaggtatgctctctaactggctggtatgaggcaccctggggtccactatacctggagctcagcacgctcaggtgctgatggccagtctgaccccaatactggtgaagcagctctaagttaagagtgaaaacaatgaagatgagacatcaaaatacagcccagaagtggaaagtaagccttttgcaaaatgggagtctagaacaaatcttggctcacttcctgcaaaagatgacttgaagagacagcacttttagggtaacagtgttcaaaatacaattgttgagaaattttaagttccttgatacaaagacatgtttggtattttactaaagagacactattgaagagattccttaagcctgactcatagcaggtgggaataatttctcttcagtttaacatctactggctttatagcagcttatctctacgttcagagaacaagattacaagttatggctcctaatatccataccctaaaatcgacagaggcagaaaggcatctgaagacatacatgtcaacggctcaaagtcatcacagtacttctcgctgtgcagacccctcccctggctaccagcagcgctggggcggcggatgggatgctcacagcgtgtctcaaggctgcatcgcttcagccactgctcagcctccctttccttttcttgagaactcacatgcagaactcccgtttattcctttccttttcaacctgtggccaacaaactgttgttgggggatacccccaaaatatacatttagccacttactcccagaacaaccagtaaacgtgagattgcttggaaaggggcctttttccagatgcggggctagaagctgccgtgggttgttcagagttaggagcatgcgccatggcagcagcacagcagggccgggattggggaaggggccaatgacctggcctgcacgacaggctcatgagggtccgccagatgccgcttgcagggtggagccctgtgcttctccaagacacaggacaggagggtggggtgagcatgggacaaggacaagaaaggaagaggggatgagcagtctattttcaatggtgtggcattcagtggggaaaaataacacccagaggaaaagattttcatctaggcgattcaaactggtggtgtttttcattcctaggttagaacaggacaaaggaaagattcttctagccatggttctagaagagcaatctaaaatctatactctgttcattgtggtagtttgagtcctgaaaatacctgttcacaggggcatgttaaaaagtctgaagagttcaaatctctttggaaaatcctctcagtctagttcaggccatgatgggatataaaacctctgtaaggagccctccagcaggcgttccatccataaagagagcttgctcaactttcctttgatgggcctggatccaaggccacaggaaggtttccctcgagattcacccaggtagagggaagagtcaacatcactgcacgaccctatggcttcctcctcttcgactgtcttttggggcttgaagaggcagaagtatttcttgtggccattcagagccagtacataaccagtgtagtcacgctccatgaaatgcttatcatattggtttgggattggagctgcatcttgagcaaattctagtaagtattctagccattctctgtgtttatctagactcaggaaggagaagtgtaggcagctgctcccagtaaatgtgtagacctccaaagcaaatttctgtagtaggctggtcttggtagaattcgacaggatgaggaccacattcatgtggcctggcctcagacgtaccaagttactggtgtatgttacatctgtgagttcagttacctccacaaagccttttttaggaatcttgctgctgttttctttggtgaagcttggctcagttttcccagtcttctcttgggcttcctctttttctggagggcttgactctcgctcatcattagagtcgctgaaagcctgaacgatgacagtgccgaagaggatgaagagggcagagaagatcagggacagcaggggcatcatttccctccagttgttgtgaaaaatgctatcccagcagtctgagatgtagtcagaagcagagtagaaccatcgaaggagaaaaacaggggcaagttcatcggtcaggtcaggaagcactgcttcagaggacagaagagctggatctttacgcagctggtcgagatagcccaagaggataaatttgtcactctcactcccaatccaagggtcttccagggttttatacaccacccttcctgctgtgttgcgcctttctaaaatagacaccgctgatttcccttgaaacgcctcactgtctggtagtaaggtgtcggcaaactcctgctgccgattgctgtagacatgcacaaatctcactgtgtcttgagtgtttgccagggcaaaggacaggaaagcctcaaagggtttgctcaacttggtagtctcagcagtcaataaaaccacacagtacttcctctgtcgatgcgaccgtttcacagggcagagttcatggaacaacttctggctggtgagcctggctgccaatagatatttgtttcgggtgatgaagtcgtcaatgatttgcttcttcatacctcgggcctggataacatcggcaggcctgtttatatgttctttaaagaccaagagggtaggggcgtagatattgatgttgtaccgccttgtcatctcttccgtccctctcaaacccacatatacatatccaaatgataaataatctttgtatgcaaaggcagtcaacttgtataacagtggcacaatgggcgtttggtcaaacagaaggacatgaggcttattctcttgctgccagccagagaggaatctgacgtaatttttatttgtaactttctccaccaagttccctggaagaagactttctacaaattgtcgcagattttcacggacaactgcattgtggaagaaggagattttcccgttaatgattcctaggatagagggcgtgctgtgtgccctag

SEQ ID NO: 27585 - DNA, 300 bp, Homo sapiens
  SIMILAR (22)..(267): 781254mologous to Homo sapiens Human secreted protein, SEQ ID NO: 5523,accession number G01442,Smith-Waterman Score=311.
atgaaagccttctgttgtttcatgatcaacatgggagactcccacgtggacaccagctccaccgtgtccgaggcggtggccgaagaagtatctcttttcagcatgacggacatgattctgttttcgctcatcgtgggtctcctaacctactggttcctcttcagaaagaaaaaagaagaagtccccgagttcaccaaaattcagacattgaagcactgcgaaaatgacaccagtttacagattaagaaccgggggctcaagaatgttaacgggcctgccagggtcattagccagcaatag

SEQ ID NO: 27586 - DNA, 420 bp, Homo sapiens
  SIMILAR (23)..(247): 351254mologous to Homo sapiens Fragment of human secreted protein encoded by gene 66,accession number Y41480,Smith-Waterman Score=91.
tttcgtcgcttgggtactggctgggtccgatgctgggtacgctgcgcgccatggagggcgaggacgtggaagacgaccagctgctgcagaagctcagggccagtcgccgccgcttccagaggcgcatgcagcggctgatagagaagtacaaccagcccttcgaggacaccccggtggtgcaaatggccacgctgacctacgagacgccacagggattgagaatttggggtggaagactaataaaggaaagaaacaaaggagagatccaggactcctccatgaagcccgcggacaggacagatgactccgtgcaagctgcagcctggggtcctgagcttccctcgcaccgcacagtcctgggagccgcctgcagtgcctcaaagccctttgaaaaatgaattaagaaggaaatacttgacc

SEQ ID NO: 27587 - DNA, 2523 bp, Homo sapiens
  SIMILAR (2044)..(2181): 421254mologous to Saimiriine herpesvirus 2 StpC484,accession number X99519,Smith-Waterman Score=81.
tgggtccgatgctgagtacgctgcgcgccatggagggcgaggacgtggaagacgaccagctgctgcagaagctcagggccagtcgccgccgcttccagaggcgcatgcagcggctgatagagaagtacaaccagcccttcgaggacaccccggtggtgcaaatggccacgctgacctacgagacgccacagggattgagaatttggggtggaagactaataaaggaaagaaacaaaggagagatccaggactcctccatgaagcccgcggacaggacagatggctccgtgcaagctgcagcctggggtcctgagcttccctcgcaccgcacagtcctgggagccgattcaaaaagcggggaggtcgatgccacgtcagaccaggaagagtcagttgcttgggccttagcacctgcagtgcctcaaagccctttgaaaaatggaattaagaaggaaatacttgacccaagtgggatatactgctacaaggtgccgagtatttttgagtgtgcaggtaacagagctgggaagtgatgtacgtgtgactccgctgccttcactggcctcacctgccgtgcctgcccccggatactgcagtcgtatctccggaaagagtcctggtgacccagcgaaaccagcttcatctcccagagaatgggatcctttgcatccttcctccacagacatggccttagtacctagaaatgacagcctctccctacaagagaccagtagcagcagcttcttaagcagccagccctttgaagatgatgacatttgcaatgtgaccatcagtgacctgtacgcagggatgctgcactccatgagccggctgttgagcacaaagccatcaagcatcatctccaccaaaacgttcatcatgcaaaactggaactccaggaggaggcacagatataagagcaggatgaacaaaacatattgcaaaggagcccagacgttctcagaggagctccaaggagaacttcataccctgctctgagcctgtgaaagggacaggggcattaagagattgcaagaacgtattagatgtttcttgccgtaagacaggtttaaaattggaaaaagcttttcttgaagtcaacagaccccaaatccataagttagatccaagttggaaggagcgcaaagtgacaccctcgaagtattcttccttgatttacttcgactccagtgcaacatataatcttgatgaggaaaatagatttaggacattaaaatggttaatttctcctgtaaaaataggttgccagggccaccaatacgccagggccatggagagaaccgtcagagggagattgaaatccgatttgatcaggttcatcgggaataatgcatgagtcccaggagccagcctcgccggatgtgcctgccggactcctgggccatgaacatgtacagagggggtcctgcgagtcctggtggccttcagggcttagaaacccgcaggctgagtttaccttccagcaaagcaaaagcaaaaagtttaagtggaggctttttaaaacctaggcaaaagatctctggaagcagggaggtgcctgcccaagagcgattcatcttcatcacttccaaagaccaaccccacacacagcgcaactcgcccgcagcagacatctgaccttcacgttcagggaaatagttgtggaatatttagaaagtcagtgtcacccagcaaaactctttcagtcccagataaagaagtgccaggccacggaaggaatcgttacgatgaaattaaagaagaatttgacaagcttcatcaaaagtattgcctcaaatctcctggggcagatgacagtgcctttatgtattgggagtgtctacagataaagcaagtatgggaagtttcgatatcaaacagaaggcttcttaggaaaattaaatccagaccctcacttccagggggtccagaagttgccatcatcacccctggggtgcaagaaaaagtctactgggctcaactggcaattgaggctccttccatctacatgtgtttgctcgtgccatcacgaagggatggcacgaggggaaccatcagttcccctgcaaaaagacccaggctatccagaaacccccaggggctcccggaccgccagggccaattcccctgggtgcctccagatggggtggacaacacccgtcagacccgggagacccagggcagctccttcacagccccaactcatgaagagagaggagagaacacgtccttacaggatggaagagaaaagtgatttccatgcctagaaaaattggaaacctaaaagtgtgtagcctaggttatttcggagtgttatttatcttccccacttgctctctgtttgtatttttgttttgtttttgattcttgagactgtgaggacttggttgacttctctgcccttaaagtaaatattagtgaaattggttccatcagagataacctcgagttcttggtgtagaaattatgtgaataaagttgctcaattagaatttttagggttctctttgataaaaaaaaaaa

SEQ ID NO: 27588 - DNA, 2205 bp, Homo sapiens
  SIMILAR (249)..(758): 391254mologous to Chlamydomonas reinhardtii vegetative cell wall protein gp1,accession number AF309494,Smith-Waterman Score= 270.
tcagaatcccctctctgggcctctgccaaaccacatcctcgtctccctccaaaatccgatttcatgccccagtgtgccatgacggtcccccaggttgggaccatctggctgcagtgtgcagtttccagacttcctagaaacccgctgtctctcttcttccatgtcccacagacgtgcacatgcatccagcacatctggagtgtctgggagcctccagttataaatctccactttaccatttgtttgggcctctcccgcagcctcgccacgtggtccctgctggccccaatgcaccaggtcacccctcacccctcccgcagcctcgccacgtggtccctgctggccccaatgcaccaggtcacccctcacctctcccgcagcctcgccacgtggtccctgctggccccaatgcaccaggtcacccctcacccctcccgcagcctcgccacgtggtccctgctggccccaatgcaccaggtcacccctcacccctcccgcagcctcgccacgtggtccctgctggccccaatgcaccaggtcacccctcacccctcccgcagcctcgccacgtggtccctgctggccccaatgcaccaggtcacccctcacccctcccgcagcctcgccacgtggtccctgctggccccagcatatcaggtcacccctcacccctcccgcagcctcgccacgtggcccctgctggccctctcgcacccaggtggccttcaccttccactcctgcctggagagcccctcctctgttactttctggcgaattcctccttgcattctcaggtgaatttcatgttttcgcctataggaagtcttcctagaggcttgcaggactgagacaaaagcctttgaatccctcttcctataagaatcatgctgacctaatctggaccaatgctcttttagccaaccatgagttgatcgtctgtcattgatactaggacatttaatgaaaacaaatgaagttctttgagcttcctggacagcatccatttcaagaggaagacaaacaccagcccagccattgtgggctggatggaggggtgagacctgagatacgtcctcgcccctcagggcctcttgcttgtgtgggaagctgtcactggctgcaaccacggccagtggcaatcgctgcgtgtccggcactgggccctgggccacgatatagaagacattcgtgaatgtgtgttcattgactgaatggtggattgcgggtccctgatgaggagccaactcttctgagatgaggacccaagctggggagcaggcttgaggtgtgcggtagaagatcctggctggcaccggtgtcttctgggcagagctgtacacacgggcaagtcttccgatgcccaactcgtccaagttcttcggataagaagtctgaaagaatactccagttcccaaacccacaaactggtatttcttattgttttctgtgattcttttctctggagattgtcccggcagctttgacagagcagttgcagcccaccctccttccttccttcccgtcccgtggctgctgtagtcaaagactcctttcttgaagaatggtgaaaactcacaaatggtatgtttcgagagagtcagtcccactttgttgatgtggaggggagatgttgcggactggagcatcacgctgaaaaagtccctgaggtatttctggaaagtgctatcattgtcattaaaaccagcacgtgaggaatgccctccactgtcccaccgggcaagtctgtctacaccgggcatcttagctgcttgggtcagatgcactgcctttcctaggcctgatggtgctttcgtggggaccagcaggcactggttcttcagagttaaaagttctttacaaacacggggaaggtcctgtttctctgcaaggctcacgctcttcagaggcaagacaacttcccagactgagactctactgcttggtgactggcagttgccaacaagtccccagtgtgtaggcggtgaccagcacaggccctggggagcagcgagccgtggctgccagcggtcagatggtacattttctacatacacagaggaaaaacagcttaattctgttacctctaagtgacttcgtctctcagcaatcacacgttcatccttatttccaaatagtttctttggaggaaattcaagggcagcaagctccttttgttcagcatcatgtttgtgagatccaaccat

SEQ ID NO: 27589 - DNA, 875 bp, Homo sapiens
  SIMILAR (406)..(768): 951254mologous to unidentified cloning vector 29kD protein essential for the replication of mini F plasmid,accession number AB015619,Smith-Waterman Score=597.
atggaggttctagcttcatgggccaccttcactttgggccaaactgagcagcatgtggactggatttctgctggagcagctccccagggacctattgtgaaacaactccctagcccagttcctcctacagagcaacttgagcaggaaaagcccgtgaccatcggctctgctccctcaacacctaacaagctcctacttagccattccaattgccaactccctaggccattaagatcaataacaaatatctctgcatgcttttctcttgaacttgctatagaccacaggggtttcccacacagccctggagctagatcactgtattcaaattctgtctttggtacttaccagctgtgtgacctttgtgacaatctaaaaacttgtcacacttcacatggatctgtcatggcggaaacagcggttatcaatcacaagaaacgtaaaaatagcccgctaatcgtccagtcaaacgacctcactgaggcggcatatagtctctcccgggatcaaaaacgtatgctgtatctgttcgttgaccagatcagaaaatctgatggcaccctacaggaacatgacggtatctgcgagatccatgttgctaaatatgctgaaatattcggattgacctctgcggaagccagtaaggatatacggcaggcattgaagagtttcgcggggaaggaagtggttttttatcgccctgaagaggatgccggcgatgaaaaaggctatgaatcttttccttggtttatcaaacaaatgaatgctaagggagttatcctcaatgcatttgaacgttatcgccttaaaacatgtattgactttaagccttgggctggagaaacaaactatatatcagtgttcaagggcagtgg

SEQ ID NO: 27590 - DNA, 1044 bp, Homo sapiens
  SIMILAR (595)..(990): 971254mologous to Homo sapiens Human secreted protein clone dn721_8 protein sequence SEQ ID NO:6,accession number Y53000,Smith- Waterman Score=719.
gttcttgcccgcctgatgaatgctcatccggagttccgtatggcaatgaaagacggtgagctggtgatatgggatagtgttcacccttgttacaccgttttccatgagcaaactgaaacgttttcatcgctctggagtgaataccacgacgatgtccggcagtttctacacatatattcgcaagatgtggcgtgttacggtgaaaacctggcctatttccctaaagggtttattgagaatatgtttttcgtctcagccaatccctgggtgagtttcaccagttttgatttaaacgtggccaatatggacaacttcttcgcccccgttttcaccatgggcaaatattatacgcaaggcgacaaggtgctgatgccgctggcgattcaggcagaaatgctgggggcaaagacatacaaggaaaagtcacgactcaacacaatcttcaaaaagattgggaagctcaattccatcagcaagctgggaaaaggcaaaatgccgtgcctcatttgtatgaatcaccggaccaacgaaagcattagccttccattccagggcgggggcagatttagcacccgaagtcccctggaacttcagatgcaagagggcgaacacaccatccgcaacattgtggagaaaaccaggcttcctgtgaatgtgactgtgccaagccctccaccgagaaacccatacgacctccacttcatccgtgaggggcaccgctataagtttgtgaacatccagaccaagacggtggtggtttgctgtgtgctgcggaacaacaagatcctccccatgcactttcctttgcacttgactgtccccaagttcagcctcccagaacacctggtgaagggagagagctggcccgaaaccctggtccatcactggctaggtatctgccaagaacagttcgacatcgatgagtattcacgggctgtccgtgatgtgaaaaccgactggaatgaagaatgcaagagccccaagaaaggttcggtgctctggccacaaccacgtgcccaattcgctcaactacgcccgcgatga

SEQ ID NO: 27591 - DNA, 1448 bp, Homo sapiens
  SIMILAR (240)..(884): 841254mologous to Homo sapiens Human secreted protein clone dn721_8 protein sequence SEQ ID NO:6,accession number Y53000,Smith- Waterman Score=975.
tcattgctgtttcatctactgttgctgtgtttgccttgatgctgatcatcacccttgtcagtgtctattgcaccaggaagaaatatcgtgaaaggatgagctcaaatcgaccaaatttgactccgcaaaatcattctgggctgacatccgcgtctactgtagaggatcccctctttaaagtagaggggaaatggaaccatgtcagtcggtcatggcccagtacttacaatgggtaccaggagtaccaggtaaggatccccccaaccgactggaatgaagaatgcaagagccccaagaagggtcggtgctctggccacaaccacgtgcccaattcgctcagctacgcccgcgatgagctcacccagtccttccaccgactctcggtctgtgtgtatggcaacaatctccatggcaacagtgaggtgaaccttcatggttgcagggacctggggggagattgggctccctttcctcatgacatcctgccctatcaggactctggagatagtgggagcgactaccttttcccagaagctagtgaagaatcagcaggcatcccgggaaagtcagaacttccctacgaagagctgtggctggaggaaggcaagcccagccatcagcctctcactcgctctctgagcgagaagaacagatgtgatcagtttagaggttctgtccgatccaaatgtgcgacttctcctcttcccatccctgggactctgggagcagcagtgaagtcttcagatactgccctacctccacctccagtgcctcccaaatctgaagcctgcaacttacacagaacctacatggagatctttaaggtggtaaatgaccaagcagagcccaatcaaatcaatgctctaccaccaaaacgaatggaaaggaaattagaccagaggattgaaaaggagaagtcagcagttgctgctggaggagaatctgatacacagcagagaataaaatacctaggaatccaacttacaagggatgtgaaggacctcttcaaggagaactacaaaccactgctcaaggaaataaaagaggatacaaacaaacggaagaacattccatgctcatgggtaggaagaatcaatatcgtgaaaatggccatactgcccaaggtaatttacagattcaatgccatccccatcaagctaccaatgactttcttcacagaattggaaaaaactactttaaagttcatatggaaccaaaaaagagcccgcatcgccaagtcaatcctaagccaaaagaacaaagctggaggcatcacactacctgacttcaaactatactacaaggctacagtaaccaaaacagcatggtactggtaccaaaacagagatatagatcaatggaacagaacagagccctcagaaataacgccgcatatctacaactatctgatctttgacaaacctgagaaaaacaagcaatggggatag

SEQ ID NO: 27592 - DNA, 4777 bp, Homo sapiens
  SIMILAR (47)..(2143): 991254mologous to Homo sapiens meprin a,accession number X81333,Smith-Waterman Score=3728.
caaccctgaatgtcatagttagctactttcaactggaagctacaacatggatttatggaatctgtcttggtttctgttcttggatgctcttctcgtgatttctggcttggcaactccagaaaactttgatgtagatggcggaatggaccaggacatatttgatatcaatgaaggtttgggactggatctttttgagggtgacatcagacttgatagggcacaaattagaaattccatcattggagaaaagtatagatggcctcataccattccatatgttctagaagatagcttggaaatgaatgctaagggagttatcctcaatgcatttgaacgttatcgccttaaaacatgtattgactttaagccttgggctggagaaacaaactatatatcagtgttcaagggcagtggctgctggtcttcagtaggaaataggcgggttgggaagcaagaactttccatcggggcaaactgtgaccgaatagcaacagttcaacacgagttcctccacgctctgggattctggcatgagcagtcgcgttctgaccgggatgactatgtcaggataatgtgggacagaattctgtcaggcagagagcacaattttaacacctatagtgacgatatatcagattccctgaatgttccctatgattacacttcagtaatgcactacagtaaaactgcattccaaaatggaacagagccgacaattgtcacaagaatctcagactttgaggatgtgatcggccaacgaatggatttcagtgactctgatctcctaaagttgaatcaactgtataactgctcctcttccttgagttttatggactcatgcagttttgaactggaaaatgtgtgtggcatgatccaaagttcaggagataatgctgactggcaacgggtttcacaggttcccagggggccagagagtgatcactccaacatgggccagtgccaaggttctggtttcttcatgcatttcgatagcagctctgtaaatgtgggggccacagcagtgctggaaagtagaacgctgtaccctaaaagaggatttcagtgcctgcaattttacttatataacagtggcagtgaaagtgatcaactgaacatctatatcagggagtattctgcagacaatgtggatggcaatttaacccttgtggaagaaataaaagaaatacccactgggagctggcaactttatcatgtaacattgaaagtgaccaagaagtttagagtggtgtttgaaggacgcaaaggctctggtgcatcactgggtggtctgtctattgatgacatcaatctttcggaaacacggtgccctcatcatatctggcatataaggaatttcacacagttcattggcagcccaaatggaactctgtatagccctccattttactcttctaaaggttatgcctttcagatttacttaaatctagcccatgtgactaatgcagggatatatttccacttgatctctggagccaatgatgatcaattacagtggccatgtccttggcaacaagccacaatgacacttttggatcaaaatcctgacattcgacagcgtatgtccaatcagcggagtataactacagacccatttatgaccaccgataatggaaactatttctgggacaggccttctaaagtgggaacagtggctttgttctctaatggaactcagtttagaagaggtgggggctatggaaccagtgcctttataacccacgaaaggctgaaaagcagagattttataaaaggagatgatgtttatatcctactgacagtggaagacatatctcacctcaactctacacaaatccagctaacaccagcccctagtgttcaagacctctgctcaaaaaccacctgtaaaaatgacggtgtctgcactgttcgagatggcaaagctgagtgcaggtgccagtcaggggaagactggtggtacatgggagaaaggtgtgaaaagagaggctccacccgagacaccatagtcattgctgtttcatctactgttgctgtgtttgccttgatgctgatcatcacccttgtcagtgtctattgcaccaggaagaaatatcgtgaaaggatgagctcaaatcgaccaaatttgactccgcaaaatgttgcttcaggtgaatgcaatgaagacactgaagtttacaacatcaccctgtgtactggggatgaactcactctaatggggcaggcagaaatcctttatgcaaagacattcaaggaaaagtcacgactcaacacaatcttcaaaaagattgggaagctcaattccatcagcaagctgggaaaaggcaaaatgccgtgcctcatttgtatgaatcaccggaccaacgaaagcattagccttccattccagtgcaagggcagatttagcacccgaagtcccctggaacttcagatgcaagagggcgaacacaccatccgcaacattgtggagaaaaccaggcttcctgtgaatgtgactgtgccaagccctccaccgagaaacccatacgacctccacttcatccgtgaggggcaccgctataagtttgtgaacatccagaccaagacggtggtggtttgctgtgtgctgcggaacaacaagatcctccccatgcactttcctttgcacttgactgtccccaagttcagcctcccagaacacctggtgaagggagagagctggcccgaaaccctggtccatcactggctaggtatctgccaagaacagttcgacatcgatgagtattcacgggctgtccgtgatgtgaaaaccgactggaatgaagaatgcaagagccccaagaagggtcggtgctctggccacaaccacgtgcccaattcgctcagctacgcccgcgatgagctcacccagtccttccaccgactctcggtctgtgtgtatggcaacaatctccatggcaacagtgaggtgaaccttcatggttgcagggacctggggggagattgggctccctttcctcatgacatcctgccctatcaggactctggagatagtgggagcgactaccttttcccagaagctagtgaagaatcagcaggcatcccgggaaagtcagaacttccctacgaagagctgtggctggaggaaggcaagcccagccatcagcctctcactcgctctctgagcgagaagaacagatgtgatcagtttagaggttctgtccgatccaaatgtggcgacttctcctcttcccatccctgggactttggggagcagcagtgaagtcttcagataattgccttacctccacctccagtggcctcccaaatttgaagccttcagagaagaatgccggctcctgaacgccccacctgttccaccccgaagcgcaaagcctttgtccaccagtccctccatccctcctcgcacagtcaagccagcgcggcaacagactcgctctcccagccccaccttgtcctactattcttcagggctacacaacatcagcgtcactaaaactgacacaaatccttctgaaagcactcctgtttcctggctatccatgtaaccgagtgaaaactgattctgtgggacctgaaatccccgtttggtaagtccttctggctgaagctgtgtcctctcggctctcatggcctaaccattattcaggagcatcagaaagccagaccaggagtgacttcctgctggatccaagcaggagttatagttacccttagacaaaagacgccaggcacaccaaagagaaactgcccagcacccttttgattttgatgggctgtgagctcctggccagccccactagcccagtcacttcagaattcagtagcagcgtctctggttgtcccaagttcagccagctactctctggagagcacagatgtgaaatctcttgcagctggtgtgacaaagcagagtacgtcatgcccctgcctttaccccccagggctcccaaaaactagtggaagagaaggtcgcctccgaaacatctcctttgcctctgaaaattgatggtgctgaggaagaccccaagtctgggtcaccagatctctcggaggaccagtattttgttaaaaagggcatgcaggacatcttctctgcctcctaccctttctcatctccgctccatctccagctggcccccagatcctgtggcgacggttcccccccagggcagcccaccctgcctgacccctatccaggacctcccctatagagggaagtgtcccaagtccacctacggttccattggtttggtcccgaagatgtccatatccattcctttgttaactgaaaagattgatgggaaccctgccttgttccagcctaacggaagaaatccctctcagaggatttcaaattgagcaaattgccaggtgaagaagataatgcaattcattaatggctggaggcccaaaatatagccaaataacccccggccagcatggacacacactctgatcactgcgtgtgctagaraggggtgggctgggacacaatttcatgtttttgcactaaaaaccttctctgtaaatagggataagagaaactcttactatgcagattacgtttttgaatggtgaacaggctattttgtacatcaataaaaatgctgtacagaacacttggaggtgtgccttgtacgtcactcaacaaacactcagcagctgctaaaaggaaaaaaggcatgtgcagagaaatcattcttacccaagtaggtttatgtgagaaggtatgatatttattacaaaatagccaaagctgaaagacataaaaatcttt

SEQ ID NO: 27593 - DNA, 168 bp, Homo sapiens
  SIMILAR (1)..(132): 1001254mologous to Homo sapiens Human T139 mature protein sequence,accession number Y41267,Smith-Waterman Score=225.
aggaaaggcggggtgctggcccagatcaagagccagaaagtgcaggacatcctcgccttctatctgggccgcctggagaccaccaacgaggtgattgacagtgacttcgagaccaggaacttctggatcggaaccctgggccatggcggctgccagcagatggcaagg

SEQ ID NO: 27594 - DNA, 1934 bp, Homo sapiens
  SIMILAR (1127)..(1174): 881254mologous to Homo sapiens Human T139 protein,accession number Y41266,Smith-Waterman Score=77.
tgcttggcacgaggcaggaggctgtctggacacactgattactcactcaccagcctttttcttttgtccaccaacccagcctgactcctggagattgtgaatagctccatccagcctgagaaacaagccgggtggctgagccaggctgtgcacggagcgcctgacgggcccaacaggcccatgctgcatccagagacctcccctggccgggggcatctcctggctgtgctcctggccctccttggcaccgcctgggcagaggtgtggccaccccagctgcaggagcaggctccgatggccggagccctgaacaggaaggagagtttcttgctcctctccctgcacaaccgcctgcgcagctgggtccagccccctgcggctgacatgcggaggctggactggagtgacagcctggcccagctggctcaagccagggcagccctctgtggaaccccaaccccgagcctggcgtccggcctgtggcgcaccctgcaagtgggctggaacatgcagctgctacccgcgggcttggtgtcctttgtcgaagtggtcagcctatggtttgcagaggggcagcggtacagccacgcggcaggagagtgtgctcgcaacgccacctgcacccactacacgcagctcgtgtgggccacctcaagccagctgggctgtgggcggcacctgtgctctgcaggccaggcagcgatagaagcctttgtctgtgcctactcccccagaggcaactgggaggtcaacgggaagacaatcgtcccctataagaagggtgcctggtgttcgctctgcacagccagtgtctcaggctgcttcaaagcctgggaccatgcaggggggctctgtgaggtccccaggaatccttgtcgcatgagctgccagaaccatggacgtctcaacatcagcacctgccactgccactgtccccctggctacacgggcagatactgccaagtgaggtgcagcctgcagtgtgtgcacggccggttccgggaggaggagtgctcgtgcgtctgtgacatcggctacgggggagcccagtgtgccaccaatgtgcattttcccttccacacctgtgacctgaggatcgacggagactgcttcatggtgtcttcaagaggcagacacctattacagagccaggatgaaatgtcagggtggggttacagaggaaaggcggggtgctggcccagatcaagagccagaaagtgcaggacatcctcgccttctatctgggctgcctggagaccaccaacgaggtgattgacagtgacttcgagaccaggaacttctggatcgggctcacctacaagaccgccaaggactccttccgctgggccacaggggagcaccaggccttcaccagttttgcctttgggcagcctgacaaccacgggtttggcaactgcgtggagctgcaggcttcagctgccttcaactggaacaaccagcgctgcaaaacccgaaaccgttacatctgccagtttgcccaggagcacattctcgcggtggggcccatgggtcctgatggcctgaccacatggctccctcgcctgccctgggagcaccggctctgcttacctgtctgcccacctgtctggaacaagggccaaggttaagatcacatgcctcatgtccaaagaaggtctcagactttgcacaatgccagaagttgggcagaaaaaggcagggaggccagttagggccagggagtgagtgttaaaaaaagctggggcccttcgcctgcttttgattgggaaaatgggcttcaattagatggcgaaggagaggaccccgccagtggtccaaaaaggctgcttttttccacctggcccagaccctgtggggcaacggagcttcccctttggcattaaacccccacgggttattaaatttatgaatcagctgaaaaaaaaaaaaaaaaa

SEQ ID NO: 27595 - DNA, 6258 bp, Homo sapiens
  SIMILAR (3822)..(1843): 881254mologous to Mus musculus tyrosine kinase receptor,accession number X59560,Smith-Waterman Score=3090.
tcaaatttcctcgtctgaaagacaaggatcatcaccctcgtcctggctctggagagcatttgcagatgtaaaaatctctggctgatctaggatatagttgcgtttcttgcgggcagcaatctggatgaggcggttgaggcactgggtggcctgctggatcaggacatcccagcggccagcatagttccgctgccggcgtaggcccatcacccgcatcttatccatgatggcattggtacccaggatgttgtacttcttggaagggttggaggctgcatgtttgatggcccatgtggtcttgccagcagcaggcaggcccaccatcatcagaatctcacagtactggtatcgggattcaaaaagatcaggcttgtcagactctgagcacagtgcctcacattctgccttgctctttggtccaacggtgccccggatacgctcactaaggggaaggtgctggatgaaggtaaaccccgggaggacagaacagtagggctctgctctctgtccgaagttgaactccactgcgcaattcttcaccaggacatgaggatagagggcctgaccccccaaggcttccttctggattcggaaagcaatgcccatccactttccattcttggtaaaagacagttccacgtcatttccacattcaaaatccgcaaagcagccaatcacatcgttctctgcaaacttgtctccgtagttttcaaaccggctattggtggacttcttcccagtgcctccatagccataggagaaaggctcttcgcctagctgggtgctgcaggagtccagggaccagccgatacggaccacgtgggggtcaggctctgtagacggaaggtgcttcacggagatttcctcattgatcttcatctcgaagcatacacggccccttctgaccccatagctggcacgggctcctgaccacaggtatgcaaagccctcaattgtgagcggatagccactactccgatctcgggccaccttgaagtggaggtcgcagttataggtgtcaatagcaacaagggtatcatcaaagtcatcttcatcctcttcagcaggaggctgaggagagcggcccctcctatcctctcggtgctcaaagtacccccgtccccggttttcttcataaggcctctttcgactctggaattgctgcctgtctggcttgagttgagaagcttcaggcgggaggaagctggtgggtgctccttgcttcatctctgtcttcatttctggacgataggcctgctgctgctccatttccagtggtctcctctcgtagcctgactcgttttcttgtttgatgacttgggtatcgtagaattggttctgcctggtaatattgtccatggcataatgtccgtccggccccgagtagccgccgggctccgcgtgcggctgcagcccgggcggcggtggctgcgcggtcccctccagctcggagcccccctcggtctcgacctcctcgttgatgtgcccgggtcgccccggttcgtcgtcggcgtcgagctcccgctcgtcgtcaggctcctcggcctccaacgccgcctgcagccgctcagcaagctcggccttgaggcctcgagtgtccaggccgcggcgctgcagctcctcgcgaagttcgttcaccttcagacggcgcacatccatggcccgggcccccggggtggcccccgagcccggcccggcctcccagggctctgtcccccttaaacctttcctgacgtggaacgggcgctctgcacgcgaccatagagccttcccctcccgaaagacatccagaagttcaccgaccgctctcccgaatcctctaatcggctgttcccgtaaatcgggctgtctggcgtctccaccctcatccatgttgacatagaggatttcgtcaggctcctgggcaggaggcaaggccttcagtgtgttctccaaatcttcccgcagctctgtaaaacttggccggtcctggggatttagctcccagcaccgcgacatcaaggcatacagtccatccagacagtccgcaggctgcttcaggcgatttccctggcgcagatagtcataaatctcgctgttctccacgcccggatatggggtttggcctcttgtggcaatctcccacattgtcaccccgaaggaccacacatcgctcttgctggtgtagacacggtcagctagactctcaatggcaatccacttgactggcatcttggcgatacgtccctggcggtagtagtccccattgtagatcttcttggagagcccgaagtccgccacacacacggacatgttctcattcagcatgcagttcctggccgccaggtcccggtgtatgaatctcttggtactcagatactccatgccactggcgatgtctgccatgaacttcactagcatctgagtgggcaggtacactggctggtccccgagccgggaatagaggaggaagctgtgtaggtctccatgtttcatgaaaggtaagatgaccacaggtgctgggaagctctctcgttcagaaccctggaaacagacaccgatgagcctcatgacgttgggatggtcaaattccttcatgcagaccgcttcactcaggaaatcctccagctctgacctcgtgcagatggcaatcttcatcgtcttcacagccaccttgaggatggagtcgtcctggttgagctggccttccatcacagctccaaactctccctctcccagagtcttccccagggccaccttgtgccggtccaccatcacatcccgcagcttctccttcagctcttcactgatgcccaggctgttcaaggtagcttcagtggtccgacgactgtaggacttgcgcacgcggtacctgactaccagttcacctctttccactgttggttcaaacacttctccataacgggtctccttctttcgccggtggacaaggaagagagccaagatgaggacacaggcagcggccacgactgctcctagcagtacataccaccagggccacgagaaggcaggagttgaaggttccttcaccagctggtggactggctgtgcttgccctgggcgccaggcctccaggggtactgggaggctccagggtccatccccagcagcagtgtaggctgccacacacactgtcagattggacacagacccgtccccctgcagctccagggtcacctcttgccttagccctatgtccattagcacctctggggtgtcctggccttgatacgccagccggtaccctaacagggtaccctgcaggggcgcccggggctcttgccaatgcacgaaggcctggctcccattccgcgtagcactaatgttctcaggggggcccaggggcactccctccggcgtctccacaggaagccagtgggtccaggatgaggggccctggctgctggtgcatgccacgcggatgtgataaggggtgtgaggatggaggctgcctagccgaagctgatgggggggcacggatgcttgcgaggtgaggggctcctctggggggtctggttctcccgcctggatgcccatcccatcgtttgacagcacagcctgcagggtgcagtgggtcagggggtagatgccgctcaggcctggagtccaagccacctccagctccgtgggttggcgggagaccaggtggaggttacggggctgctgggggagcactgtgatggtggctgtgcgggatgtggtgacccccttggcgttatgggcttcgcaggagaaagaggatgtcttgttcagccctggcacgtggggccccgccagggtcagcgcgcgggagctggcgccgccggccggagaagccctggggctggaggtgggttctggagccgggtcccgttccgaccgcagcattcctgcccccgcgtgagtcaccgggggcacctccccaccccagcgcttccggccggcttcgggggcgcggagccagagccgggatcccccttcccaggccccaacggccgcacctggaacatgcaggctgcgctgggggccgtgacctggagccgtggccagggggacagcatcctggagccagagtaggtccacgggctctgggggtccctgagcttggcagctcaggttgaagggggtgttggcggccacagtcctgtcttcgggctcctccaggaagtaaggcaagccctccagcccaacatagccaggctgggacacgaaggtctgatgtcccagaaacaccaaacactggtactgtcccgtgtcggaaagctgcagggaggtgattctgagctggctgaccactatccagtcatcctgttcatcctcacccaggggcacctgggtctgggtgctgtccgcgagctccaggatctgtccatcccgaagccaatgtacctcggggggctctccctgaacctggagctgacaccgaagggtgcccgtgagtccccgggcacctgtgatattccctgggttgcccacgaagggactttcttcagcctgcgtgccccttccactgggtctagtggggactctgacgccgaacaggggctgtagatcagtgagtgtgtatgtgtgtgtggaggggcagcaggggccgctttccacgtggttacataagcacgtgttggggttgggcaggtgttcctccggtctgagggtcctcgtatgtccaaagtctctgtgcataatcgcagacccagatgtgtttgcatttggtagaatcagggtgcttaaaaaggggtgactgagggctgcagttgcagaggtggctggggactgtgcctctgtgggggcggcgtgtctcagtgggaagatactctggggagccaggacgatgtcgtacgtgggtagggtgggcttgaggctcagggtgtccggcgggcacgggctctccagggagaaggcttgtaggatggtggtgaagaagaggaagagctccgcttttgccaggccctctccaaggcagacacgcttccctaaggagaagggcaggaacgcctcatgcttcctgaaccgtccatctgcatccaggaaacggtctgggttgaactcttctgggtgcttgaagatgttggggtcatgcaggatggagccaaggagggggaagacctccgtgccctggggcagggtgtaccctcggaagcgggtggtccgcatgagggtgcggggtattcccatgggcaccagcgccagcagccgctgcgcctcatgcagaaccgcgtcggtgtaagggaggcgggtacggtcccctaggcttggtgcctggccagcccccagctcccgattcagctcctcacgtacccacttttggacatgagggtatttcatcaggagcaggagggtatagccgaccgtggtgctgaccgtcatcgtcccagcaaacagcaaataaatgactgtcatcagcatgttcttgttggtgaattctgtgcctgggttttgttcctcctgtgccatcttcagcaggaaggcatcgacaaggtcacgtgcggggcccgaagcatccaggttcccctggtgctgctgcacctgccggactgtgaaggcagccaaggtgctgacgtggtggaggagctgcttgtgggggcctggcaggggccgcaggaaccaggagaacatctcgtaggtctgacccccctgggagctgactcccagcagggtaccaccagctgcccggaccacggcctggaactccttatcctcataggagaagcggaggccaaagaggagggagcagactacgttggaggtggcctgggccagcagcagggagggatcgaatgggcgtccttctgtcccctggaatgtctccaccagacaccgggcctccgcctggatcagctcctcgccttctcgcttccccatgcccaggtcccgcagagcaagcatggtaaacttcctcagctgcctccaccgctccccgttggagaagaaaaccccatggccatcaaaagtcccttccagcatcgctacggttccccggccgctgaactcctcagcctgacctcccagggcctcccgcacagcctcctgcccaaccaggaccaccacaggccgccacggtcccaggtagatggtgaacaccggtccgtacttcttactcagccgcatgagccctgaatacagcgccccgggccgtagctgcaggaggtttcccagcagtggtagcggcgtgggcccggggggcaggtggcctcgggccctggtcccggacagcgccagcgtcagcagcaggagcagcgccagcgccagcagcagcgcccaggtgccggtcgcctccat

SEQ ID NO: 27596 - DNA, 1150 bp, Homo sapiens
  SIMILAR (136)..(255): 411254mologous to Gallus gallus collagen alpha-2 chain precursor,accession number M17608,Smith-Waterman Score=61.
cggaaccgaactgaggtccactcgctaggcctatcctatttgcctggaatttcccttctaggaacgcaggggtgttctttattttcatgctggcgaaggctcattaggcccctaagagagggccccttccccatctcaggactaaaatgcaatgaagatgttgctcagaggcagctgcagagggatgggcctgtggaggatgccccgcagagtgaagacgagatgatgcagccaccagggccgcaggggagggacattccactttttaaatcagctttctgaagcatgatctccatataatcacctagaagcgtacagcacaatgatcttgacagatgccagcatcctttggaccactgccaccaccaacgtctcaaaccattccatcaaacccagaacactcctggtgccctgaagcgtctcccttcagtggcagaaccagcagagattcagtggtcacaaggccgcacttaagacaccccagaggatgaacacgcacgtctttcgttcacagacgcagtctccagcctcaccccctgggccacccaccctcccccgctggactacagccttcccgtaccatccagaggccatggcctactttgtcaaccctccttgtgaagatcctcatcttcctgccatgcctgcccagccagactctagcctgcatcagccagacccactgctccctagtagcacgtctaaccaggaccaaccctgccagagagaggaagctggggtccccaactctgagctacccatcctgcagaggtgccgtagcacagctctggttatccggaacaaagaatttctccccacagccctggaagacctgctatggggcctctccaattgtaaagagattctgggaagaagctgctttctgttccttgagagtaggaaacctggagctcccatctgcaagtaccagcccaggcttggtggatggggcctgcctctcaatggcctctatgtatttctgagcccagttcccatcccccagaaagagaatgtgaacaaaacccaggcacagaagtcaccaacaagacatgctgatgacagtcatttatttgctgtttgctgggacgatgacggtagcaccacggtcggctataccctcctgctcctgatgaaataccctcatgccaaa

SEQ ID NO: 27597 - DNA, 717 bp, Homo sapiens
  SIMILAR (226)..(714): 871254mologous to Homo sapiens peptidylprolyl isomerase,accession number X52851,Smith-Waterman Score=752.
atgccctggaagcatattaaaaaacacagtcccactccagaccaactgaaccagaagcggcatttccataagatcccctggtgtttcgtgtgcacgttcaagatccagtcagatcatgcttctccagcatcaccttattgccagatccaatcagatcacgcctccttactccatgcttataaaacctgctccagcccccagctcagggagacagagtcagccacggtcaaccccaccgtgttctttgacatcgccgttgatggagagcccttaggccacgtgtccttcgagctgtttgcagataagtttccaaagtcagcagaaaaggttcatgctctgagcactggagagaaaggatttggttataagggttcctgctttcacagaattattccagggtttatgtgtcagggtggtgacttcacacgccataaagacaccggtggcaagtccctctacagggagaaatttgatgatgagaacttcatcctaaagcatacagggcctggcatcttgtccatggcaaatgctggacccaatacaaattgttcccagtgtttcatctgcactgccaagactgaggggttggatggcaagcacgtggtctttggcacggtgaaagaaggcatgaagattgtggaggccatggagtactttgggcccaggaatggcaagaccagcaaggagatcaccattgctgactgtgaacaactctaa

SEQ ID NO: 27598 - DNA, 558 bp, Homo sapiens
  SIMILAR (449)..(553): 821254mologous to Homo sapiens peptidylprolyl isomerase,accession number X52851,Smith-Waterman Score=154.
ccggcgcgcccacgcgtgcgcgaggagaaggagaaagaaagaaatgcttggggtaaatgttttaactagtcattcttcccaggagcggatgaagctgacttttaaaaagaaggctgtgaactttgcagatgctgctgccgcccagggccccctgcttccagccatggtcaaccccaccatgtttttccacattgctgtcgatggcgagcccttgggctgtgtctccttcgaggtaaggggcctggaaagcaagaagtgactgctcatctaatccataaaactatgttaacagattggagctgtttgcagacaaggttccaaagacagcagaaaatttccatgctctgagcactggagaaaaaggatttggttataagggttcctgctttcacagaattattccagggtttacgtgtcagagtggtgacttcacacgccatacagcattggtggcaagtccatctgcagggagaaatttgatgacaagaacttcatcctgaagcatacgggtcctggcatcttgtccatggcaaatgctggacccagcgtgaacgtttc

SEQ ID NO: 27599 - DNA, 951 bp, Homo sapiens
  SIMILAR (272)..(589): 661254mologous to Homo sapiens peptidylprolyl isomerase,accession number X52851,Smith-Waterman Score=301.
ggcacgagggacgccaccgccgaggaaaaccgtgtactattagccatggtcaaccccaccgtgttcttcgacattgccgtcgacggcgagcccttgggccgcgtctcctttgaggtaaggggcctggataccaagaagtgactgctcatctaatccataaagctatgttaacagattggaggtagtagcattttcattacaagtgactaaaagaacagctgtttacccctgatcgtgcagcagtgcttgctgttccttagaattttgccttctgtttgcagacaaggtcccaaagacagcagaaaattttcgtgctctgagcactggagagaaaggatttgggttataaggggttccctgctttcacaggaattattccagggtttatgctgtcaggggtggtgacttcacaccgccataaatggcacctggtggcaagtccatctatggggagaaaatttgaagatgagaacttcatccctaaagcatacgggtcctggcatcttgtcccatggcaaatgctggacccaacacaaatggttcccagtttttcatctgcactgccaagactgagtggttggatggcaagccttgtggtgtttggcaaaagtgaagaagggattgaatattgtggaggccatggagcgctttgggtccaggaatggcaagaccagcaagaagatcaccattgctgactgtggacaactcttaataagttttgacttgtgttttatccttaaccaccaagatcattccttctgtgctctcctctcaggagagcacccctctaccccatttgctcgcaggatcctaagaattttgtggctctcgctgcagttcctttggggttccatgttttccttgttccctcccatgcctagctggattgcagcagttaagtttatgattattgaaataaaaactaaataacaaaaaaaaagtcgacgcggg

SEQ ID NO: 27600 - DNA, 801 bp, Homo sapiens
  SIMILAR (547)..(636): 701254mologous to Toxocara canis 60S ribosomal protein,accession number U63521,Smith-Waterman Score=102.
gggacatctgaagaaagacatggcaatggagagtaccagcatctagagaaagacgtggtaatgctgggtacacgcagccttaacgctgactcctacttctactgttacctgcggtccctagtggcccagatcccggacacctgggctcccgcccaggatcctgcaggcccagggcggtcctggagcggaaagaatgccacgcggggcattcagaccctgtttgccggcgctgtatttcgctttcctgacctgccctactccagagcagagaatgagagttggttgttaaaaatctaccagtacacccccaagaaactcatcatcaccaatgacttcttcccaaatccagagtcacttttcagacttgagattgacctctcttcagcatatggactattgctggaacttttgggaaaagagaagcctggactcttcctggaaataaaagcatgctataaaggggattcttctagagtcgcaaatgcagttattcaagccctagttgtgatccttggagaagaggatcctcataccactgtgctaaagaggagaaatgaaaagattactgttgactgcacagttccaggggccaaggcagaagaaatcctggagaaaggtccaaaggagaaccagttcttcagcccaatgagcacctatcaagagtcacgcgtctacgttttggtcatagctggggagtgccccatctacatcctcatgcctgatcccgtccctgtccctgccccagccacattgacatcctcagcatccctgcctccatctccgtctccctcaggaacctaa

SEQ ID NO: 27601 - DNA, 625 bp, Homo sapiens
  SIMILAR (40)..(198): 1001254mologous to Rattus rattus ribosomal protein L11,accession number X62146,Smith-Waterman Score=269.
cccacgcgtccgcccacgcgtccgcccacgcgtccgatcatggcgcaggatcaaggtgaaaaggagaaccccatgcgggaacttcgcatccgcaaactctgtctcaacatctgtgttggggagagtggagacagactgacgcgagcagccaaggtgttggagcagctcacagggcagacccctgtgttttccaaagctatgatacactgtcagatcctttggcatccggagaaatgaaaagattgctgtccactgcacagttcgaggggccaaggcagaagaaatcttggagaagggtctaaaggtgcgggagtatgagttaagaaaaaacaacttctcagatactggaaactttggttttgggatgcaggatcacatcgatctgggtatcatatatgacccaagcattggtatctacggcctggacttctatgtggtgctgggtaggccaggtttcagcatcgcagacaagaagcgcaggacaggctgcattggggccaaacacagaatcagcaaagaggaggccatgcgctggttccagcagaagtatgatgggatcatccttcctggcaaataaattcccgtttctatccaaaagagcaataaaaagttttcagtgaaaaaa

SEQ ID NO: 27602 - DNA, 1698 bp, Homo sapiens
  SIMILAR (1)..(930): 991254mologous to Homo sapiens putative DEAD-box helicase MDDX28,accession number AF329821,Smith-Waterman Score=1520.
atggctctagcgcggccggtgcggctcttttccctcgtgactcggttgctcctggcgccgcgacggggcctcacggtccgcagtcccgacgaacccctgccggtggtgcgcatcccagtggctctacagcggcagttggaacagcggcagagcaggcggcggaacctcccgaggccggtgctggttcgacccggaccgctgctggtttcggcgcggcggccggagttgaaccagccggcgcgcctcacactgggccgttgggagcgcgcgccgctagcctctcaaggctggaagagtcgacgcgcgcgtcgggaccacttctccatcgagcgcgcgcaacaggaggcgccagcggtgcgaaagctctcgtctaagggcagctttgctgacctgggcctggagccccgtgtgctgcacgcactacaggaggctgcgcctgaagtcgttcagcccacaaccgtgcagtctagcaccatcccctcactacttcgcggccgccatgtcgtttgcgccgcagaaaccggcagtggcaagactctcagctacctcctgccgctgcttcaacggctcttgggccagccaagcctggactcccttcctatccccgcgccccgaggcctggtccttgttccttcccgagaattggcccaacaggtgcgggctgtggcccaacccttgggccgctccttgggcctgctggtgcgggacctggagggaggccacggcatgcgtaggatcaggctgcagctgtccagacagccttcagcagatgtgcttgtggccactccaggggctctgtggaaggccctgaaaagtcgactgatcagtctggagcaactctccttcttggtgttggatgaggcagacacactgctggatgaaagcttcctggaactggtggactacatcttagagaagaaggacctggctgtctttctgtaccatctgcgccttgaggccgaggtggaggtggtggagatgctgggtcctcacggccaaccctgtccccagcataacagtgacatctctgcatacacctacgagcggacgctgatgatggagcagcggtcgcagatgctgcggcagatgagactgaccaagactgagcgggagcgagaagcccagctggtcaaggatcggcactcggccctgcggctggagagcctgtactcggacgaggaagatgagtctgcagtgggggctgacaagatccagatgacgtggaccagggacaagtacatgactgagacctgggaccccagccatgcccctgacaatttccgggagctggtgcacattaagccggaccaatccaatgtgcggcgcatgcacactgctgtgaagctcaatgaagtcattgtcacgcgctcccacgacgcccgcctggttctcctaaacatgcctggcccacccaggaacagttggtgcacaactagtagccgaacagagaagcgacaatggaactgcccagccgtcagaaccgaaaaaaacgcacaaacccgacagacaataatcgccgaaacgaagacgcaaaaaaaagacaccgaaccaagaataccggaagcagacctagcggtgcagtatgacaaccactacaccaacaccaagtactgcttgtgccagatgctacgagaacagctggagtcgccccagggaaggttgctccatgctgcccagtcttcccgggaaatttggtaa

SEQ ID NO: 27603 - DNA, 621 bp, Homo sapiens
  SIMILAR (621)..(232): 1001254mologous to Homo sapiens putative dipeptidase,accession number AJ295149,Smith-Waterman Score=678.
tcaggagttagtggggacagaatgggaattgactttataggtgttcaccaaaggcatctggaagaccaccctgttctgctctctttcacaggtgcggaagacaactcgatcatcaggggcgacaaagtccactgtgctgagcacctcctcggagcacgaacacggctgaggacatgtgtctgtgtacgtagtggcatatgcatgtgtaattgtgcttgtacaagtgtgtagctgggcgcccacgaggccatctctaagcctgtccaggctggtctggccgtagctgaaattgcgcaggttaacatcctgtagccctttctggtaaacctgccttaggaccaggggcaggtcgttgtggccgtccacgagcgggaagtcccgcatcagggcccgtgcctgctcttgcaggccctgggtgctgggactactgagtgtggtcgagggagcgtaggtgcccggcatggtgtgggctctgggggcgcccagcgtggtgagggctctgggggggcctggcgtggtgtaggcacaggttacaggctggagcagcagcagcaggagcagcagactcagcagaggccaccgaccaaacgtgccgggaccctcgaggccggagggctgcat

SEQ ID NO: 27604 - DNA, 1941 bp, Homo sapiens
  SIMILAR (139)..(1035): 961254mologous to Sus scrofa K-Cl cotransporter,accession number AF028807,Smith-Waterman Score=1543.
atggcttacaccctcaactctagattgccaggctggagcctggccttgacctctgtaggcatggagaagctgctggtggccaggcccagcctgacatcaggtccccagctgccgaggaggctgctcttcgccaaccgccctctgtgccgcaggttctttctgatgtgctacctgttcgtgaacctcgcctgtgcggtgcagacactcctgaggacccccaactggcggccccggttcaagtactatcactgggcgctgtccttcctgggcatgagtctctgcctggcccttatgtttgtctcctcctggtactatgccctggtggccatgctcatcgccggcatgatctacaaatacatcgagtaccaaggggctgagaaggagtggggtgacgggatccgaggcctgtccctgagcgctgcccgctacgcgctgttgcggctggaggaggggcctcctcacaccaagaactggcggccgcagctgctggtgctgctgaagctggacgaggacctccacgtgaagtacccgcggctcctcaccttcgcctcccagctcaaggctggcaagggcctgaccattgttggttctgtcatccaggggagcttcttggagagctatggcgaggctcaggccgccgagcagaccatcaagaacatgatggaaattgagaaggtgaagggcttctgccaggtggtggtggccagcaaggtgcgggaggggctggcccacctcatccagtcctgtggcctgggaggcatgcggcataactccgtggtgctgggctggccctacggctggcgacagagcgaggacccccgtgcctggaagaccttcattgacaccgtgcgctgcactacggctgcccacctggccctgctcgtgcccaagaacatcgccttctaccccagcaaccacgagcgctacctggagggccacatagacgtgtggtggatcgtgcacgatggtggcatgctcatgcttctgcccttcctgctgcgccagcataagccattccaaaaattccagggcaggtctggacatgcctgccaggctgaagctgctcagacaccacctgagatccccagtaaatctgaatatggcctaggcctagggactgcctgtgagctacacaactgtgttcccaccagcaactgtgactgcaccagtggcagcggaggatctcatgaccacatccaacagtattcggacatagaggactttcgacaagccacggcagcctcttccgtgatggtggcccgagcagccatgtggaacccatctatcttcctcaaggagggtctgcggcccctggaggaggtcatgcagaaatacatcagatacggaggaatgggagctgccctgctgtcagaccctgacaagattgagaaggcacccagcatgggcaccctcatgggggtgtacctgccctgcctgcagaatatctttggggttatcctcttcctgcggctgacctggatggtgggcacagcaggtgtgctacaggccctcctcatcgtgcttatctgctgctgttgtaccctgctgacggccatctccatgagtgccatcgccaccaacggtgtggttccagggtacctgcacacactggtgcagaacctggtcaacaatggctacgtgcgggacgagactgtgcgcgccgccccctatgactggcggctggagcccggccagcaggaggagtactaccgcaagctcgcagggctggtggaggagatgcacgctgcctatgggaagcctgtcttcctcattggccacagcctcggctgtctacacttgctctatttcctgctgcgccagccccaggcctggaaggaccgctttattgatggcttcatctctcttggggctccctggggtggctccatcaagcccatgctggtcttggcctcagggagtggcaccagggcccagcactga

SEQ ID NO: 27605 - DNA, 1713 bp, Homo sapiens
  SIMILAR (625)..(1128): 931254mologous to Homo sapiens RAS-related protein encoded by plasmid pML5 (ATCC 68593),accession number W00087,Smith-Waterman Score=805.
atgcctgagcctcccaacccctccatgggctcctgtgcggccggagcctccccgtgtttgcataaatcaagacctgcagaggaggcagcagtagaaacagtttgctccaaggaccaaacttattctggccgcgagcccgggggcggcggcgccggcgccccgtcctcgccaaagacgagtttgaagtcgagctcgtcgtgggcgccacagtttgcagtagtcatcggcgtggccaagggtgctgcagctcctcctcaggcggcggcggcggcagcggcaagcggcggcagcagctcctcaacgccgcttcatgccgggccgcgcgggccaagaggtcgcgactccacggcaaactttccgggcggggcccgcgacgccgagcgttccgttccgaaagctggccgcgcgccgagcagcaccaggaaccgcagccgcccgccaccgatcctcagcactcttgttaaagggacacgcagacctgtgacctgcaagattcgcatcctgccatcgctagaagataccctgagccttgtgaagcggatagagaggactggcattgctgccatcgcagttcatgggagctctttgatatcttatgagtctggagggcaggcagaccctgaatgggcttttgcatttgcctttctttcattcatggagtgcctattgaggacctacattgccccaccagctgccattttttacccatcgggtgctcatgacacgtcgaatgccactttgaacaatatgcgtgtgtatgggaccattttcctgaccttcatgaccctggtggtgtttgtgggggtcaagtatgtgaacaaatttgcctcgctcttcctggcctgtgtgatcatctccatcctctccatctatgctgggggcataaagtctatatttgaccctcccgtgtttccggtatgcatgctgggcaacaggaccctgtcccgggaccagtttgacatctgtgccaagacagctgtagtggacaatgagacagtggccacccagctatggagtttcttctgccacagccccaaccttacgaccgactcctgtgacccctacttcatgctcaacaatgtgaccgagatccctggcatccccggggcagctgctggtgtgctccagggctgccccaaactacctggggtagtggggggcagctgtggtggtgacacagctacccctgcagaaaacctgtggagcgcctacctggagaagggtgacatcgtggagaagcatgggctgccctccgcagatgccccgagcctgaaggagagcctgcctctgtacgtggtcgctgacatcgccacatccttcaccgtgctggtcggcatcttcttcccttctgtaacagacttcagcagtgtggttctctttggtgcctgcattgagggtgtggttctccgggacaagtatggcgatggtgtcagcaggaacttggtggtgggcacactggcctggccttcaccctgggtcatcgtcatcggctccttcttttcaacgtgtggcgctggcctccagagcctcacaggggcaccacgcctattgcaggccattgccaaggacaacatcatccccttcctccgggtgtttggccacgggaaggtgaatggtgaacccacatgggcactcctcctgacggcactcatcgccgagctgggcatcctcatcgcctccctcgacatggtggcccccatcttatccatgtga

SEQ ID NO: 27606 - DNA, 2004 bp, Homo sapiens
  SIMILAR (208)..(1110): 501254mologous to Arabidopsis thaliana putative protein,accession number AL132964,Smith-Waterman Score=754.
ggaattcgaggctcagtacggtgtgtggagctggagcaccgtgaggaagaagcgaggttctttttaagagttcagctgcgagatatcaaacaaagaattactctgtacaaagccagaacacatatatcaaagtaatcctgaagtatcagaacaaaataataggctgtaacagaggaggaaatgattttgaatagcctctctctgtgttaccataataagctaatcctggccccaatggttcgggtagggactcttccaatgaggctgctggccctggattatggagcggacattgtttactgtgaggagctgatcgacctcaagatgattcagtgcaagagagttgttaatgaggtgctcagcacagtggactttgtcgcccctgatgatcgagttgtcttccgcacctgtgaaagagagcagaacagggtggtcttccagatggggacttcagacgcagagcgagcccttgctgtggccaagcttgtagaaaatgatgtggctggtattgatgtcaacatgggctgtccaaaacaatattccaccaagggaggaatgggagctgccctgctgtcagaccctgacaagattgagaagatcctcagcactcttgttaaagggacacgcagacctgtgacctgcaagattcgcatcctgccatcgctagaagataccctgagccttgtgaagcggatagagaggactggcattgctgccatcgcagttcatgggaggaagcgggaggagcgacctcagcatcctgtcagctgtgaagtcatcaaagccattgctgataccctctccattcctgtcatagccaacggaggatctcatgaccacatccaacagtattcggacatagaggactttcgacaagccacggcagcctcttccgtgatggtggcccgagcagccatgtggaacccatctatcttcctcaaggagggtctgcggcccctggaggaggtcatgcagaaatacatcagatacgcggtgcagtatgacaaccactacaccaacaccaagtactgcttgtgccagatgctacgagaacagctggagtcgccccagggaaggttgctccatgctgcccagtcttcccgggaaatttgtgaggcctttggccttggtgccttctatgaggagaccacacaggagctggatgcccagcaggccaggctctcagccaagacttcagagcagacaggggagccagctgaagatacctctggtgtcattaagatggctgtcaagtttgaccggagagcatacccagcccagatcacccctaagatgtgcctactagagtggtgccggagggagaagttggcacagcctgtgtatgaaacggttcaacgccctctagatcgcctgttctcctctattgtcaccgttgctgaacaaaagtatcagtctaccttgtgggacaagtccaagaaactggcggagcaggctgcagccatcgtctgtctgcggagccagggcctccctgagggtcggctgggtgaggagagcccttccttgcacaagcgaaagagggaggctcctgaccaagaccctgggggccccagagctcaggagctagcacaacctggggatctgtgcaagaagccctttgtggccttgggaagtggtgaagaaagccccctggaaggctggtgactactcttcctgccttagtcacccctcccatgggccctggtgctaaggtggctgtggatgccacagcatgaaccagatgccgttgaacagttttgctggtcttgcctggcagaagttagatggtcctggcaggggccatcagcctagagcatggacccaggggccgcccaggggtggatcctggcccctttggtggatctgagtgacagggtcaagttctctttgaaaacaggagcttttcaggtggtaactccccaacctgacattggtactgtgcaataaagacaccccctaccctcacccacggctggctgcttcagccttgggcatcttcataaatgg

SEQ ID NO: 27607 - DNA, 421 bp, Homo sapiens
  SIMILAR (92)..(142): 411254mologous to Homo sapiens collagen 1 pro-alpha-2 chain,accession number J00114,Smith-Waterman Score=36.
  misc_feature (1)...(421): n = a,t,c or g
ttttgccacagctgcagcggggtgaggcagaccactttccgactgctcatcaaccgacctccctggggccgagaggcaagccgggtccgcgcggggtgcagcgccacctgctggaattcatgcgatggagcagcagcctggagtggctgcggagtccagaagtcctgtccttgaggtttgctttcagacaacggccagtcctgaatgagaaatggcaaagggatattctgcttgcagtcttttgccctctggcaaaaactttccagacagggtgtcatcgtgtgcagcttccgtgatgcagtttgatcatgtgaagcagagctgggtgccagcttgtcatggcctggactgttggctctctctgtgatcccacnnnnnnnnnnnnnnnnnnnnnnnnnnnnnnnnnnnnnnnnnnnnnnnn

SEQ ID NO: 27608 - DNA, 447 bp, Homo sapiens; identical to SEQ ID NO: 23551
  SIMILAR (317)..(108): 411254mologous to Streptomyces coelicolor A3(2) putative acyltransferase,accession number AL391515,Smith-Waterman Score=123.

SEQ ID NO: 27609 - DNA, 440 bp, Homo sapiens
  SIMILAR (226)..(426): 391254mologous to Neurospora crassa sulfate permease II,accession number M59167,Smith-Waterman Score=84.
aaaggccagatgctgttcctgcccggtctttggagatgaaaaggtttcccatgcccccacctcctcccgagttaattctctccaggtgcttctcttgatgtaaacccagggtgctataagcaggctccttcttgttctcttgctcaaatcctttccaacctatccaacctgtggagctctgctgtttctaatttctaacccccatcttgtttctttcccccaatattgaattctgccataatcttcagatcaactctagttgtctccattttttttctgaatgctaaaaccttccagccgtcttctcttccactccctgaccactcacgagtcacctgcatttcttaccccagtcgtcatccttgtttccatgaacgatcctctccagggcttcctgccagaaaagtaatttgcaagtttcatttgaatttctacacagt

SEQ ID NO: 27610 - DNA, 379 bp, Homo sapiens
  SIMILAR (208)..(2): 981254mologous to Homo sapiens Human GTPase associated protein-23,accession number Y99672,Smith-Waterman Score=377.
acaaagacaggcttcctttatcatctccagagcctggtttgtggtgtgcaattagcatacactgtgtgtcctgtaaggacggctgttggacaaagcaggaataccacatctccatttccttccggtggcttgggatgtcagcattgaagacgatcaccactccatgagcatccttcatcagggccggccagcaggactcaaaccgagccttagctgccttcccgcggggcagggctcgggacctgcagcccgctatgcctgagcctcccacccactccatgggctcctgtgcagcccgagcctccccgacgagcaccaccccctgctccagggcgctcagtcccatcgaccacccaagggctgagaagtgcgagcgcat

SEQ ID NO: 27611 - DNA, 444 bp, Homo sapiens; identical to SEQ ID NO: 2752
  SIMILAR (399)..(187): 641254mologous to Homo sapiens hypothetical protein,accession number AL162044,Smith-Waterman Score=229.

SEQ ID NO: 27612 - DNA, 591 bp, Homo sapiens
  SIMILAR (419)..(189): 411254mologous to Hylobates moloch dopamine receptor D4,accession number AB032918,Smith-Waterman Score=109.
ctgatagagtccagacggttcctcattagcagaagcaggcagaggaggcagctctggctgcccctgggagtggctcatgtgatgtatggagtcacttttggcgatctgtccagaacacaaacattcccgagttcctatgaaaagcattgcatagtgagaggtgacagcgtgctggcagtcctcacagccctcgctcgctctcggcgcctcctctgcctgggctcccactttggcggcacttgaggagcccttcagcccaccgctgcactgtgagagctcctttctgggctgggcaaggccgaagccggctccctcagcttgcaggcaggtgtggagggagaggcgcgagcgggaacccgggctgcgcacggcgcttgcgggccagctggagttccgggtgggcgtgggcttggcgggccccgcactgggagcagccagctggccctgccggccccgggcaatgaggggcttagcaccccggccagcggcagaaggaagaaactccgaacacatccgagcatcagaaggaacaaactccagacgcgctaccttaagagctgtaacactcaccgcgagggcccacggcttcat

SEQ ID NO: 27613 - DNA, 1608 bp, Homo sapiens; identical to SEQ ID NO: 6195
  SIMILAR (1117)..(1581): 1001254mologous to Homo sapiens sperm protein 10,accession number M82968,Smith-Waterman Score=809.

SEQ ID NO: 27614 - DNA, 1972 bp, Homo sapiens
  SIMILAR (281)..(688): 351254mologous to Homo sapiens type II collagen,accession number M63281,Smith-Waterman Score=160.
gcaattgtggcttgtgtttgaactgaacgatgaagaaagatctcaggcagttttgagtcagccttcaggttcctcagaaactttaaacacaggaatcaatgaggtcactgaggtcaggaactctaggcgcccctgcctcatgcttggagcatcaacttctggagcacctcctctgcctgggctcccactttggcggcacttgaggagcccttcagcccaccgctgcactgtgggagcccctttctgggctggccaaggccgaagccggctccctcagcttgcagggaggtgtggagggagaggcgcgagcgggaaccggggctttgcaggcggcgcttgcgggccagctggagttccgggtgggcgtgggcttggcgggccctgcactccgagcagccgagtggccctgccggccccgggcaatgaggggcttagcacccgggccagcggctgcggagggtgtactgggtcccctagcagtgccggcccaccggcgctgcgctcgatttctcgccaggccttagctgccttcccgccgggaagggctcgggacctgcagcccgctatgcctgagactcccacccactccatgggctcctgtgcggctgagcctccccgacgagcgccgccccctgctccagggcgcccagtcccatcgaccacccaagggctgaggagtgcgggtgcacggtgtgggactggcgggcagttccacctgcagcccaggtgcgggatccactgggtgaagccagctgggctcctgagtctggtggggacgtggagaacctttatgtctagctcagggactgtaaatacaccaatctacactctgtatctagctactctggtggggccttggagaacctttatgtctagctcagggattgtaaatgcacgaatgtgcactctctatctagctcaaggatcaaactgcatcacggaagctgcacacgatgacaccctgtctggaaagtttttgccagagggcaaaagactgcaagcagaatatccctttgccatttctcatccaggagcaggccaggccacccttctggacacagtctatcccacgtggggacagactggccagccccagcccgtgggtctcaacgcggccagagctgctgtgagaaatcttgtttgttttagcctttggagtcctgtctgttctctgacctctgacccagaactgtgtgttccaaccacttcccagtctgttgtcctggctcaaaacaaagtgaacgaaagctctttcctcaagccctgctctcatactccagggctctgtgaaaatgagtggtatgggcacatggctgtcaggactggccgttgtctgaaagcaaacctcaaggacaggacttctggactccgcatccacttcaggctgctgctccatcgcatgaattccagcagaattatactgtgtagaaattcaaatgaaacttgcaaaatacttttctggcaggaagccctggagaggatcgttcatggaaacaaggatgacgactgggtgacttacacagaagccctgatgcccctgataaaactgatgaccatcgaatggaaagaactgaatctccctaaaccccacgtctgcggcaaagtcttcgtggtgaaacagatgacaaatccggatgtttctattgcatggttgttatttgccacatgcttcctggacaagtttctaggtaaccttaatgtctgtgcttctggggaaggaggagtagaaaataactcacctcttcaacaaatgtctgagggaactatacctgctttgataagggttgagtcaaaagtagatgaaggaactgctatgaatagaaaaaaggaaactcaagctgctggtaagaactatagactctgggaaatgacattaataatatgcagcagctacttaaaggttcagaagagtgagcagaagcatatggatcttgacgagaaatccatgcttggaggaggcaagggaaattaa

SEQ ID NO: 27615 - DNA, 3822 bp, Homo sapiens
  SIMILAR (3597)..(3773): 271254mologous to Homo sapiens putative p150,accession number U93563,Smith-Waterman Score=43.
atgactgtatttgaagataaggcctttggaaggataggagccagaagcgctggtgcaagtcaagccttcatcgacattttgaccacacacgtaatgggtttttcagctggaagtctgacgatccagccagccagtgcttctcagcccccttgcagtaagaagcagccagtgggagctcagatgaggcaggaatctagctcccgtaggcctgacagtacctcaggcagcgattcgcgaagggccatctgcagatttttgagggtccctgaatccaatttaggaaggtatgaagtcaaaactcttcgtaacaatagtaagacgtttgcctttgtcactgtgttgatatttgtactgatgcccttggctgcaagtaaggcaggggctgtcgagttggcagctgagtgtgcagctaagaagaaaaggagaacgggctctgagagggctcgggacctgcagtctgccatgcctgagcctcccacccactccatgggctcctgtgtggcccgagcctccccgacgagctccaccccctgctccacggcgcccagtcccatcgaccacccaagggctgaggaatgcgagcgcatggcgcaggactggcaggcagctccacctgcagccccggtgcgggatccactaggtgaagccagctgggctcctgagtctggaactaacatttccattacacctggaaatgccacatttgtgacccgggtgcagggacaggcttggtttgcctcatgtatcactggtcatgatatgtctagtttaaaaacttccagtgtcgtggtattaaggagacaatctgaggcacttctaccagccaatttgacatgcaattggcaagattcttctgcccttgccaccttagaaagtgccctgtcccaggtcagacacaaaagattcacatttacacttatggtctttacaggctcagccatagacattatggcaactgttagcattgctgttgtatctattactgaatcagtacaaacaactgcttttgtagataatctggccaaaaatatatgtgatgaacttctcctacaggacatggatgaagctggaaaccaacattctcagcaaaataacacaagaacagaaaaccaaacaccacatgttctcactcataagtgggagttgaacaatgagaacatacggatacagggaggggaacattacatactggggcctgttggtggcaggttgccaacatccaaactcgctgttgattgccagctcctgctccttgcagcagcccagcatgctctctgctggtgccaaaatacccttccaccaaaccccgctaacttctggaactgtcctagagggtttcctaccctagcaagtgagcttgcctatgtcagccctaaccttgctcttgtcattcagctgagccagaggaaaaaatttgagctattctggggtggtctacagagaaccatcttctttcccttcagtgttctcagaatattgactgttgatgaacaagccaatgatgtgagtgtggctgcagcaaggacccttcaaattttcagagatgacatgattgtatatctagaaaaccccattgtctcagcccaaaatctccttaagctgataagcaacttcagcaaaatctcaggatacaaaatcaatgtacaaaaatcacaagcattcttatacaccaacaacagacaaacagagagccaaatcatgagtgaactcccattcacaactgcttcaaagagaataaaatacctaggaatccaacttacaagggatgtgaaggacctcttcaaggagaactacaaatcactgctcaaggaaataaaagaggatacaaacaaatggaagaacattccatgctcatgggtaggaaaaatcaatatcgtgaaaatggccatactgcccaaggtaatttacagattcagtgccatccccatcaagctaccaatgactttcttcacagaattggaaaaaactactttaaagttcatatggaaccaaaaaagagcccacactgccaagtcaatcctaagtcaaaagaacaaagctggaggcatcacactacctgacttcaaactatactacaaggctacagtaaccaaaacagcatggtactggtaccaaaacagagatatagatcaatggaacagaacagagccctcagaaataacgctgcttatctacaactatctgatctttgacaaacctgagaaaaacaagcaatggggaaaggattccctatttaataaatggtgctgggaaaactggctagccatatgtaggaagctgaaactggatcccttccttataccttatacaaaaatcaattcaagatggattaaagacttaaatgttagacctaaaaccataaaaaccctagaagaaaacctaggcattaccattcaggacataggcatgggcaaggacttcttgtctaaaacaccaaaagcaatggcaacaaaagacaaaattgacaaatgggatctgattaaactaaagagcttctgcacagcaaaagagcttctgcacagcaaaagaaactaccatcagagtgaacaggcaacttacaaaatgggagaaatattaaaccttcttaatttatctggcaattcagagatttctttttcaactgcaaccattgctgaggatctgggatttttgccctggtgtaccagaagaatcggatcacacctgggcttggagaatgagtgccaggttttactgagtggaagtagctctcagcagatgaaggagccagaagggagatggagtgggaaggtttcccctggagtcgggcctctcagcagctggactcttctccaactgccctggccaaactccgcattgttctgccggtggatggcctgcctgagtgctgggtcttcgggtttttatacgcacaggatcggggtatggtgggccaggggtgtcttggaaaatgcaacgtttgggcacaaaggcaagagtgcctgtcctcacctaagtccgtgggcctatgcccgagggacacaatatccttttttcaagcctgttctttggaagacgagttctcattatagttgcatggtaacaccaatccctggtaacaccagagtaaatggtcagtgccataaggctatgtctgggcagtttaactgcagtctcatgctgtaccaaacatcacgcactttgaccatcaatcaggtcctgcaactgattacctcaggcaatgaggggcttagtacacgggccagcggctgcggagggtgtactgggtcccccagcagtgccagcccacctgcgctgcgctggatttctcaccaagccttagctgccttcccgcggggcagggctcaggacctacagccagccatgcctgagcctcccacccactccatgggctcctgtgcagcccgagcctccccaatgagcgcctccccctgctccacggcgcccagtcccatcgaccacccaagggctgaggagtgccggcggacgacacctggactggcaggcagctccacctgcagccccggtgcgggatccactgggtgaagccagctgggctcctgaatctggtggggaagtggagaacctttatgtctagctcagggattgtcttgaagtcagtgagaccaagaacccaccaattccggacacaagagcagagcagacggcatcagctggagcctggaagggcagtcatgccctgtgtttctgggacaaacgtcccttcacagatagagttttgctcatctccccgctgctggtggagcaggggccaggtgaaggggacctggagagaggggcggctgcgtagctgggacagccccaagctgtcaaacccaagct

SEQ ID NO: 27616 - DNA, 439 bp, Homo sapiens; identical to SEQ ID NO: 18593
  SIMILAR (293)..(436): 771254mologous to Homo sapiens neutral protease large subunit,accession number M27826,Smith-Waterman Score=186.
  misc_feature (1)...(439): n = a,t,c or g

SEQ ID NO: 27617 - DNA, 381 bp, Homo sapiens; identical to SEQ ID NO: 5723
  SIMILAR (295)..(236): 501254mologous to Homo sapiens Human secreted protein, SEQ ID NO: 5576,accession number G01495,Smith-Waterman Score=64.

SEQ ID NO: 27618 - DNA, 357 bp, Homo sapiens; identical to SEQ ID NO: 443
  SIMILAR (148)..(279): 481254mologous to Human T-cell lymphotropic virus type 1 Gag,accession number S74562,Smith-Waterman Score=143.

SEQ ID NO: 27619 - DNA, 534 bp, Homo sapiens; identical to SEQ ID NO: 15685
  SIMILAR (322)..(251): 831254mologous to Homo sapiens Human secreted protein, SEQ ID NO: 5576,accession number G01495,Smith-Waterman Score=93.

SEQ ID NO: 27620 - DNA, 1685 bp, Homo sapiens
  SIMILAR (710)..(847): 761254mologous to Homo sapiens Human secreted protein, SEQ ID NO: 5210,accession number G01129,Smith-Waterman Score=188.
atggtctccactctgctaaagatcaattctgagaaggaagagttcacaatgtaccctaagataattcataaactgaagatggaagaagaactgtctgagtccccccaggatgtcataacaaaggtgatggaagccctagatgcagcaggcagcctgctctgtgggagagactcagcccccctgcacccaggtgaaataaacagctttattgctcacacaaagcctgtttggtggtctcttcacacggactcacatgaaatttggtgccgtgactcggatcgggggacctcccttgggggatcaatcccctgtcctcctgctctttgctccgtgaaaaagatccacttacgatctcagggcctcagacccaccagcccaaggaacatctcaccaattttaaatcaggaccccactgaaaatcggactgttcaactgcacctggcagccactcccagagcccctggaactctggcccaaggcgctctgactgactccttcccagatcttctcagcttagcagctgaagactgacactgcccgatcacctcggaagccccgtagaccatcacggacgccgagcttccggtaactctcacagtggaagactcagcccgcctgcacccaggtgaaataaacggccatgttgctcacacaaagcctgtttggtggtctcttcacacggacgcgtgtgaaatttggtgccaagacccgggacttggatcaggggacttcccttgggagatcactcccctgtcctcctactctttgctccatgagaaagatccacctacgacctcaggtcctcagaccgaccagcccaagaaacatctcaccaatttcaaatccaagacaaaggagacaggttttatccatggacccaaaactccggcaccggtcacggactgggaaggcagccttcccttggtgtttaatcattgcagggacacctctctgattattcacccatgtttcaagggtgtcagaccacgcagggatgcctgccttggtccttcacccttagcggcaagtcccgcttttctggagaaggggcaagatttaattaacctcgccttcaaggtgtacaataatagaaaaaagttgcaattccttgcctccactgtgagacaaaccgcagccacatctccagcacacaagaacttccaaatgcctgaaccgcagcggccaggcgttcctccagaacctcctcccacaggagcttgctacatgtgccggaaatctggccactgggccaaggaatgcccgcagcccgggattcctcctaagccgcgtcccatctgtgtaggaccccaccgaaaatcggactgttcaacttacctggcagccactcccagagcccctggaaatctggcccaaggctctctgactgactccttcccagatcttctcggcttagcagctgaagactgacactgcacgatcgcctcggaagccccctagaccattcacggacgccgagcttcgcgtaactctcacagtggaagcccctggcccacagcctggtaccctggagctccataaatacctgttgagtgaatgagaggatgaaggcttctgcagagagagagtggaagaaaagtggcgtcttttgacttcggacttggctttccttgcagaggcctcagggaggaacaacacggaaacaaagatggccttgtcctgggccc

SEQ ID NO: 27621 - DNA, 1071 bp, Homo sapiens
  SIMILAR (718)..(1068): 971254mologous to synthetic construct chloramphenicol acetyltransferase,accession number A02739,Smith-Waterman Score=631.
ttttccgatatgcttcgtgatctgctcaagaacgttgatcttaaagggttccaccctcatgtaggtattttggttaccaaatacagcaatagtaacggccccccctcacagtggatggaggagcaaaaaaaggatgcctggggaagcatggttctaaaaaatgttgtacgtgaaacggatgaagttggtaaagcaagtcagaagcagaaggcttggttgctgccagccaggcaagggacagcctccagcagagtccacccacccacagttgtctccttagaacaaacagaaagtttcacacgcacactttgttcagttctgcagcttaccagttttcccatcttcaaaacaggagagaaaattggcgggcactttgcagggctgctgggaggaggagaaatggagcaggcccggacacctgtctgcagcatggataagtatgacgacctgggcctggaggccagtaaattcatcgaggacctgaacatgtatgaggcctctaaggatgggctcttccgagtggacaagggtgcaggcaacaaccccgagtttgaggaaactcgcagggtgttcgccaccaagatggccaaaatccacctccagcagcagcagcagcagctcctgcaggaggagactctgcccagggggagtagaggccctgtcaatggagggggccgccatgggcccacaggcccgccagctggcgaggatgacggggcagaactgaaaagtgaataccacgacgatttccggcagtttctacacatatattcgcaagatgtggcgtgttacggtgaaaacctggcctatttccctaaagggtttattgagaatatgtttttcgtctcagccaatccctgggtgagtttcaccagttttgatttaaacgtggccaatatggacaactttttcgcccccgttttcaccatgggcaaatattatacgcaaggcgacaaggtgctgatgccgctggcgattcaggttcatcatgccgtttgtgatggcttccatgtcggcagaatgcttaatgaattacaacagtactgcgatgagtggcagggcggggcgtaa

SEQ ID NO: 27622 - DNA, 527 bp, Homo sapiens
  SIMILAR (219)..(524): 831254mologous to Homo sapiens dJ794I6.2 (novel protein),accession number AL109976,Smith-Waterman Score=428.
ccaggtgggaccagccgtgggggcagaggcactgggccgactgtgatggggtgtcagagatgggacagggacagtgggcaggagtgtgggtgcatgggcacgtcggcagggtcccctcaccttccccctggagccctttctccctgagatcccctccctccagggcctccccctgccacacgctggagagggctgaggcctgtgggtgtgtgtccacagtcttctggaagtactactatgggcattacttggacgactatcacacaaaaaggacttcatcccttgtcagcctgtcaggcctcggcgccagcctcaacgccagcctccacactgccctcaacgccagcttcctcgccagccccacggagctgccctcggccacacactcaggccaggcgaccgccgtgctcagcctcctcatcatgctgggcacgctctggctgggctacaccctctaccaattcgggggtccttctagagtcgacccagcggcgcattctagtctcgaccttgctacttccatttaa

SEQ ID NO: 27623 - DNA, 1912 bp, Homo sapiens
  SIMILAR (962)..(1033): 791254mologous to Homo sapiens RPB11b1beta protein,accession number AJ277740,Smith-Waterman Score=101.
atcacaagagaagcagacaagggaaccaacactaactgtaggcagcaggaacaggctaaatatagcaaccagaagacaggaaagacgcccagtctttcttgagcagatgggtgaacaagaagtgggaagtaaaggaaacggaaagtctcaaggagaaaaagtggaaaggccacggatgttcggaggaagctgtggtgtacacaagggcaaaacacatacacggcctagaggcctaggagggaagaatggttttgtgggctgggcccagggccctgctaccctgcacaaacctgggacactgctccttgtatcccagttgcttctgttccatccatggctaaaagggcctaagatatcgcaggctgttgctccagagggtgcaacccataaaccttggcagctttcacatagtgttaagcctgtgggtgttgagaggacaagagttgaggcttgggaacctccacctagatttcagaggatgtatggaaactgctggatggtggaagttggctatagggctgagccctcatggagaacctctactagggcagtgcagaggggaaatgtgggattggagcctccacacagagtctccgctggggcactgcctagtggagttgtgacaagagggccactgtcctccagaccccagaatggtagatctattgacagcttgtactgtgtgcctggaaatgccacagtcactaaatgccagcttgtgaaagcagctgagggggctgtaccctgcagagccccaagcagggagatccccaaggccttggaagcccaccccttgcatgagtgttgtctggatgtgagacatggagtcaaaggagatcattttggagctttaagatttaatgactgccctgctgggtttcagacttacatggggcctgtagcccctttgttttggctgatttctccctttcagaatgggcatatttacccagtcctcttctttgccttccgccaagattgtaaatttcctgaggcctccccagccatgcttcctgtacagcctgaagaactcaaaaacctgaagaaggtgaagtacccgctttgcagcaaatatgcaagaacagcaagtgctaaggccctaatgcaggatcttcggtgttcaaggagatcacaaagtgaccgtaactttattaaattaatgtcaaatggtgacaattcactgggcatagaagttttagggtactccagatacattgtgcatcctcctgtggttgtaaggttacttactagttttcaaagctactgtagagctcgaaagagggtgacaggaatagggtggacaactctagaggactaccccagccccagagggttccagcagcaactgcaaagcggtcggtttagctctctccctgccagtgttgcttctttcactccccagggactggaggctgggaaattctggacagaagagggcaggtccctggtgagggacccacccttgagcctggagctgtggcccaaacatccctgttttcccgctggaaagttgccttttccaaaaccacccacggcctgccccactcctcatcccatgccaataaaaaaccctatacccataaaaaccccaggttctgccagcagagaggggagaggaagagaagaggagaagcagctagacattggagactatggtttgacgtcaaagagaagcagcttgacttcagagggatggtttgatggtgtcgctttggaaagccggactccaggggaagatcatcttcctgctccatccccttctcagctccccttcccactgagagccactttcatcagcaataaaatcttctgcattcatcacctttcaattcagccgtgcgacctgatttttccagatgccaaaaaagagcttggacaccaagcgtgtggatgcaaaaggctgtcacactga

SEQ ID NO: 27624 - DNA, 1050 bp, Homo sapiens
  SIMILAR (520)..(434): 681254mologous to Homo sapiens Human secreted protein, SEQ ID NO: 6716,accession number G02635,Smith-Waterman Score=110.
tttcgtgtcgggatggaagcttcctggcgccgggtggccggtggccgaggccgatcccggggacgggccactgccgccccctcaggaaatggagtccatctccgcggcgccggaggagggcgagagaaggggtcggtgggcgcagttccttctggcaccagtcccggaggagtcgcgaccacggcggctgcagggagcaggcacagccccgcaggatcccaagccctgcagactaccgcagccagcgagctaatgtctcagaaaaaatttgaagaaatcaagaaagctaaccaagctgcagccagaaaacttgttgaagaacagtttagctcttcatctgaagaaggagatgaagattttgaaggaaaacagggaaaaatacttgcaaatacgtttataacatacactgctcagacaggctcgtcgggggacccctcggacgcggtctcctgtacccactttccaaccagtcccaacgagatgaaccaggtacctcacttggaaatgcagaaatcacctgcagaaatcacatatctgcagaaatgcagaagtcacatatctgcagaaatgcagaagtcacatatctgcagaaatgcagaagtcacatatctgcagaaatgcagaagtcacatatctgcagaaatgcaaaagtcacgtttctgcagaaatgcagaagtcacatatctgcagaaatgcagaagtcacgtttctgcagaaatgcagaagtcacatatctgcagaaatgcagaagtcacgtttctgcagaaatgcagaagtcacgtttctgcagaaatgcagaagtcacgtttctgcagaaatgcagaagtcacgtttctgcagaaatgcagaagtcacgtttctgcagaaatgcagaagtcacgtatctgcagaaatgcagaagtcacgtttctgcagaaatgcagaaatcacctgtcttctgtgttgatctcgctgggagctgtagaccagagctgttcctattcagcaactcccccatcaaaacaatttcttattcaacatactagcagagctaggattgcaaatgggtag

SEQ ID NO: 27625 - DNA, 1218 bp, Homo sapiens
  SIMILAR (531)..(587): 891254mologous to Homo sapiens Human secreted protein, SEQ ID NO: 7102,accession number G03021,Smith-Waterman Score=88.
tcaatgcagcattatcaaatctaggacactatctggattgataccactctcagcaaacacaatgaccttgctggcatcttcctgcaagaggttgatgggacaggatggctgggggcagctcaaatacctttggctttccccctcctcctctcccatatcgctcctgtgagaggtgacagcgtgatggcggccctcgcagccctggctcgctctcggtgcccccttggcctcggcgcccattctggccgcacttgaggagcccttcagcccgccgctgcaccgtgggagaccttctctgggctggccgaggccggagctggctccctcggcacaaaggtctgcagcttcactcctgaagccagcaaagaccacgaacccaccaggaagaaggaacaactccagacacgcagccttaagagctgtaacactcactgccaaggtcttcagcttcactcgctttgggtccacactacctttatgagctgtaacattcactgtgaaagtctgcagcttcactcctgaagtcagtgagaccacgaacccaccagaaggaagaaactctggacacatctgagcatctgaaggaacaaactccagacacaccatctttaagaactgtaacaccgcgagggtccgtggcttcattccaattcctgagatcttattgggaagctgctgatcagcagtttcaggtgtttctatcagttgggagactgcctttcccagtgctggctgcaaccacttattatttgagaaattaacaactgcctgaacatcacctgatggttgcctgtagttccctgtactctttaaccaatcaacaatctccatactttggcccactccaaagcccttaaagaccctagccccaaactcatcagggagatggatttgaggtcttttcccatctctttgttctgcgacctcatgatcaaacatctttctctgctgcaaatccagtgtctcagtatactgacttgacgtcctgctggcaggactccggagtctgcattcttccccacatggtgccctgcattttccactggcagccaaagcctcttgataggtcagagtacaggaccgtgacacagcttcaggaagtcctgatgacatgtgcgcaaggtggtcagggcacagcttggttttatacattttagggagacatgagacatcaatcgatatatgtaagaagtacattggttcagtcatcctcagcat

SEQ ID NO: 27626 - DNA, 2087 bp, Homo sapiens
  SIMILAR (273)..(503): 341254mologous to Zea mays cell wall protein (put.); putative,accession number M36914,Smith-Waterman Score=79.
ccttggcgcccattctggccacacttgaggagcccttcagcccgccgctgcaccgtgggagcccttctctgggctggccgaggcgggagccagctccctcggctttcggggaggtgtggagggagaggcacgggtgggaaccgggactgtgcatggtgcctgtgggccagctagagttccgggtgggcgtgggcttggcggccctgcacttggagcagctggccagccctgccggccccaggcagtcttcagcttcactcctgaagctagcgagaccaccaaacccccagaaggaagaaactccgaacacatccttacatcagaaggaacaaactccggacacgctgcctttaggaactgttacactcaccgcagctgctgccaccccagacccagtcccagatccttctcctactcctattattcctcccccttataaatctgactcttgggaattaccaccaccccatgagtctgctccttgtcagcctaagtatccttccctaaagggactacaacgtgaagtacagcaatgtaaaaaagatattcaaaatcttcctttcccctctacctctaaggaatcagctccaactatcttccctttgagagaggtgccccagggaggaggagctattggctttgtaaatgctcctttgactagttcagaagttagaggtttaaggaaagaatttaagccattgctagatgacccatatggggtagcagaccaaattaatcaattcctaggcccccagttatatacgtgggctgaattaatgtctatcctgggaattataaagggtccaaacccctgtttggaggacccaagcctccaactaggggacctggaccctcagttaccaggccctctaaagagtatggaggagcaacgtcaaagaatcccggaactgagggagaggaagaatagaataggtgcttcaaatgtggaagagcaggccacttcaaaagagaatgcccccagtgggaaaaagaaaaagaaattgttctgctcatggcattcaaggaggaataaggagttatttcttgtggggatctccaaagccagagacagcttgcagcagcagagaaatatctctgccccatccacagcagatgcttctaaattgtttaagtacctgttttgtcatacttgggaatatgtcatttggaccactcaatgtcaagactgggtcccctcagaggatttcccgctagcagttctaaagccctataaccattttactaaaggaagtgcccctcccaactgtcaacataaccagtgtaaccctgtgcaaatttccatcaccatcccaactctccaagattcctcccctaccctaaactgtttttatggtatgggagcagatgtaacaggaaaagaccctataggtttcttcgagttgcacctcattacatcctcatccctcacatttccacctctatcctcttctaaacctgctgaccagaccactgtctcttctccacctaatgacaaaaccaacatagctattgtagaggttaaaaatttaaaacaaacactggcaattgaaaaaggataccacgatgcaaatgcctggatggaatggattgaatattctgttcgcactctaaataaaagtgactattacgcttgtgcgcatggtaggccagaggcccaagttatcccctttccacttggatggttttctgaccagctgggcatgagctgtaaggtggcacttttccaagaccccacagcctggggtaatgaattctgtcgaactttctgctattccctgaagttcaacatcgtgcagatgaaaaaactgaggcacagagagattaagaaacttgttctcaggttatacacttgcacagctcgagcgctttccgcggggtttggctcctgtcgcttcccgtctcgccgaaccggcatcgccgccgccggagccgcagcgagtcctcagagcctggctgctggcggccgggagcgccgggacggggcgcgaagccggaggctccgggacgtggatacagcccatttcagtatcggcgtcgcagtcgcttttgttgcagccttgggtccggagtgtacgactttctgctag

SEQ ID NO: 27627 - DNA, 412 bp, Homo sapiens; identical to SEQ ID NO: 22545
  SIMILAR (3)..(395): 491254mologous to Rattus norvegicus MEGF6,accession number AB011532,Smith-Waterman Score=395.

SEQ ID NO: 27628 - DNA, 390 bp, Homo sapiens; identical to SEQ ID NO: 22546
  SIMILAR (2)..(382): 541254mologous to Rattus norvegicus MEGF6,accession number AB011532,Smith-Waterman Score=441.

SEQ ID NO: 27629 - DNA, 2295 bp, Homo sapiens; identical to SEQ ID NO: 8023
  SIMILAR (82)..(429): 401254mologous to Rattus norvegicus MEGF6,accession number AB011532,Smith-Waterman Score=253.

SEQ ID NO: 27630 - DNA, 1074 bp, Homo sapiens
  SIMILAR (129)..(692): 431254mologous to Rattus norvegicus MEGF6,accession number AB011532,Smith-Waterman Score=475.
atgggttggggccagggccctgatgtccagctaatgaatggccatgagaggtcaccaagccattctccccgagaggcgaagaaatctggttctcccttacccactgatatccactgtttctctcctcaatctcagcctgcgatggtgatcactggggtccccactgcaccagccggtgccagtgcaaaaatggggctctgtgcaaccccatcaccggggcttgccactgtgctgcgggcttccggggctggcgctgcgaggaccgctgtgagcagggcacctatggtaacgactgtcatcagagatgccagtgccagaatggagccacctgcgaccacgtcacgggggaatgccgctgcccaccaggatacaccggagccttctgtgaggatctttgtcctcctggtaaacatggtccacagtgtgagcagagatgcccttgtcaaaatggaggagtgtgtcatcacgtcactggagaatgctcttgcccttctggctggatgttgtctttccctggctggaggcccatctaattttccaagtctctttgaatgcagggcacagtgtgtggtcagccttgccccgagggtcgctttggaaagaactgttcccaagaatgccagtgccataatggagggacgtgtgatgctgccacaggccaatgtcattgcagtccaggatacacaggggaacgagcagcagttccggatgttagaaaggtgccaggatgagtgtcctgttgggacctatggcgttctctgtgctgagacctgccagtgtgtcaacggagggaagtgttaccacgtgagcggcgcatgcctctgtgaagcaggctttgctggcgagcgctgcgaagcacgcctgtgtcctgaggggctctacggcatcaaatgtgacaaacggtgtccctgccacctggaaaacactcatagtataagtcttattgcagcaaaaaaaagtaactccttacatgctatagcattagactttagagcacagtgccaaagtgtcaaggaccgatgtcatgcatcggatctccccatcgacatcgtctctactgaaacccttagataa

SEQ ID NO: 27631 - DNA, 1299 bp, Homo sapiens
  SIMILAR (925)..(1287): 901254mologous to Homo sapiens pot. ORF I,accession number X03145,Smith-Waterman Score=575.
cttcgtattggtcaggcctttattacaagtatagcagtaaagtaaatgggatttcaattttggggaaccatgggcatagtctcagagagtaaatcataattggtgcatatttgaacgtgtatccaaatccactccttgaaggacttaataaaaggcatcagaaaaccaacttcgacaccaccagaaaccactgctgcagctaccccaacccctattccttttcccctataggaaaaaactaagaaactcaagaggagtcatcagaattcctgccatgtgggagtcatcaacccaatgggtgacttcttttctgctccacatataagagatgcctgtgcaactggggcccctgctaggcctactgaagagcctgcccatgccctgcccttcagcagtgtccagacatctgccacaggcacagttggccatcccgtgtgcaccacagcagcagcagctaagcagatgcctgtcctttccttcatccctgctccaagaccccaacactccaggagatacagaaaagacgaaggaagagcgggaagcagaggagcaggagagaagcaatgtacacacaattcccccaggtggctacagaacactgtcagcaatcagggatccagcatgcctggatttcagtctcacgtgccctctctgctgggagcctttgtgcagtgcacaaactgcacgcgtgtatgtagtagccctgctaataagatctttacaaccttcagattaggagatccccttgtgagcccatgccatcagggttttgggtccaacacacactgctgtgtggagtcttggcagagcagctgctccggcatgcacaaagacctgggagctttacatactccagccccaggatccccaacaaatgtggctgcaactcaggcaaggagggagcctcgctgccgccttgcagttctgtcaacattagacagatcaacgagacagaaagttaacaaggatatccaggaattgaactcagctctacaccaagcggacctaacagacatctacagaactctccaccccaaatcaacagaatacacattcttctcagaaccacatcgcacttattccaaaactgaccacttagttggaagtaaaggactcctcagcaaatgtaaaagaacagaaattataacaaactgtctctcagaccacagtgcaatcaaactagaactcaggattaagaaactcactcaaaactgctcaactacctggaaactgaacaacctgctcctgaatgactactgggtacataacgaaatgaaggcagaaatagatgttctttga

SEQ ID NO: 27632 - DNA, 1332 bp, Homo sapiens
  SIMILAR (630)..(785): 481254mologous to Drosophila melanogaster BcDNA.GH03529,accession number AF145617,Smith-Waterman Score=156.
gaaaaaactaagaaactcaagaggagtcatcagaattcctgccatgtgggagtcatcaacccaatgggtgacttcttttctgctccacatataagagatgcctgtgcaactggggcccctgctaggcctactgaagagcctgcccatgccctgcccttcagcagtgtccagacatctgccacaggcacagttggccatcccgtgtgcaccacagcagcagcagctaagcagatgcctgtcctttccttcatccctgctccaagaccccaacactccaggagatacagaaaagacgaaggaagagcgggaagcagaggagcaggagagaagcaatgtacacacaattcccccaggtggctacagaacactgtcagcaatcagggatccagcatgcctggatttcagtctcacgtgccctctctgctgggagcctttgtgcagtgcacaaactgcacgcgtgtatgtagtagccctgctaataaggaagccagctgctatgatattcggatgctcaagcagccatatggagagaccaacacaaccacaattgaactgggctgtgggaaacttggagcaatttcccaggagagcaggaaagacaaaggcttaaagaagaagggccatgcgacacctgtgaggatctttgtcctcctggtaaacatggtccacagtgtgagcagagatgcccttgtcaaaatggaggagtgtgtcatcacgtcactggagaatgctcttgcccttctggctggatgtcacccattccaggatactcagtgcatacacatgcaggagactttagcacaaaggaaagttaccatgatggttgaagattccaaaattggaaagactcaagccattttaaatctgaaactcttcagttctgaggagacagaagaagcttcatttctccagagaaagcgaatcattgtaagcagcgctgcttgcagcagaatcgtgaatggacaaaggagatggccaggggtcccttctccagtccagctcccattctttttgccccacatgccttgtcttctcctgctggatactgctgtaaaggaagggactgttctgatgattattttctttggggtagacttaagtctgctaactctgtttttgttagatggagaaagtcaaatggtaactcaaagttcaagttctaatgggggcgtccaggcaagtgtggcttgtaagaaggacagagggaagaggtttggggactgggtaactcactttattgcctggcaggccagctctgatggtgagagatcagttcccatggatgtgtcctgcctgtcgttggcactggttaagagaactttggaaccgtaa

SEQ ID NO: 27633 - DNA, 473 bp, Homo sapiens
  SIMILAR (301)..(336): 501254mologous to Ovis aries small proline-rich protein with paired repeat,accession number L77967,Smith-Waterman Score=36.
atgatcctcgctctgaggatggcaactgggttcctgccccatggtcgggcccctccagggctgccttagtcagcaagaggcaagcccctgcctgcccagccagcccagctccactcccattcatctccaccaaggggcatggccgcccccatgccacagagagaggccgggtgcggagggagcgtggccaccagggggtaggcccagcccgcagttgccgctgcgtggcagggtggggaggagccactcccaggagtgactcaccaggcctggctgttctcttcagggttgtttacgactcccccgactcccccgtgtgagtcagaaacacagccttcctcggcttcctccttcccaggggaaagataggggttttgattatttaaagtgcgtgttgatctgcaatggcaccattctgctcagtcaaaacgaattccaccacatggactagggatcgacaaatggtctcaaaa

SEQ ID NO: 27634 - DNA, 1058 bp, Homo sapiens
  SIMILAR (600)..(1046): 511254mologous to Homo sapiens unnamed protein product,accession number AX061636,Smith-Waterman Score=413.
tttcgtgttttgactgagcagaatggtgccattgcagatcaacacgcactttaaataatcaaaacccctatctttcccctgggaaggaggaagccgaggaaggctgtgtttctgactcacacgggggagtcgggggagtcgtaaacaaccctgaagaagaacagccaggcctgttcccgcaagcccagacaatgccggtggaggaatttgtggctggctggatctctggcgctctgggcttggtcctgggacacccgtttgacactgtaaaggtgaggctgcaaacccataccacctaccggggcattgttgattgcatggtcaagatttaccgccatgagtccctcctgggctttttcaagggaatgagcttccccattgccagcatagctgtggacaactctgtcctgtttggggtctatagcaacaccctgctggtgctcacggccacctcccaccaggagcggcgggcccagccgcccagctacatgcacatcttcctagcgggctgcaccggggggttcctgcaggcctactgtctggctccttttgacctcatcaaagtccggctacaaaaccagacagagccaagggcccagccagggagccccccaccccggtaccaggggcccgtgcactgtgcagcctccatcttccgggaggaggggccccgggggctgttccgaggagcctgggccctgacgctgagggacacccccacggtggggatctacttcatcacctatgaagggctctgtcgccagtacacaccagaaggccagaatcccagctcagccacggtgctggtggcagggggctttgcaggcattgcttcctgggtggcagccacgcccttagacgtgatcaagtcccggatgcagatggatggactgagacgcagagtgtaccaggggatgctggactgcatggtgagcagcatccggcaggaaggactgggagtcttcttccggggggtcaccatcaacagtgcccgcgcctttcccgtcaatgctgtcaccttcctcagctacgaatatctcctccgctggtggggatga

SEQ ID NO: 27635 - DNA, 1116 bp, Homo sapiens
  SIMILAR (573)..(620): 621254mologous to Homo sapiens Human secreted protein, SEQ ID NO: 7420,accession number G03339,Smith-Waterman Score=50.
ttatagctcatttgggagtccttccgttgagtcagagagtaagaaaagattcatgtggttcagctgtccaagggtactgagcgtgagaaaccagcacaaagtgaaggctcccttaggatggcctctcttattcccactgctgtgccattccacaatgcttgtcttctcaccctcagcagtatgacaggtgctacactcagagcatcttctgaaacagcctccaagctgcacccctgcttcctttgcttttggatgaccccctccagcagctttggtgctgatgggaataagtcgactggtagttgctctgggtttcccagggatggagctctcagaagaaaccaacagcttctccgctatggctcctgcagtggttctgcccttgctgccccaggaccagggctgattgtaccaactggtagtggctctgcatatctctgcagtggagccccaagaaacaagtgaaagtcctgctgccacaaccattgccaaggtcccatctcttgcttcctccaagcttaagtcatctctctcaagttcaaagttccaaagatctctggggaaggggcaaaatgccaccagtctctttattaaatcatgacaagagtcacctttgctccagttcccaacaagttcctcatctctatctgagaccacctcagcctgaactttattgtccctatcactatcagcattttggtcaaagccattcagcaagtctctaggaaactccacactttcccacattttcctgttttcttccaagccctccacagtgttccaacctctgacttcaaaccataccacaaggccacagtaatcaaaacagcatggtactggtacaaaaacagacacatacaccaactgaacagaatagagagcccagaaataatgccagacagcttcctgctgttcccacacctgccaaattccatccctctttctggaaaaatctcccactagaacttgagaagcttcagtcacatcatttagatttctgcttgatagcttctcctcagagaggctttccttgagatcattaattagcacagcagaactagctctctgttggttagtgattatcatgctttcttccattatttcactttcaaccat

SEQ ID NO: 27636 - DNA, 477 bp, Homo sapiens
  SIMILAR (1)..(474): 1001254mologous to Homo sapiens basic transcription factor 3a,accession number M90357,Smith-Waterman Score=812.
atgcgacggacaggcgcacccgctcaggctgactctcgggggcgaggtcgagccaggggcggctgccctgggggcgaggcgacgctgtctcaacctccacctcgcggcggaacccgaggagaggagcctcagatgaaagaaacaatcatgaaccaggaaaaactcgccaaactgcaggcacaagtgcgcattggtgggaaagtgaatatgtttacaaaccaaggaacagtgatccactttaacaaccctaaagttcaggcatctctggcagcgaacactttcaccattacaggccatgctgagacaaagcagctgacagaaatgctacccagcatcttaaaccagcttggtgcggatagtctgactagtttaaggagactggccgaagctctgcccaaacaatctgtggatggaaaagcaccacttgctactggagaggatgatgatgatgaagttccaggaggcttccaagaatga

SEQ ID NO: 27637 - DNA, 464 bp, Homo sapiens
  SIMILAR (62)..(463): 991254mologous to Homo sapiens Human secreted protein, SEQ ID NO: 5114,accession number G01033,Smith-Waterman Score=680.
ccaagccggaggggtcctgaggtgacagcgcctgcaactgaaatttcagcagcgggagaagatggacaagagaaagctcgggcgacggccatcttcatccgaaatcatcacagaaggaaaaaggaaaaagtcatcttctgatttatcggagataagaaagatgttaaatgcaaaaccagaggatgtccatgttcaatcaccactgtccaaattcagaagctcagaacgctggactctccctttgcaggtgtgggaaagaagcctaaggaataaagtcatctctctagaccataaaaataaaaaacatatccgagggtgtcctgttacttccaagtcatcaccagaaaggcaactcaaagttatgttgacgaatgtcctatggacggatttaggacgaaaattcagaaagaccctacctagaaacgatgctaatttatgtgatgccaacaaggtgcaatcagacg

SEQ ID NO: 27638 - DNA, 1263 bp, Homo sapiens
  SIMILAR (754)..(1260): 901254mologous to Homo sapiens general transcription factor,accession number X53280,Smith-Waterman Score=768.
atggggaatttaaagaatttctctcaacttcaggaggatgccaaacaagccactattagcaaatttgaagaccttaacagtggaagtagaggttgtgatcatctcgaacaggaaagcagaaacaaggatgttaaatattctgattcaaaagtggaactcactctgatttccaggaagacaaagagaaggcttagaaataatttacctgattctcaatattgtacttctttggataagtcaacagaacagacaaaaaaacaagaagatgactcaacaatatccactgagtttgaaaagccaagtgaaaactatcatcaggatccaaaactgcctgaagaaattacaactaaacctacaaaaagtgattttactaaactatcctcacttaacagtcaggagttgactttgagtaatgccaccaaaagtgcctctgccggttcaaccactgaaaccgttgagaactctaattccattgatattgtggggatttcttccctggttgagaaggatgagaatgagttgaataccatagaaaagcctattctaagaggacataatgaagggaaccaatcactgatctcagctgaaccaaattgttttggttcttctgagcctctagcaattaatcatcagatcagtttgtccatttctgcaaaacaggctgttggaattttgtgggaaagaagcctaaggaataaagtcatctctctagaccataaaaataaaaaacatatccgagggtgtcctgttacttccaagtcatcaccagaaaggatgaaagaaacaatcatgaatcaggaaaaacttgccaaactgcaggcacaagtgtgcattggtgggaaaggaactgctcgtagaaggaagaaggtggttcatagaacagccacagcagatgataaaaaacttcagttctccttaaagaagttaggggtaaacaatatctttggtattgaagaggtgcatatgtttacaaaccaaggaacagtgatccactttaacaaccctaaagttcaggcatctctggcagcaaacactttcaccattacaggccatgccgagacaaagcagctgacagaaatgctacccaacatcttaaaccagcttggtgtagacagtctgaacagtttaagcagactggctgaagctttgcccaaacaatccatggatggaaaagcaccacttgctactggggaggatgatgatgatgaagttcctgatcttgtggagaattttgatgaggcttccaagaatgaggcaaactga

SEQ ID NO: 27639 - DNA, 1189 bp, Homo sapiens
  SIMILAR (204)..(779): 461254mologous to Homo sapiens general transcription factor,accession number X53280,Smith-Waterman Score=301.
ccgcgtgtgtgcgcctaatctcaggtggtccacccgagaccccttgagcaccaaccctagtcccccgcgcggccccttattcgctccgacaaggtacaaaaaggctctggacggcggcgtggtaggaggacgggagcgggggcgggaagttccctgaaggagcgagacagggagggacagggcagaggaggagaaggaaggcgatgcgacggacaggcgcacccgctcaggctgactctcgggggcgaggtcgagccaggggcggctgccctgggggcgaggcgacgctgtctcaacctccacctcgcggcggaacccgaggacaggagcctcagattgaaagaaacaatcatgaaccaggaaaaaactcgccatacctgcaggcacaaagtgcgcattggtgggaaaggaactgctcgcaaaaagaagaaggtggttcatataacagccacagcaagatgacaaaaaaacttcagtttctccttaaaggaagttgaggggtaaacaatatctctggtattgaaggaggtgaatatgtttacaaacccaaggaacaagttgatccacttttaacaacccctaaaagttcagggcatctcttgggcagcgaacacttttcaccatttacagggccatgcttgagacaaaagcagctggacagaaatgctacccagcatctttaaacccagcttgggtgccggataggtctgactagttttaaggagactggcccgaagctctgccccaaaccaatctgtgggatgggaaaagcaccactttgctacttggagaggatgatggtgatgatgatgaaagttcccagatcttgtgggagtattttggatggagggttccaaggaatgaggcaaacttgaatttgagttcaactttttgaaggttaaaacctgaagaaagtttacttggggagctgctattttaatattaatggacttgctttttaagaaattttttgtttatggatctgataaaatctaggatctcttaatatttttaagccccaagcccccttgggacactggcaggctctttttcagtttttgcttatacacaattcattctttggcagctaattaaggccgcaagaggcctgggaatcaagtttgaaacaaagattaataaagttctttgcctagtaaaaaaaaaaaaaaagccgaccgcgcccgcatat

SEQ ID NO: 27640 - DNA, 611 bp, Homo sapiens
  SIMILAR (219)..(473): 691254mologous to Homo sapiens N-acetylneuraminic acid phosphate synthase,accession number AF257466,Smith-Waterman Score= 268.
ggctaatggatgggtggatgcaaatgaatgtttgcatttgaatgaaatgactgagaacaaatctttgcctgctttcaagttgctgagcgtccctctactgcctaagatgaggggtttttctacttgtatgttattccttgcctggtcataacaacagtgtttttgggacaattgggtgaaaggagctccctcttttgattttttgtagatggcagtttgaatccctgcatgaactgaatgttccatttttcaaagttggatctggagacactaataattttccttatctggaaaagacagccaaaaaagggtcgcccaatggtgatctcccagtgggatgcaagtccaatggacacccatgaagcaagtttatcagatcggtgaagcccctcaacccccaacttctggcttccttgcagtgtaccagcgcatacccgctccagcctgaggacgtcaacctgcgggtcatctcggtgagcaggagggagggggttcccttcttgggccatttactatggggaaggcgtagtcttttttataaccaaaattctaacaaacatggcatactttataatttgaacatcctttgacagtcttgctaataccaaaac

SEQ ID NO: 27641 - DNA, 1417 bp, Homo sapiens
  SIMILAR (428)..(1081): 641254mologous to Homo sapiens N-acetylneuraminic acid phosphate synthase; sialic acid synthase,accession number BC000008,Smith-Waterman Score=592.
cacctgctgtggtaccaggcacgcaagcaggcactcgaaactgctttggtggatgcagcagtggggtgcactggaaaacggaggcaaatgagggatgtcagaggtcacaagcctccaccagagactgaaggtgttgactttcaccccccacaccctccagagtgtgatggggggtttgctctctcaggggctttgccctgggttcagtgctgggaaggtactccaaatggttccttaactgaaggcgcctacactctagagggaatgacagacaaaagaggcagatgtcataaagggggctggcacagtgttttaagagatgtctgtggagttcagttgaatgatgagaccagcagttgggatgtgttggggaagagtcagaacctctaaagagaaagtgctgatggtgttggtgctggattactcaggtcgcccaatggtgatctccagtgggatgcagtcaatggacaccatgaagcaagttattcaaatcgtgaagcccctcaaccccaacttctgcttctttgcagtgtaccagcgcatacccgctccagcctgaggacgtcaaccctgccgggtcatctcggaatatcagaagctctttcctgaccattcccattagggttattctgggcatgaaacagggcatagccgatatctttggcccccagtggctctgggggcccaaggtgttgggaacgtctcacataaactttgggacaagaccggggaagggggagttgacccactcggcctcgcttggagccttggagaactggccgaagctggtgcggtcagtgcgtcttgtggagcgtgccctgggctccccaacctaagcagctgctgccctgtgagatggcctgcaattgagaacctgggcaagtctgtggtggccaaagtgaaaattccggaaggcaccattctaacaatggacatgctcaccgtgaaggtgggtgagcccaaaggctatcctcctgaagacatctttaatctagtgggcaagaaggtcctggtcactgttgaagaggatgacaccatcatggaagaattggtagataatcatggcaaaaaaatcaagtcttaaaaatccaagtgccattctttgaattctcagttcccaagctcatgctgtcaggtgtgtttgataaagaagagggcaggaatgacggtctccagggacctggctgtcatccacctccacctgctcattagacagcagatgtttctgggtgaggccctgtgtcagcccactggagacagaaaaaaatccatgtatgcaatctctccttcaagatggccagcttagtgccctggccagcagtgcattataaacagagctccagaagaaggggtggttccaagcaaagtccatatcctccagttgctgggtgtctgcagagaggggcgtacgcgtggg

SEQ ID NO: 27642 - DNA, 645 bp, Homo sapiens
  SIMILAR (525)..(343): 721254mologous to unidentified cloning vector 29kD protein essential for the replication of mini F plasmid,accession number AB015619,Smith-Waterman Score=211.
ttatgccgctggcgatccaggttcatcaagccgttttgtgatgccttccatgtcggcaagaatgcttaatgaataccaacagtactgcgatgagtggcagggcgggggcgttatttttttaaaggcagttaatggtgcccttaaacgcctggttgctacgcctgaataagtgataataagcggatgaatggcagaaattcgatgataagttttgccgtagcctatgggcgccagcccaaatggccccgcgcatggattgaaggggtgtaaaggagttgtgggtgccgtgccccctatgggattccgatccagcggaaaattcggcaaagtaaccaccagggattcgcaagaaccggcatggttccggaagggggccacagaattttctgatcgggcaacgaacagatcaagcaacggtttttgatcccgggagagactatatcccgcctcagtgaggtcgtttgactggacgattcgcgggctatttttacgtttcttgtgattgataaccgctgtttccgccatgacagatccatgtgaagtgtgacaagtttttagattgtcacacgcatggcccaagattccattccttggaatccatgaggccacgaaccccagatcagagaacacgaggcttgccaccat

SEQ ID NO: 27643 - DNA, 510 bp, Homo sapiens; identical to SEQ ID NO: 12007
  SIMILAR (153)..(308): 901254mologous to Plasmid F 96 pct identical to gp:AB021078_30,accession number AP001918,Smith-Waterman Score=269.

SEQ ID NO: 27644 - DNA, 4083 bp, Homo sapiens
  SIMILAR (861)..(4): 701254mologous to Homo sapiens cadherin-15,accession number D83542,Smith-Waterman Score=995.
tcaggctgtccggcctctgtgtctgggtagcagtgccccaggagaaagaccctccctggcctggtggtcccatctggccccgtactccaacccgcacgggtgcccatacatgtctgccagccgggcgaagcggggcccccagtctctgaggtagtcgtagtcctggtcctcatcgccctggctggacaggatggagctcagcgtccccgccaccgagccgtcaccctcgtagtcatagatgagggctgtgtcgtaaggcggcacactggggtcactatctgcagcctccaagcccgccgtggccacagcccagggcaaagtcagctcaaggcacgggctcaggaaggggaagctgcccacgtccggggggcgaaggtctacatcattgatgaagtcggcgatgtccagggggctggtgggcagcactcggggtggctgggggtgcaggcggccctgcggggcatctctgcgaagtggcggcggtcccagaggcaggctcagcgctgtcgggtgacgcagctggctgatgtcgtaggcgtcctggtcctcctccccgcctccttgctcatcgtagttgaggacattgtctcgaaggtcgtcctgggggccgtgcagcagccccttgccccgagactgcttccagaaccgcgcccggagtgccacgagcaggaccagcactggggaggaaaagggcggtggcttagtaatgagggggccggggttggcgatccaggggccgggttgggtgcaagcggcgtggctggtaatgagtgggtggtgttgcggagcaggtggaacgttgacctggctgaggctccagttccggccgagctctgggagcctggggctcagctggaagtggaagggggccccgtgggggggcaggtcctcatccgtggcgcccaggaggaggcctgggccttggtgtggctcgctgcacaggctgcccggcggcggcggggccagcacaggtgcatggtcgttcacctccaggatctcgatggacagggtgccggtggcggtgcggggctgggaggctgtgcgtgccggcatctgtgtgtgggcatctgtgtgtgtcggcatctgcgtctgccggcatctgtgtgccagccgggggccgctcaccttcacaatggacagaacaccctcgttggtcttggggtccgtgcggatggtgaactgcccatcggggtcgccttccaggatggtgaacctggccacccagtttggggagcctggcaggtccctgtcctccacttccaggcgtcccacatccactccgctgacggcctctatggcctccatgaagaaccactgggtgtcctcaggtttgtctgttttgtgagtcactgtcccccacgtgcccccatggtcctcctctgtgggctcaacttcgtgctcccttcccatacagcaaaggccggagggagacttgctctcatccctggtgaactcgggggcattgtcattgatgtcatcaaaggtgatgatggctgaagcagtggctgtgaggccgtctccagacatgtccgccacctgcagggtcagattgtacaccgcgaccaccagcggggagccgttgccatgaggctcgcggtccagccccacttgcactgtgcggatctctcctgtgagctcgtcgatgctgaagagctcggggctgccctgctgcaggatggagaaccgcagcgctgcgttgtccgtctcggggtcgtcggcatctgtggcctctgccctggtcacataggtgcctgggactgcaccctccagcacgcggccagtgaacgcctcctgcaggaaggctggccggttgtcattctgatccacaactacaatctccaggtccgtggggtcctccagggtggatcctcccaggtccagggcaaaccctcttagctgttcaaacatagagcaagggctggctcttgtggcccccaaatttctgtggctcccgttaggcccatgcgaaagagacagcacgttcagactttgtctccagctgaaaacaccagctgccccctcacttaagggtgcctggatcttgcagtctggcctgaagcccaccgagcggggaggagaagcctggtggggaggaggggcactggctttccaccaggcctgcttgaggggcacaggtccgaccacgcagctccgcaccctgaagcgatcagtcttctcgcggtccagcatggcattgaggaagaccttccctgtgaactgggcgatagagaagacgccccggggctcctcatccacgccggggccctgaaccagggggtaggggagacgcttgtggttctcggatacgctgatcggggggatgacccaggccctccgcacgcggctcagggcaggcgcccggcgccaggggtacagggtggtgggcctcctccatccaggaacccccaaagacaggcagaggctctgagattcacccggcggggacacagcctcgccccaggtgccagggtagcggtgcacacggaaagcccctgggccagccagggctggggagagcgtggggtcctgaacacgggaaatgacccccaagaagccagtggcggtgcctgtgatgctggggtgggccagcaggtgccactccacctccagggcgctgaccttgtagcctccagtcttgatgatgtccactgaggtccggcctcggatccagtactggccatccttaaacaccacggtgtccccttggtcggcacccttggcgcagaggctggcaccagccagacgagccttggttgggtcttggggccccaccaggaggcctgtgttccttcccttgccccacagagatgcccagtgtcctgtgaaggcagcatggccaggagggttttggtcaatgagacaaaggccccagggcttctgaaaaggtccctccctcggcaaaggctgccatggggcactgttggccccacgccgtttgagcgccctgaggggctgctgctgctgctgctcccgcatctgcccggcaagaggagcccaaccatccacggtcaccttccaactcgccccagggtggcaaatgtgagcgtgtgtctctgagcgagggcaagtggagtcaaagcatctgcagagatcattgtggccgtcaaagaagtaacctgagacagacctttgacgtctgaagacatcgtagtggccggtcagaggagttacctgagacagacctttgacgtctgaagacatcgttgtggccgtcagaggagttacctgaaacagacctttgccatctccttgagcagcagcggagacccctggcctcacaagcccgctgtgtgatcttgaggcagaagcgggcgcatggcccaagattccattccttggaatccataaggccaagaaccccaggtcagagaacacgacgcttgccaccatcttggaagcagcctgccgccattttggaagctgcccgctaccatcttgggagctctgggagcaaggaccccctgtcttaaaccagccatctagggtgaatgcactcttagtttcttctggtttattccagtattctcgaaacacggagggtcccctcaccagcagctccccctccttttcttcaaaccctggggtcaccttggtccccctctcgtctccctctgcgtggatggtgtaggagcaggcttccctctgtgggttttctgagacaatgcgcacctgtactccaggcagtggggtccccacggaacagctgcccacagattctggtgtcattcccacttttacacacttgctggccagggagggctggcgccttgccctgatggccccggggctgtccacgatgaggggacctgtgtgtgcccggcacacgacgggctggcaccaggtctgctgtccgcgtccgtggtttttctgttctgggcgtttcataagaagaggaccatcacaggcggcctttcgcctcttcctggtgatgcctctactggggcggggacgcagcgcaaggacacggcacggcctccacccagcttctctctctctcttccgagcacggacagtgcactgagcagcgaggccaagcatgagctcagagcctgtggctagagccgaccctagggtcaaggccat

SEQ ID NO: 27645 - DNA, 963 bp, Homo sapiens; identical to SEQ ID NO: 13507
  SIMILAR (655)..(951): 431254mologous to Murine leukemia virus reverse transcriptase,accession number AF003736,Smith-Waterman Score=166.

SEQ ID NO: 27646 - DNA, 736 bp, Homo sapiens
  SIMILAR (514)..(425): 401254mologous to Homo sapiens Human secreted protein, SEQ ID NO: 6893,accession number G02812,Smith-Waterman Score=64.
cctctttgggtcccctccctttgtatgggagctctgttttcactctattaaatcttgcaactgcactgtcttctggtccgtgtttgttacagctcgagctgagctttcacttgctgcccaccactggtgtttgccgctgtcacagacccgccgctgtcgcagacctgccgctgacttccaaccctccagatccagcagggtgtccgctgtgctcctgatccagcgaggcgcccattgctgctccaaatcgggctaaaggcttgccatcattcctgcacggttaagtgcccgggttggtcgtaatcgagctgaacacttgtcactgggttccacggttctcttccatgacccatggcttctaatagagctataacactcaccgcatggcccaagattccattccttggaatctgtgaggccaagaaccccaggtcagagaacatgaggcttgccaccattttggaagtggcctgccaccatcttgggagctctgggagcaaggaccccctggtaacagtagtagatacatagaatttttaaataaacatacttatattaagggtactcttagggtctatactaagaaattttgcatgcttgtcattaaaagctttgagtccaagtcctgtgtgtggagatatgactttgactctaaatcaagtgtaaatgtaactgtatagatatgccatgtatataatggtaataaaatatatacatatatttataaatgaggcag

SEQ ID NO: 27647 - DNA, 651 bp, Homo sapiens
  SIMILAR (279)..(443): 361254mologous to Fasciola hepatica tegumental antigen-like protein,accession number AF286861,Smith-Waterman Score=86.
atgaaagtctccatggacccttcaaccagaggctctgtgacttgtcccgtcttcagtgcgacacgttggctggtgcagtcctggagacccacggagctcacggtcgtcaggggtcctcaaggattcagagaacccccaaatgtcagggctgctcccttcttgtcctgcctctctgctcacacccttggacagactccagaatcttctcggttctcagagaaggctgaatccacctatgacctagtgggagcaccctgtgccgaaactgtttaccttctggtccccggagccatgggtcacgacctgggcctcatcccagacctcaccctggcccggggacctggcctgatggtccagccccccacacactgctggctctggggctgtgccctcctgatacgcccccagcacctgatggcatcccccaaacagaacaagaaccgcaaacagcaacagcccgtttttgctcttaggaagctcagagcagcatctatgccaaaatcgttcacactctggtccccggagctacaggggcagctgctgggagaccaagtgtcaccggctggcaatcagggccccaagcctggagacttctggacaagcggaggcaagccgaccatgacggcttgggtgcagggagcaggtgtctga

SEQ ID NO: 27648 - DNA, 1650 bp, Homo sapiens
  SIMILAR (915)..(1001): 581254mologous to Plasmodium lophurae histidine-rich protein,accession number M15317,Smith-Waterman Score=115.
tcaggctgcgagcacggccaccgccaaggaggtgctataagctctgagatgccttatgcaggaaaaggctcctgacatttctgcccggactgtccccaaggctgcctgtaaaccttgcagcagcaggaacaggttctgcttgagtcccggcagaagcattggtccttgaaggtgacaggcctcctttctctttgcccttccttcctcattcgcagggcactgtgcaacatgtgtggagggtgggccagtgccctctccaggaccccctggacctgtctgctgtgtgcacatactgctcttggcactgaggactgtgtggagcaggatggccatgggcccttctctctggcagcttccatctagtgtagacagatagacaatattaagagcaaagcagattgtgttggacaaagtaagtgcccaaggagaggctgtctccagagccccagtgctgggcagctcttcctcattcctcggcatcccgtgtttcctgctggtatcgtcctgagaagcttcgtgggatgagatgtcatctctgctgccatccgcatgactgcagacctttgggaagccaaacaccacctccctgggagcgctcttccttcccatccttgccagcatggccacagaccggaagtggcccttcccagagctgatgttccagtgtggtccagtttctgtcctgtgggactggtgtttgtgatagccctggaatgtgagcaccaggaaacactgaatgtcactcacctccttggaccccttgcctctgcaggtgaagccactgaggcaggggctagacatctgtggggctctgctgaccttgaccctccagagcaggcaggccccagggtcggaagtcagctgacagtctccacagtgctccctgtgcgtgcttggcagatggcagctgctgtcatcaccatcatcaccataaccaccgttactttcagcgtcacaagcaccactgccaaaaccaccatcattgtcatcatccagcgtggagggtccaactggaacgctgtcgccagcttgtcttgttatgacgttagttttactgctagaaatatctagtagatggctggaaatcagtcctgcctcttcattgagtttgggcttctctgaggtggaggctgttctccttctgctcccagttcccatcgcctgctgcagggtcagcattttccaattgaggcaggctcggtggggccaagtgaccaggcggtagacaaatagctgcaaagtggccaggcctgggtaccctcttcccccaactataagcagctcaaggcctggtggcttgtggcccaccaggtgccctctggatgccctgtgtctctctgaggatggggcggtggtcagaaagggccctgtcttcctagcctgctggccgctccaggagccgcccagcgtgcaccgctgtgcctcatcttctgagccttccatcctcactgctcctgggggcagccctgtgggggaaatcacgtttttaattagcctggttcgggatggcggctctaaagctccgggccgtgaatgcagcctcttcgcctttggaatccgctgccagtggacacaatgtagtctgctctgccgcagcgggggctgtctttttcctcctcctctcttcctgcgctcggggctgtattgcat

SEQ ID NO: 27649 - DNA, 465 bp, Homo sapiens
  SIMILAR (325)..(2): 1001254mologous to Homo sapiens dJ324O17.1.2 (A novel protein similar to Drosophila CG11840, isoform2),accession number AL110115,Smith-Waterman Score=566.
  misc_feature (1)...(465): n = a,t,c or g
aggcaaagttgtttgcttcgaggcctttctccagcagatcctggggaaacaccaattttattggtgcctcgaaggacttggccactgtcaccatcacattggtgccaaatacccagaagacatcgtagatgaagagtccgcccagcaggatgcagccagtgctgacattgttgaggtgcaggagctctactccattaagggagaaggccaggccaaaaaggttgttggcaatccagtgcttcctcagcaggtaccagacgccaacgatgctgctcaggcccaggcacaccaggtccttggtgtcaaattcataattgatgatctctgagcagagaggccaggtaagtccactccctgaggcagggctacccctcccaccttccttgttttccccagaaccctgtgtgaaggaattccnccgcntgtcgtaggatctcatggancatcagtgnnngggctcgtcct

SEQ ID NO: 27650 - DNA, 427 bp, Homo sapiens
  SIMILAR (98)..(427): 911254mologous to Homo sapiens MCT-1,accession number AB034206,Smith-Waterman Score=531.
tgcgtgtggcgcccgcgccggccttcctgcaggggactccaccggagccttgccaattccgtttgtttccctgttgtcgcccgcttcaccctggatcatgttcaagaagtttgatgaaaaggaaagtgtgtccaactgcatccagttgaaaacgtcagttattaagggcattaagagccaactggtagagcaatttccaggtattgaaccatggcttaatcaaatcatgcctaagaaagatcctgtcaaaatagtccgacgccacgaacatacagaaatccttaccgtaagtggggaattattgttttttatacaaagaaaggggcctttttgtccaactctaaggttgcttcacaaatacccttttatcctgccacaccagcaggttgataaaggagctatcaaatttgtactcagtggcgcaaat

SEQ ID NO: 27651 - DNA, 699 bp, Homo sapiens
  SIMILAR (491)..(697): 921254mologous to Homo sapiens Human glioblastoma-derived polypeptide (clone OA004FG),accession number Y27132,Smith-Waterman Score=340.
ccctgctgcagcaaccggagctggagtcggatcccgaacgcaccctcgccatggactcggccctcagcgatccgcataacggcagtgccgaggcaggcggccccaccaacagcactacgcggccgccttccacgcccgagggcatcgcgctggcctacggcagcctcctgctcatggcgctgctgcccatcttcttcggcgccctgcgctccgtacgctgcgcccgcggcaagaatgcttcagacatgcctgaaacaatcaccagccgggatgccgcccgcttccccatcatcgccagctgcacactcttggggctctacctctttttcaaaatattctcccaggagtacatcaacctcctgctgtccatgtatttcttcgtgctgggaatcctggccctgtcccacaccatcaggtcagaaggcatctctctgcaacatttgaagcagctttctcgggaaccagtacagggtcttggatgagaacatgacttttggcatcattcagagccagccccttcatgaataagttttttccagccagctttccaaatcgacagtaccagctgctcttcacacagggttctggggaaaacaaggaagagatcatcaattatgaatttgacaccaaggacctggtgtgcctgggcctgagcagcatcgttggcgtctggtacctgctgaggaagcactggattgc

SEQ ID NO: 27652 - DNA, 793 bp, Homo sapiens
  SIMILAR (124)..(666): 1001254mologous to Homo sapiens MCT-1,accession number AB034206,Smith-Waterman Score=962.
cgactacagctccgactgtcagtgccggccttcctcgtgtgaggggatctgccggacccctgcaaattcaatttctttcccattccgggcccttccctatcgtcgcccccttcaccttggatcatgttcaagaaatttgatgaaaaagaaaatgtgtccaactgcatccagttgaaaacttcagttattaagggtattaagaatcaattgatagagcaatttccaggtattgaaccatggcttaatcaaatcatgcctaagaaagatcctgtcaaaatagtccgatgccatgaacatatagaaatccttacagtaaatggagaattactcttttttagacaaagagaagggcctttttatccaaccttaagattacttcacaaatatccttttatcctgccacaccagcaggttgataaaggagccatcaaatttgtactcagtggagcaaatatcatgtgtccaggcttaacttctcctggagctaagctttaccctgctgcagtagataccattgttgctatcatggcagaaggaaaacagcatgctctatgtgttggagtcatgaagatgtctgcagaagacattgagaaagtcaacaaaggaattggcattgaaaatatccattatttaaatgatgggctgtggcatatgaagacatataaatgagcctcagaaggaatgcacttgggctaaatatggatattgtgctgtatctgtgtttgtgtctgtgtgtgacagcatgaagataatgcctgtggttatgctgaataaattcaccaaatgctaaaaa

SEQ ID NO: 27653 - DNA, 1309 bp, Homo sapiens
  SIMILAR (368)..(460): 831254mologous to Homo sapiens Human protein SEQ ID NO:9,accession number Y57604,Smith-Waterman Score=144.
  misc_feature (1)...(1309): n = a,t,c or g
gccttccacgcccgagggcatcgcgctggcctatcggcatcctcctgctcatggcgctgctgcccatcttcttcggcgccctgcgctccgtacgctgcgcccgcggcaagaatgcttcagacatgcctgaaacaatcaccagccgggatgccgcccgcttccccatcatcgccagctgcacactcttggggctctacctctttttcaaaatattctcccaggagtacatcaacctcctgctgtccatgtatttcttcgtgctgggaatcctggccctgtcccacaccatcagccccttcatgaataagttttttccagcccagctttccaaatcgacagtaccagctgctcttcacacagggttctggggaaaacaaggaaaaagatcatcaattatgaatttgacaccaaggacctggtgtgcctgggcctgagcagcatcgttggcgtctggtacctggctgaggaagcactggattgccaacaacctttttgggcctggccttctcccttaatggagtagagctcctgcacctcaacaatgtcagcactggctgcatcctgctgggcggactcttcatctacgatgtcttctgggtatttggcaccaatgtgatggtgacagtggccaagtccttcgaggcaccaatgaaaatttggtgtttccccaggatttgctggagaaaggcctcgaagcaaacaactttgccatgctggggacttgggagatgtcgtcatttccagggatcttcattgccttgctgctgcgctttgacatcagcttgaagaagaatacccacacctacttctacaccagctttgcagcctacatcttcggcctgggccttaccatcttcatcatgcacatcttcaagcatgctcagttatgaggagtcaaatcctaaggatccagcggcagtgacagaatccaaagagggaacagaggcatcagcatcgaaggggctggagaagaaagagaaatgatgcagctggtgcccgagcctctcagggccagaccagacagatgggggctgggcccacacaggcgtgcanggggaagagggcacaggaggccaagggcagctccaggacagggcagggggcagcaggatacctccagccaggcctctgtggcctctgtttccttctccctttcttggccctcctctgctcctccccacaccctgcaggcaaaagaaacccccagcttcccccctccccgggagccaggtgggaaaagtgggtgtgatttttagattttgtattgtggactgattttgcctcacattaaaaactcatcccatggcca

SEQ ID NO: 27654 - DNA, 1859 bp, Homo sapiens
  SIMILAR (745)..(1482): 481254mologous to Homo sapiens Human secreted protein bk291_3,accession number W69427,Smith-Waterman Score=375.
aatgcttcagacatgcctgaaacaatcaccagccgggatgccgcccgcttccccatcatcgccagctgcacactcttggggctctacctctttttcaaaatattctcccaggagtacatcaacctcctgctgtccatgtatttcttcgtgctgggaatcctggccctgtcccacaccatcaggggagaagggcaccaggatgtggcttgtcagtgggaagcaatgacctttacgtttgacatgagccatcaagggccaggaagaatctctgcctgctacaaaagtctgcattcagagtcattcagcaagcattttagcagatgtctagcaggcaccagccccttcatgaataagttttttccagccagctttccaaatcgacagtaccagctgctcttcacacagggttctggggaaaacaaggaaggggactccaccggagccttgccaattccgtttgtttccctgttgtcgcccgcttcaccctggatcatgttcaagaagtttgatgaaaaggaaagtgtgtccaactgcatccagttgaaaacgtcagttattaagggcattaagagccaactggtagagcaatttccaggtattgaaccatggcttaatcaaatcatgcctaagaaagatcctgtcaaaatagtccgatgccacgaacatacagaaatccttaccgggctgacaggtgggaggggtagccctgcctcagggagtggacttacctggcctctctgctcagagatcatcaattatgaatttgacaccaaggacctggtgtgcctgggcctgagcagcatcgttggcgtctggtacctgctgaggaagcactggattgccaacaacctttttggcctggccttctcccttaatggagtagagctcctgcacctcaacaatgtcaggcgctggctgcatcctgctgggcggactcttcatctacgatgtcttctgggtatttggcaccaatgtgatggtgacagtggccaagtccttcgaggcaccaataaaatgtgacaaaactaaggcagtggtgtttccccagggttctgctggaagaagggcctcgaagcaaaacaactttgccatgctggggacttgggagatgtcgtcattccaggggatcttcattggccttggctggctgcgcttttggacattcaggtttgaaaggaaggattacccacacctactttttacaccagctttgcagcctacatctccggccttgggccttaccatcttcaatcatgcacatctttcaagcatgcttcaggcttgccccttcctatacctgggtccccggcttgcaatcggttttcctgtcctgggtgggcgctggccaaggggaagaagtgacagagatgtttcagttatggagtagtcaaatcctaaaggatccaagcggcaagtgacagaaatccaaaggaggggaacagaggcattcagcattcgaaggggctgggagaaagaaagagaaatgatgcagctggtgcccagagcctcctcaggggccaagaccaagacagatggggggctggggcccacacagcatgtgcaccggtagaagggcacaagagggccaagggcagctccagggacagggcaggggggcagcaggatacctccagccaggcctctgttggcctctgtttccttctccctttctttggccctcctctgctcctccccacaccctgcaggcaaaagaaacccccagcttcccccctccccgggagccaggtgggaaaagtgggtgataatttttagattttgtattgtggactgattttgcctcacattaaaaactcatcccatggccagggcgggccactgtgctcctggaaaaaaaaaaa

SEQ ID NO: 27655 - DNA, 1491 bp, Homo sapiens
  SIMILAR (1)..(1488): 1001254mologous to Homo sapiens cartilage matrix protein,accession number M55682,Smith-Waterman Score=2497.
atgagggtcctctctggcactagcctcatgctctgcagcctgctgctgctgctccaggccctgtgcagccctggcctcgccccccagtccagaggccatctctgccggacgcggcccacagacctggtgtttgttgtcgacagctctcgcagcgttcggcctgttgaatttgagaaagtgaaggtattcctgtcccaggtcatcgagtcgctggacgtggggcccaatgccacccgggtgggcatggtcaactatgccagcaccgtgaagcaggagttctcgctgcgggctcatgtctccaaggccgcactgctgcaggctgtgcgccgtatccagccgctgtccacaggcaccatgaccggcctggccatccagttcgctatcaccaaagccttcggcgatgcagagggtggtcgttccaggtcccctgacatcagcaaggtggtcatcgtggtgacagacgggaggccccaggacagcgtgcaggacgtgtctgcgcgggcccgggccagcggcgtcgagctgttcgccatcggagtgggcagcgtggacaaggccacgctgcggcagatcgccagcgagccgcaggacgaacacgtcgattacgtggagagctacagcgtcatcgagaagctgtccaggaagttccaggaggccttctgcgtggtgtcagacctgtgcgccacaggggaccatgactgtgagcaggtgtgcatcagctcccccggttcctacacctgcgcctgccacgagggcttcactctgaacagcgacggcaagacctgcaatgtctgcagtggtggtggtggcagctcggccactgacctggtcttcctcattgacggatccaagagtgtgaggccagagaactttgagctggtgaagaagttcatcagtcagatcgtggatacgctggacgtgtcagacaagctggcccaggtggggctggtgcagtactcaagctctgtgcgccaggagttccccctgggtcgcttccacaccaagaaggacatcaaggcggctgtgcggaatatgtcctacatggagaagggcacaatgactggggctgctctcaagtacctcattgacaattccttcactgtgtccagtggggctaggcccggggcccagaaggtgggcattgtcttcactgatggccggagccaggactacattaatgatgctgccaagaaggccaaagacctcggctttaagatgtttgctgtgggtgtgggcaatgccgtggaggatgagctgagggaaatagcctcagagcctgtggcagagcactacttctacacggctgacttcaagaccatcaaccagataggcaagaagttgcagaagaagatctgtgtggaggaagacccgtgtgcctgcgagtccctggtgaaattccaagccaaagtggaggggctgctgcaggccctgaccaggaaactggaagctgtgagtaagcggctggccatcctggagaacacagttgtctaa

SEQ ID NO: 27656 - DNA, 956 bp, Homo sapiens
  SIMILAR (71)..(328): 961254mologous to Homo sapiens E3 protein,accession number U30498,Smith-Waterman Score=415.
cttctctgccctgctccaggcaccaggcttttttttctcttagtggctcataggaggggacggcggcaccatggacccccgcttgtccactgtccgccagacctgctgctgcttcaatgtccgcatcgcaaccaccgccctggccatctaccatgtgatcatgagcgtcttgttgttcatcgagcactcaatagaggtggcccatggcaaggcgtcctgcaagctctcccagaagggctacctcaggatcgctgacctgatttccaacttcctgctcatcaccatgctctttatcatcagcctgagcctactgatcggcgtagtcaaggccgcactgctgcaggctgtgcgccgtatccagccgctgtccacaggcaccatgaccggcctggccatccagttcgctatcaccaaagccttcggcgatgcagagggtggtcgttccaggtcccctgacatcagcaaggacgtgagctccctccgagcagggggcttgcccgtctcagtcaccactgaatccctgggacccagcatggtgcctggcacaggatctctggtgaacgaggagaacgtgagctggggtctcctcaccaactgctcccccccaccccaacccccctgacggccagggctgtgtccagggctcagggcacaaggctccgttagctgggcagcagctggcccatgaaacagccctttcagctccacctctgaatggcagttctatgggctcctcggaagaacacaggcgccttctctgtgtcacttctccgctcattagcagagctgcagaaatacactacagaggccctgctgccacccaaagacccaaggagaacccgagggccccacgcatggtcagccaaactggaatccagggtgaggaggcgtgtgctttcatctgccggccgtctggggaggccacggagcagcagcacatccttctgatgggttaa

SEQ ID NO: 27657 - DNA, 1048 bp, Homo sapiens
  SIMILAR (421)..(720): 741254mologous to Rattus norvegicus VAMP5,accession number AF054826,Smith-Waterman Score=383.
ttgttcttgtttttttgagacagggtctcactctgtcacccaggctggagtaatttcttttttattttaataaaatagagacaggatctagctgtagctgggaactacaggtgccaccacacctggctcagttgtttgtttgtttgttgatttatttattgaatcagggtctcactctgttgcccaggctggtcatccactccgcacctcaagtgatcctccacactgctcagattacaggtgtgagccatcgcaaccaattgtttttactgtttttactgctgtgttttttttgagatagagtctcactgtgacacccaggctggaagtgcagtggtgcaatcgtggctcacccgcagcctcaaactcctgggctcaagcaatcctcctgcctcagcctcctgagtagctgggactacagggaaagagttggagcagtgccagcggcaagcgaacaaggtgacggaaatcacgcttaacaactttgacaaggtcctggagcatgatggaaagctggccgaactggagcagcgttcagaccaactcctggatatgagctcagccttcagcaagacaacaaagaccctggcccagaagaagtgctgggagaacatccattgccagatctacttggggctagtggtgggtggtagcctgctcatcatcctgattgagcagctggccatctttctccctcagagtgacaccagtaatgccccacagacctaggatgcaggcaccacctcagggcctggggactgacagctggtcctgagggagaagccaaatggctgcactggctggttccggtctccagagaaccttggtgtttgctctcccctgacccaccccagtgagtgccaaagggcagccccaacacgtgcacccctgcatttcttgtcatgccacagactggccctcgagggcaccctgccatactggccatgccgggccagccccacctgaagctcagtgaaagctgattaaaaaaaaaaaattatgtatagatcaaaataactacaagagtggaaattgaatattcctaaca

SEQ ID NO: 27658 - DNA, 2668 bp, Homo sapiens
  SIMILAR (2170)..(2571): 341254mologous to Homo sapiens mariner transposase,accession number U52077,Smith-Waterman Score=178.
gcagctactgccagatgctctcactaaaaatggtcacagatggtcagttgtccagttaacagaacatactcccctcccaatattcgaaagtaagaaggaaaggatagctgctaacacttgcctgcttagtggtgatagtggactggatgggttaggaggaccaggtgtacaactaggaagcccagataagaaaaagcgcaaggcaaatacacagggaccttctttccctccattgtctgagtatgctccaccaccgaatccaaactctgaccatctagtggctgctaatccatttgatgacaactataatactatttcctataaaccactaccttcgtcaaatccatatcttggccctggttatcctggctttggaggctatagtacattcagaatgccacctcacgttcccccaagaatgtcttccccatactgtggtccttactcactcaggaaccagccacacccatttcctcagaatcctctgggcatgggttttaatcgacctcatgcttttaactttgggccacatgataattcaagtttcggtaatccatcttataataatgcactaagtcagaatgtcaacatgcctaatcaacattttagacaaaatcctgctgaaaatttcagtcaaattcctccacagaatgctagccaagtttctaaccccgatttggcatctaattttgttcctggaaataattcaaattttacttctccgttagaatctaatcattcttttattcctcccccaaacacttttggtcaagcaaaagcaccacccccaaaacaagactttactcaaggagcaaccaaaaacactaatcaaaattcctctgctcatccacctcacttgaatatggatgacacagtgaatcagagtaatattgaattaaaaaatgttaatcgaaacaatgcagtaaatcaggagaacagccgttcaagtagcactgaagccacaaacaataaccctgcaaatgggacgcagaataagccacgacaaccaagaggtgcagcagatgcctgcaccacagaaaaaagcaataaatcctctcttcacccaaaccgtcatggccattcgtcttctgacccagtgtatccttgtggaatttgtacaaacgaggtgaacgatgatcaggatgccatcttatgtgaggcctcttgtcagaaatggtttcatcggatctgtactggaatgactgaaacagcttatggcctcttaactgcagaagcatctgcagtatggggctgtgatacctgtatggctgacaaagatgtccagttaatgcgtactagagaaacttttggtccatctgcagtgggcagtgatgcttaatcaaaggcattaactaaagtgggtttattttcctgtgcattgcagaagttcattgacacaggattttaatgttttacattatttttttaaatgcatacacaaaaacattatttacttagtttttattaatcacttcatcactagagcaaattttttattgtctttgcttgctgtcttaaatgagaataatgtatatgggggtgctttagaaacataaataaatgttagttgttgttatttatcacaaacataaaagcctcttgaaacttcaaaataatatataacaaatgtaggcaagttttaacttttaaaagttagaatcattgaaaaacatgtatttcagtgctgaactttggttgtaccatattaaagatttagttcaaaaagtttatcaaggatccacttaacacgtcttcacaacataatatatgtaactgtaacatgggggagagcatacatttttatggattaaaaaaataatagtatgacaccagattcctcctccactagggtctttggaatcaatgaatttcatatttcaagtgagttttcaggatatctgtttgtacagatacgagacagatcttagcatatagtaaattctcagtaagtattgttgattaacttgtggatggtaccacatgaaattgctaatattagatcagttgaaaattgactgcaattagtaaagttggtataacgtacgttcccagttgtgctatttagaattatgatagtattatgctcctacttttctttgatattgagttgtcttgttattgtttattgttttccagagaaatactatagtatccacagaagaattgtgaatacttttttataattttgaactgggacatattgcagatgaggaaggtagaaacatccatttggccttagagggctctgctagtaaaagaactactcagtggtggtttgaaaaatcttgttctggggatctgaatttcaaaaatgaaccctaggggagatcaaaatccattttaaacaaagatcaattaagagccaaagtgaaatctaacttgcaaacaacaatttgaagccttgcagcagacttaaggaattcccgctctgactggggaaaagtataaaaatggacctgagagtaccctctcgagggatgatcaagaatggagacagttggaggtgtgctcattaagattcaaaacagcagaaatccatttttggagcagattataacctgtggccaaaaaaaaaaaatgtgtgctgtttgacaactaatggcaatttatacaatcattggaggctggtaaagctccctaatatgttgccaccattatcactgcaacc

SEQ ID NO: 27659 - DNA, 1479 bp, Homo sapiens
  SIMILAR (1)..(888): 1001254mologous to Cloning vector pZC320 SopA,accession number U26464,Smith-Waterman Score=1548.
atgaaactcatggaaacacttaaccagtgcataaacgctggtcatgaaatgacgaaggctatcgccattgcacagtttaatgatgacagcccggaagcgaggaaaataacccggcgctggagaataggtgaagcagcggatttagttggggtttcttctcaggctatcagagatgccgagaaagcagggcgactaccgcacccggatatggaaattcgaggacgggttgagcaacgtgttggttatacaattgaacaaattaatcatatgcgtgatgtgtttggtacgcgattgcgacgtgctgaagacgtatttccaccggtgatcggggttgctgcccataaaggtggcgtttacaaaacctcagtttctgttcatcttgctcaggatctggctctgaaggggctacgtgttttgctcgtggaaggtaacgacccccagggaacagcctcaatgtatcacggatgggtaccagatcttcatattcatgcagaagacactctcctgcctttctatcttggggaaaaggacgatgtcacttatgcaataaagcccacttgctggccggggcttgacattattccttcctgtctggctctgcaccgtattgaaactgagttaatgggcaaatttgatgaaggtaaactgcccaccgatccacacctgatgctccgactggccattgaaactgttgctcatgactatgatgtcatagttattgacagcgcgcctaacctgggtatcggcacgattaatgtcgtatgtgctgctgatgtgctgattgttcccacgcctgctgagttgtttgactacacctccgcactgcagtttttcgatatgcttcgtgatctgctcaagaacgttgatcttaaagggttcgagcctgatgaatcactggagagtctggctgaagtgcagactctgattgaggaggcctgggacacgaggcctgagattctgcatctccagagagcaacagacatgtgtcagccttattggatttctttggttcccgaacagcctgccatgaggtatgaaggacacatgaccttttatgtaattggggatgactttgacttaggagatgctgttgttgatggagaaaatggcaaggcggccagcccacaaggtaatttaattcctggtgcctgtgggcgtcctgcaaagagccagttggcgtcggaacgctcttctccaaaacctgtgccagtgcccccagcgcagacctggtgtgaaggggacctttggagaggtctcatgagcaatgccgcgtgctctgccccacaggttacttcaatgatgtggaccgtgatgacggacgctacccgcccaggcccaggccacggccgcctgcaggtaggtgccgagcctccccagatgcgacacattgaatttgcacagagagggtgggatgagaggcctgaagttggggatgagagagctgaggttggggcagagttggtgacgagcagacgataa

SEQ ID NO: 27660 - DNA, 560 bp, Homo sapiens
  SIMILAR (179)..(397): 571254mologous to Homo sapiens Human CSGP-1 protein,accession number W90961,Smith-Waterman Score=219.
ctgagcttggagcccatttttttctggcagttccgctcatattttccacttgaagacatcgcctccctttcttccaagctgggagaccagaagtcaacaacaggagggtggagaggccgggtctcacaatccgcttggctggggagtccactgaggttcttgcatcctgaagcaaaccatggagagctggtggggacttccctgtcttgcgttcctgtgttttctaatgcacgcccgaggtcaaagagactttgatttggcagatgcccttgatgaccctgaaacccaccaagaagccaaactcagatatctacccaaagccaaaaccaccttactacccacagcccgagaatcccgacagcggtggaaatatctacccaaggccaaagccacgccctcaaccccagcctggcaattccggcaacagtggaggttacttcaatgatgtggaccgtgatgacggacgctacccgcccaggcccaggccacggccgcctgcatgaggtggcggcggtggctactccagttatggcaactccgacaacacgcacggtggagat

SEQ ID NO: 27661 - DNA, 1038 bp, Homo sapiens
  SIMILAR (391)..(603): 751254mologous to Homo sapiens Human CSGP-1 protein,accession number W90961,Smith-Waterman Score=307.
atgggttccgaggagcagatcatgcaccagggcggcctgctcagctctggtgtctgcagccccgtggaaaataaaccccgtgaaagcaatggcgtcatgtgcaacccgaccttggagacagagaccccagagttagcgttgtctacctgggacatctcccagcccaggggtcttactccagacccgtgtctcgactggaactgctggcagccttggaggggagatgttgcacagatccaagaggctgacacggttcctgtcccccagcccagtctgagcagcttggaccatgatgatcaagagcgctggaggaggccagacacattcattagattaactgcttttggatcaggtcaaagagactttgatttggcagatgcccttgatgaccctgaacccaccaagaagccaaactcagatatctacccaaagccaaaaccaccttactacccacagcccgagaatcccgacagcggtggaagttacttcaatgatgtggaccgtgatgacggacgctacccgcccaggcccaggccacggccgcctgcaggaggtggcggcggtggctactccagttatggcaactccgacaacacgcacggtacccctacatctgggcatgcgatggccctggtgtctggtgttcccttctttgtgtccatgttgtcaatcgagaaaaatgacgagacgagcgtaaaagatttatttgccaaagttaaggaagaatgtgggctcagagcatggccccaaataggtgacgttggtaaagcaggtttaacgggtggcaagccaggtgatgagagggagacaggaagaggcctgcttagcaagggggtccttgttatgcagatgaaggttcccagacctgtaaaggtgtcagagtctccgtttctctctcctacatccaggaaaagcttagaaagggaaggcctggctgcaacagcaaagatcctctacagatgccaatttccccacctcagtctgctggccctggagcggcaatttcaaaataaggcaaagcaatatattttggagtaa

SEQ ID NO: 27662 - DNA, 392 bp, Homo sapiens; identical to SEQ ID NO: 13876
  SIMILAR (392)..(180): 881254mologous to Homo sapiens Human prostate cancer- associated protein 12,accession number Y48226,Smith-Waterman Score= 334.

SEQ ID NO: 27663 - DNA, 403 bp, Homo sapiens; identical to SEQ ID NO: 13877
  SIMILAR (184)..(83): 881254mologous to Homo sapiens Human prostate cancer- associated protein 12,accession number Y48226,Smith-Waterman Score= 160.

SEQ ID NO: 27664 - DNA, 438 bp, Homo sapiens
  SIMILAR (296)..(412): 351254mologous to Homo sapiens Human presenilin II mutant protein fragment 43,accession number Y20950,Smith-Waterman Score= 70.
  misc_feature (1)...(438): n = a,t,c or g
taattggaaacccaaantgctcaggtttanacaacattacactaaagttgggcccctngttngttaantcctaagggtttaaggaaantctggaantaaggtggnctccaggttntggtggtnnactgccaagatncctttggggnaacgggttccanagnagggtcaggggtcaagactgcaggctggncatcaccatatatcactcagttccttctggaggtcatccttccagcagccactggcctcctgcggtatctcttcagtctccggacaggcggctgtctcatgaccctgctgcttcatcttggtcaggatntgtcccggatctcctgggccagcagctgcaggcagcgagtggtgcgggcccgctgcatctccttactgtcacgcagggtcttctccagcccctgaaggccttgggtcagggccccatac

SEQ ID NO: 27665 - DNA, 576 bp, Homo sapiens
  SIMILAR (576)..(379): 1001254mologous to Homo sapiens Human secreted protein, SEQ ID NO: 7497,accession number G03416,Smith-Waterman Score=320.
gggccgctcttgctgaaaggtggctgggagaggtcctggtcagagtcggagtcagagtcccaggagggagtggagggctcaggcactggtgcccttgtggcctcttaggtcgaggcttgggacaggcccccgagcacaaagtgaggctgtctatggagttctgcagcacgtgcacagcagaccatatatcactcagttccttctggaggtcatccttccagcagccactggtccctgcggtatctcttcagtctccggacaggcggctgtctcatgaccctgctgcttcatcttggtcaggattttgcggcatttcacctgcgttttctgcattttctgaatgttcaccaagttctctgagatctcatcctcctgcgcttcttcaagctgctgaatcttgatttgctgcaagcagctctccttctccaacatggtcactgagtggttcaggaactcgaaagccttggtctgggcctgtaactggctcttgagtgactcaagttcacatcgcaggagcttctgggagtcgggaatcatcacaatggtcttggctttgactttggaagagctggtctc

SEQ ID NO: 27666 - DNA, 426 bp, Homo sapiens
  SIMILAR (281)..(424): 1001254mologous to Homo sapiens Human prostate cancer- associated protein 12,accession number Y48226,Smith-Waterman Score= 259.
gacgaattattggttgggggaaacccacgaggggacgcggccgaggagggtcgctgtccacccgggggcgtgggagtgaggtaccagattcagcccatttggccccgacgcctctgttctcggaatccgggtgctgcggattgaggtcccggttcctaacggtgggatcggtgtcctcgggatgagatttggcgtttcctcggggctttggtgggatcggtgtcctcaggatgagatttagggtttcctcggggctttcgggatcttcacctaatatccggactgcaagatggaggaaggcgggaacctaggaggcctgattaagatggtccatctactggtcttgtcaggtgcctggggcatgcaaatgtgggtgaccttcgtctcaggcttcctgcttttccgaagccttccccgacatacctt

SEQ ID NO: 27667 - DNA, 460 bp, Homo sapiens
  SIMILAR (371)..(69): 321254mologous to Arabidopsis thaliana F28K19.7,accession number AC009243,Smith-Waterman Score=106.
gcggccgctcttgctgaaaggtccgctgggagaggtcctggtcagagtcggagtcagagtcccaggagggacgtcggagggctcaggcactggtgccctctgtggcctcttaggctcgaggccttgggacaggcccccgagcacaaagtgaggctgtctatggagttctgcagcacgtgcacagcagaccatatatcactcagttccttctggaggtcatccttccagcagccactggctccctgcggtatctcttcagtctccggacaggcggctgtctcatgaccctgctgcttcatcttggtcaggattttgcggcatttcacctgcgttttctgcattttctgaatgttcaccaagttctctgagatctcatcctcctgcgcttggaagcttctgatagatgaaggtcactcctcccgcaccagttccagctcctcccacaggaacttcttgctgt

SEQ ID NO: 27668 - DNA, 1732 bp, Homo sapiens
  SIMILAR (1426)..(1731): 1001254mologous to Homo sapiens Human prostate cancer- associated protein 18,accession number Y48232,Smith-Waterman Score= 588.
  misc_feature (1)...(1732): n = a,t,c or g
ccgccgccccccaaatgagtctacagtaagagacggcgaantaaggcacagcccatggagatgtggaagtagaaggggaagagtttgctctgcactaattcttagggatccagttctgacagccaagaccactcctgtcataaaataataccggatattaagagaagatcccgaaagccccgaggaaaccctaaatctcatcctgaggacaccgaacccaccaaagccccgaggaaacgccaaatctcatcccgaggacaccgatcccaccgttaggaaccgggacctcaattcgcagcacccggattcctagaacagaggcgtcggggccaaatgggctgaatctgccaagaccattgtgatgattcccgactcccagaagctcctgcgatgtgaacttgagtcactcaagagccagttacaggcccagaccaaggctttcgagttcctgaaccactcagtgaccatgttggagaaggagagctgcttgcagcaaatcaagattcagcagcttgaagaggtgctgagccccacaggccgccagggagagaaggaggagcacaagtggggcatggagcagggccggcaggagctgtatggggccctgacccaaggccttcaggggctggagaagaccctgcgtgacagtgaggagatgcagcgggcccgcaccactcgctgcctgcagctgctggcccaggagatccgggacagcaagaagttcctgtgggaggagctggaactggtgcgggaggaggtgaccttcatctatcagaagctccgtgagttcctggagcccacagccgaagcgcaggaggatgagatctcagagaacttggtgaacattcagaaaatgcagaaaacgcaggtgaaatgccgcaaaatcctgaccaagatgaagcagcagggtcatgagacagccgcctgtccggagactgaagagataccgcagggagccagtggctgctggaaggatgacctccagaaggaactgagtgatatatggactcaccccaccacggcccccaaccttagctgtactgctgtctacaccctgagcagtgtggagtctcccagcgcccccagctccttgtcttcttgcaggtctgctgtgcacgtgctgcagaactccatagacagcctcactttgtgctcgggggcctgtcccaaggcctcgagcctaagaggccacaaggggcaccagtgcctgagccctccactcccctcctgggactctgactccgactgtgaccaggacctctcccagccacctttcagcaagagcggccgctccttcccacccggcccggccgaccgcgtctcggtcttcgcgtctgccagcctggctggcagtccgtctgtccatcccgccgcgccggggcagtctaggcggagcgggggctcaggcggcggcggcctcgacgcgctttacctgctgttcctgagccttacgctggccactgtcaacgcccgctggctggaaccccgcaccacagctgccatgtgggccctgcaaaccgtggagaaggagcgaggcctgggtggggaggtaccaggcagccaccagggtcccgatccctaccgccagctgcgagagaaggaccccaagtacagtgctctccgccagaatttcttccgctaccatgggctgtcctctctttgcaatctgggctgcgtcctgagcaatgggctctgtctcgctggccttgccctggaaataaggagcctctag

SEQ ID NO: 27669 - DNA, 562 bp, Homo sapiens
  SIMILAR (57)..(128): 371254mologous to Caenorhabditis elegans contains similarity to drosophila homeotic protein (sal) (GB:M21227),accession number AF039046,Smith-Waterman Score=45.
gcgaccgctcttgctgaaaggtggctgggagaggtcctggtcagagtcggagtcagagtcccatgtggggagtggagggctcaggcactggtgcccattgtggcctcttaggctacgaggccttcgggacgaggcccaccgacgcagcaaacgtgacggactagtcgtataggacgttcgtagcagacgacgatgcgacacgcacgaacctagcaacgaacgacaagcgagctagggggcgctagggagactccacactgctcagggtgtagacagcagtacagctaaggttgggggccgtggttggggtgaagtcctaagggggtgagggaagtctggactcaggtgggctccaaggttctggttggtcacttgccagatcccatttgggggaaccgggttcagaggagggttcaggggttcagacttgcaaggcttgggcatcaccatatatcactcagttccttctggaggtcatccttccagcagccactggctccctgcggtatctcttcagtctccggacaggcggctgtctcatgaccctgctgcttcatcttgg

SEQ ID NO: 27670 - DNA, 1074 bp, Homo sapiens
  SIMILAR (243)..(1): 921254mologous to Homo sapiens Human prostate cancer- associated protein 12,accession number Y48226,Smith-Waterman Score= 406.
ttccagccagcgggcgttgacagtggccagcgtaaggctcaggaacagcaggtaaagctggctggcctcccagaatgtgagctgagcccaagcatgctgtgaagccaagatgcagaggttgatgaaggcacagcccatggagatgtggaagtagaaggggaagagtttgctctgcactagtccgaaggtatgtcggggaaggcttcggaaaagcaggaagcctgcagggtatggggaccacaggggtgttagggcacttcccggttcccctcttatttccatccccaccccaggtacccatgacatccaagctgagggtccctacctgagacgaaggtcacccacatttgcatgccccaggcacctgacaagaccagtagatggaccatcttaatcaggcctcctaggttcccgccttcctccatcttgcagtcctgggaaggaggcaccgggtggctcagaactttacctttgcctcatgcgtggccttcagaccctgtgagcccgctcggggacagggttgcggccaatccagcatagattctgacaaagcatcccgggaatgagagtgagaaaggcccaaagcagtcaaggcccaaagacacccctcgaccccctctctccaaatgtcagccctcaagatctcaggctctctggacctcaatctccatgccacttcagaggccccaaattttcagccacagcagctccagatcatagccctaggtcttcagagatcactccactaattcccaaatatcaaccccagggatccagttctgacagccaagaccactcctctcataaaataataccggatattaggtgaagatcccgaaagccccgaggaaaccctaaatctcatcctgaggacaccgatcccaccaaagccccgaggaaacgccaaatctcatcccgaggacaccgatcccgccgttaggaaccgggacctcaatccgcagcacccggattccgagaacagaggcgtcggggccaaatgggctgaatctggtacctcactcccacgcccccgggtggacagcgaccctcctcggccgcgtcccctcgtgggtt

SEQ ID NO: 27671 - DNA, 792 bp, Homo sapiens
  SIMILAR (1)..(156): 1001254mologous to Homo sapiens tetraspanin TM4-B,accession number AF133424,Smith-Waterman Score=278.
  misc_feature (1)...(792): n = a,t,c or g
ctagttggcctgggcattggtggtaaatgtggaggggcctctctgacgaatgtcctcgggctgtcctccgcatacctccttcacgttggcaacctgtgcctggtgatgggatgcatcacggtactgcttggctgtgccgggtggtatggagcgactgtcccggatctcctgggccagcagctgcaggcagcgaagtggtgcgggccccgctgcatctcctcactgtcaacgcagggtcttctccaagcccctgaaggccttgggtcagggccccatacaagcttctgccggccctgctccatgccccactttgtgctcctccttcctctccctggcggcctgtgnggcctcagcaccttcgttcaagctgctgaaatcttgaattttctgcaagcagctctcccttctcccaacatggtcactgagtggttcaggaactcgaaagccttggtctgggcctgtaactggctcttgagtgactcaagttcacagtcgcaggagcttctgggagtcgggaatcatcacaatggtcttggctttgactttggaagagctggtctccaagggcctggcctgcagtctgcagtcctcactgtgtccccagaagcagggcatcccaaggtctctggctctggagtcctggaccagtgagctgtatgcttccagagccttgtccgaggaagagccacataccacctgttcatgctctcccatcagggaccacgaagccagtcctcagctgtgacgctgaagtaagataacgcggggacaccatcgtattaaaacgctcag

SEQ ID NO: 27672 - DNA, 1127 bp, Homo sapiens
  SIMILAR (718)..(167): 401254mologous to Homo sapiens Human prostate cancer- associated protein 12,accession number Y48226,Smith-Waterman Score= 228.
cggagaaacactgaaaagactcgccccattttattcgtcctacaggggaaggccctagaaaattccaggccccatagatgtggcagtaaggaataggcaggtgatcttggggtatttcggaagaagcatttattagcatgcagggcgccatgctagaggctccttatttccaggggcaaggccaagcgaaacaagagcccattgcgtcaggacagcacgcccaaattgcaaagaagaggacacgcccatggtacgcggaaaaaattctcggcggagagcactgtacttggggtccttctctcgcagctggcgggtaagggatcggggaccctggtggcttgcctggtacctccccacccaaggcctcgctccttctccacgggtttgcaagggccccacaatgggaagctgtggtgccggggtttccagcctagccgggccgttgaacagtggccagcgtaaggcttcaggaacaggcaaggtaaacgcgggctgggcctccccagaatagtgggttgagccccaagcatgcttgtgaagccaaagatgccagaggttgatgaaaggcacagccccatggaagatgtgaagttagaaggggaagagtttgctctgcactaggtccgaaggtatgtcggggaaaggttcttgaaaaacacaaaaaccttaagacaagggtcccccacatttgcatgccccaggcacctgacaagaccaagtagatggaccatcttaatcaggcctcctaggttcccgccttcctccatcttgcagtcctgggaaggaggcaccgggtggctcagaactttacctttgcctcatgcgtggccttcagaccctgtgagcccgctcggggacagggttacggccaatccagcagagattcggatattaggtgaagatcccgaaagccccgaggaaaccctaaatctcatcctgaggacaccgatcccaccaaagccccgaggaaacgccaaatctcatcccgaggacaccgatcccaccgttaggaaccgggacctcaatccgcagcacccggattccgagaacagaggcgtcggggccaaatgggctgaatctggtacctcactcccacgcccccgggtggacagcgaccctcctcgtct

SEQ ID NO: 27673 - DNA, 669 bp, Homo sapiens
  SIMILAR (346)..(666): 331254mologous to Mus musculus expressed in select embryonal carcinoma cells and testicular cells; similar to Swiss-Prot Accession Number P11260,accession number U15647,Smith-Waterman Score=121.
atgcgggatctgagtgacaggtgttacaagaaggaagagcaggcacaaagttctggaggtggaactgtgccttgcattttctggtggttggagagaagtggaacaggcaaaagggggacagcagaaccagaagaggtctttcagagcataatggcgataagaggctggtgggaaggggcagataacattcaacaaacagttgtgtgtttgtatttgatgagtgaagagactacccgaatgagaaggaaccagaaaaccaactttggtaattaatatgacaaaacaaggctctttgacactccccaaaaaatcacactagctcaccagcaatggatccaaaccaagaaaaaaatccctgattaacctgaaaaagaattcaggaggttagttattaagctaattagggaggcaccagagaaaggtgaagcccaatgcaaggaaatccaaaaatcaatacaagaagtgaagggagaaatattcaaggaaatagatagcttaaagaaaagacaattaaaacttcaggaaatattggacacacttatagaaatgcaaaaagctctgggaagtctcagcaatagaattgaacaagtagaagaaagaaattcagagcttgaagacaaggtcttcgacttaacccaatccaacgaagacaaagaaaaaagaatatga

SEQ ID NO: 27674 - DNA, 416 bp, Homo sapiens
  SIMILAR (114)..(1): 1001254mologous to Homo sapiens zinc finger protein,accession number L11672,Smith-Waterman Score=204.
gtttctgtagttctctaacatcacattcctatataaattctgctgtgcagtgtccagacattgccactcctccggagagaattctatggccacatccctaaatgtcaacagtccctcaacattatatgttctccatcttcactaagaatcccaggttttctccatagaaatagattatccacacctttccatgttcaacagccacaaagagaacatttttaatattgcagatcacaaattcatggtgagaattctgcatggcatataagaagccatcatgcagagaaggctcatttctaggcttgcaggggttcctggcatcttagctgtggctctccaatacctgcaggtcacagggccacacaggctgggcctcctggagcagaggacacagagcagtgaagtcgagacctgga

SEQ ID NO: 27675 - DNA, 428 bp, Homo sapiens
  SIMILAR (117)..(368): 831254mologous to Homo sapiens hematopoietic cell derived zinc finger protein,accession number AF054180,Smith-Waterman Score= 361.
ctcgctgcagccggagctccaggtctcgctttcactgctctgtgtcctctgctcctagaggtccagcctctgtgggcctgtgacctgcagaaattgagagatccacagctaagactccaggaccccctggaagcctagaaatgggactgttgacatttagggatgtggccatagaattctctctggaagaatggcaatgcctggacactgcacagcggaatttatataaaaatgtgattttagagaactacagaaacctggtcttcctgggtattgctgtctctaagcaagacctgatcacctgtctggagcaagaaaaagagcctttgactgtgaagagacatgagatggtgaatgaacccacagggcccagacagaagagaagagtcacatcatctagatgatgaatgaaaagatatgtcattatt

SEQ ID NO: 27676 - DNA, 719 bp, Homo sapiens
  SIMILAR (412)..(570): 331254mologous to Gorilla gorilla Protamine P2,accession number X71336,Smith-Waterman Score=83.
atggtaccaccctcttgtacctctggtagaatcagtgtaatccttgctggccatgtgtggcgcctggatctgaatgctggtatgctagaaagggcacgagaaggtggggttttaaaagttatccaatcagcgacgctgggttgggaaccgtccaatcaggcctgcagctggagcggacaggacggcttcggggatgtggcggggcctttgtctctcgctgcagctggagctgcaggtctcgccttcactgccctgtgtcctctgctcgcagaggcccagcctctgtggccctgtgacctgcaggtattgagagatccacagctaagacgccagaaatcaaccaaaagtcaacgcaccaaaaagaaacgaacgaaccggttcattcattttgtaacgcctaaaaggggtgttcactataagaaatgttacacgaaatgtacaagaaatgttacacgaaatgtacaagaaatgttgcacgaaatgtaccacgaatgttgccggaaacgttaccagaaatgttgccgaaatgttacacgaaatgtgtctgggttaggagccaggcgtcgaactcgtgaaccggatcacatcgttgggaacgactgctttacaattaaggtacggggactaccgatttgccgctatacccggttaatccttcgaaacggtggtgaaacggggatggcagttccccgccgggttgaacgtgtgccagtacccac

SEQ ID NO: 27677 - DNA, 2649 bp, Homo sapiens; identical to SEQ ID NO: 24652
  SIMILAR (1368)..(403): 961254mologous to Escherichia coli transposase,accession number X60200,Smith-Waterman Score=1597.

SEQ ID NO: 27678 - DNA, 2203 bp, Homo sapiens
  SIMILAR (922)..(2): 991254mologous to Escherichia coli transposase,accession number X60200,Smith-Waterman Score=1585.
ctgcatcggcaagccggggggaaaactgataccccagtagacaaaacagaccgaaaataatatcgctgctacccgcagtgtctgtcatgatatcaactggatacagccctgtctgctgctcaagaagtccttccagtacaaaaatcgaatcccgtaatgtaccgggtaccacaatgccatggaacccagagtactgatcagatacgaagttataccaggtgatgcctcgtccagaaccaaaatattttctgttagatcctgagttgatggtcttcactggtgtgacaaagcgcatgccgtcagctgatgccacttctccacctccccaacgaccagcaagctccagtgtggactgaaaatcaaccaggcgggcattggcgctgaccagcgtttctgcacgaaggtaattctgtttcacccaactgagccgatggcgggtcagtgctggtatattgtgctttatcagcggttccagtccgatattacaggcttcagccatcaataccgcacataaactgatgtgcaaatcttgcgctcgagcaccagattcactgacatgcgcaaactcatgtgtaaatcctgtctgggcatctatctcaagtaacagttccgttaaatctaccggtgggagtagctgtttgatccgattatttagacgaagcaatgatggtggctcttcctgtttctccagacaactgatagtcagggatggatatttaccttcattacagatatgaacttccgcattcttttcaaatcgtgatgccacggctttccaggtctcatccagctgaatagccagttgttgcacacctttacgtccatcgacaggatgtcccagtgcccgacagacaggaatacgctgagtctgccactcttcaccttgcaacaacttctcgcgaggatctccccagcgatcactgcacgctgtatccgtccctccgcatcgtatacgaggcgtttcccagggaccggtgataatatgttcaggcgcatcatcaaggatgcgctttttcgaaccattcagttctgccagataatgaatcgcagccagtacatgttcacctgccggtgccgcacggaaatgcaggtcccgcaacaccgccggaagaaaacgtttaacccgaccgtactgctcaaccatttcgtcatggaaattattgttctgtggacgagcaagttcattaaccttgcttacagattctgccagtctgtttttgggtacgcacttgaagataacctgcctgagatctgggacatctgtattatcatccagcaacaatgcacatgcccgcgccagtaacaatgcggcctgatcaagatctttcagtgtcctgagtctttttttttgcccggttttctttgcttcgcggataatgtccagaattagcatatcaagcacatcaacggcatcgtctaatgccgttatttcctgtgctttaacgaatgcagtaagtacagcaagctttctctgctgtggcattcgagcgatatattttaccgacgccatgccagcataacgagccagattacgcagttgaatggcaggcagaccggaaaagttcagtcgggaaaactcaagacttcgtaatcggatatatcgttccagcgcttcattaaacgcaggtccactgactgtaacagggccttttttcaactgttccagtgctgatacacgctgaccttccggaatgaccagaagctccatcacttgagctgcctgccatttgttcggcagtgcggccagctttttccacagccgctgatttgccctttcacgaatttcactgatgagacgtactagtgtggttgctccgggcagtaataccttattttgaagcaaccatgcagtggcaaaatcaaacatcagacccggtcgctcattactgagccacgcccgggtatatagcagacgcttcaggcggaaagaccatggaaaatcaccaaattcatgatagccgtaatattccttaattaatgcagtatgttctctaagggtagtgtcccgttcagcatagcgggagagaacttctggacggtggatattaagctgtaccgcgacaaaatgttgaacaccaggcagaacctgagttaaatccgtcagaaatgttcccagaaaacgggctgtggtgagctgaagcgcaatgcccagcctattatgtgtgccccgtcgttggttaatgataggccagatcccgttcat

SEQ ID NO: 27679 - DNA, 499 bp, Homo sapiens
  SIMILAR (489)..(85): 621254mologous to Escherichia coli No definition line found,accession number U00039,Smith-Waterman Score=367.
atgcaggccaatagggcgcgtacccactacaggtccggcaatattaatgtgttacagcaggcctgcccacaagaggtgtggatcaaccccattgatgctcaggcacgcggtatccgtcatggcgataccgtgcgggtatttaacaataatggagaaatgctgattgccgcaaaagtgactccgcgtattctgcctggcgttaccgccatcgggcaagcgccacgtctgtgccgctacccattgcaatcccgatggcggcagtttcatcgctggcgcgtcgttaataccgtcaccgaccatcgccagcgcatgttgattcagctcggtcaccgctttgactttatcttccggcaacaggcccgctttaaactccagccccagctccccggcaattgcgcccgctgcgcgtggattatcgccggtgaggatcacccctttgacgcccagcgcgttcagttcactgatggcagttgcagcatcggcgcgcaggggtatcctg

SEQ ID NO: 27680 - DNA, 1116 bp, Homo sapiens
  SIMILAR (493)..(1110): 991254mologous to Escherichia coli No definition line found,accession number U00039,Smith-Waterman Score=1074.
atgtccatccgttttgcccgcaaagccgactgtgctgccattgcggaaatttataaccacgccgtgttgtatacggcggctatctggaatgaccaaacggtggatgctgataaccgcattgcgggtttttgcgaagaccgctgtactggctgtaaaacctgcgaactggcgtgcaaagattttaaagatcttggcccggaagtcagtttccgccgtatttatgaatacgctggcggcgactggcaggaagataatggcgtctggcaccagaacgtgttcgcttattatctctccatctcctgtaaccattgcgatgaccccgcatgtacaaaagtctgccccagcggcgcaatgcataagcgtgaagatggctttgtggtggttgatgaagatgtttgtatcggctgccgctactgccacatggcttgtccgtacggcgcgccacagtacaatgctgaaaaagggcacatgacgaaggtttgcactgttcgctttaatcagggcgaagttggcacctgtccgagtcgtgctttagtgcaggaatctatctacgaacgctttatggaacgcgccatccgccgtgtcgaaagcattcgtagcggtaacccgctcgacagcgtgacgcaaatgggcgcgcaggtttctcacgggcaactggaaaccatcctcaactacattgatatcggtaaaaaagagggcgctgacgtgctcacaggcgggcggcgcaagctgctggaaggtgaactgaaagacggctactacctcgaaccgacgattctgtttggtcagaacaatatgcgggtgttccaggaggagatttttggcccggtgctggcggtgaccaccttcaaaacgatggaagaagcgctggagctggcgaacgatacgcaatatggcctgggcgcgggcgtctggagccgcaacggtaatctggcctataagatggggcgcggcatacaggctgggcgcgtgtggaccaactgttatcacgcttacccggcacatgcggcgtttggtggctacaaacaatcaggtatcggtcgcgaaacccacaagatgatgctggagcattaccagcaaaccaagtgcctgctggtgagctactcggatctttag

SEQ ID NO: 27681 - DNA, 1488 bp, Homo sapiens
  SIMILAR (756)..(190): 981254mologous to Escherichia coli transposase,accession number X60200,Smith-Waterman Score=996.
ttagcgggtgtccgtgtcctttttgtctggccgtgtttgcgtcacattgttctgttccgtgcgtgtatctccctgaattctgttggaataaccggtgaatttccgcccttttgtagtgatgctgaataccgcgtctctttcaagatcccggttgccgccatcaaaccgatcagaggcgtaaaaataccctggctcttcctgtttctccagacaactgatagtcacggatggatatttaccttcattacagatatgaacttccgcattcttttcaaatcgtgatgccacggctttccaggtctcatccagctgaatagccagttgttgcacacctttacgtccatcgacaggatgtcccagtgcccgacagacaggaatacgctgagtctgccactcttcaccttgcaacaacttctcgcgaggatctccccagcgatcactgttttcaagccagatgtcccggcggcgcagtgcatcctgaaggcgttccagcaaacatagtgaataacctgcacgctgtatccgtccctccgcatcgtatacgaggcgtttccagcgaccggtgataatatgttcaggcgcatcatcaaggatgcgctttttcgaaccattcagttctgccagataatgaatcgcagccagtacatgttcacctgccggtgccgcacggaaatgcaggtcccgcaacaccgccggaagaaaacgtttaagccgaccgtactgctcaaccatttcgtcatggaaattattgttctgactgccggacgtattgatgccgcgttccaggatgaggtcgctgccagcgaaggtttcctcaaacaacctgtcggtaaagattacaaattcggtggcccgtctgttaaagatgaaaaactgtttggcgtagggaccggcatgggccatcataactaactctctgtctaaacctctatccagcatctcctgagcaatacgcagggcttcttcgtgtttgccctgcattgcgccttcttcacgtaatctgtcagcaatggtcatcagtttctccttttcttgtggtgcgcgttccgctatctcaccaataaatgcacgaaaacgctgggcatcccctgtttgtaatacgtaattaaacagggcttttagctgtctgtcattagtgttccctgtaactagcagcgaaacaatttggtcgactaatcccaacagatcgcgctgacgaatatgtttctgaattaactccaacagcgccattttgcggtgttgcataatctcgtcatccggcaccacggtaatatccaccaacggaaaagccgatgaatatattttgcgggctatagcaggctcgacaaattggggatcgattcgacttgcgagaaactgtagatccagctcttcttcgtctggtgtttccgtcatcaaggcccatcgttgctggctggcaacgatggtttgtgccgcgccagccttgcgcagctcatagctatctttgcctggcttatcaacatacat

SEQ ID NO: 27682 - DNA, 2700 bp, Homo sapiens
  SIMILAR (1600)..(2352): 931254mologous to Escherichia coli phnE protein,accession number J05260,Smith-Waterman Score=1238.
atgacagacttaatccaacgccctcgtcgcctgcgcaaatctcctgcgctgcgcgctatgtttgaagagacaacacttagccttaacgacctggtgttgccgatctttgttgaagaagaaattgacgactacaaagccgttgaagccatgccaggcgtgatgcgcattccagagaaacatctggcacgcgaaattgaacgcatcgccaacgccggtattcgttccgtgatgacttttggcatctctcaccataccgatgaaaccggcagcgatgcctggcgggaagatggactggtggcgcagcacagcgaatttgtggatttctttgccacctataaagcgacgttgcccgcgattggtcgtttgatgaaagtgtgccgtgcgcgcgttgtaccgctgtttccgatttatgatggcaagacgcatcgtctgacgattcaggtgcgcccaccgatggatgatctgttagaggcggatgatcatacgattgcgcggcggatgaatgaagaagtcgagatttttgttgaacgtgtgggccgccagttgatgcaaaacatcccagcctggacctataaaggccgttggtggcagcgttttggctggcgcaaacgccgtgccattgaactgctgcaccgcgtggggattaaagatcacaaagatgcgatgcgcagttttccctatgagttgaccgaaggtgaatgtcagaaagtgatgatagccattgcactggcgaatcaaccgcgtctgctgattgctgacgaaccgaccaactcaatggagccaacaacccaggcgcaaatctttcgcctgctgacgcgtctcaaccaaaacagcaataccactattttgcttatcagccatgacttacaaatgcttagccaatgggcggataaaattaacgtgctttactgcggtcaaacagtggaaaccgcgccgagtaaggagttggtgacgatgccacatcatccttatacccaggcgctgatccgcgcgataccagacttcggcagcgcgatgccgcataaaagtcgcctcaatacgctgcccggcgctatcccactgctggaacagttaccgattggttgtcgtctggggccacgttgcccgtatgcacaacgagaatgcattgtgacgccacgtttgacgggggcgaaaaatcatctctatgcctgtcatttcccgctgaacatggagaaagataaaacgttccgctaccggaccggctggtttcgtcgtcagaccgtagaagcggtaaaacccttgagctttacgctacgtgaaggccagacactggcgattattggcgagaatggttcgggtaaatccacgctggcaaaaatgctggcgggaatgatagagcctaccagcggcgagttattgattgacgatcatcgaccgcatttgggccattattccaacgggggaaggtactttccccagccccggggtaaagatatatttcgcctcgaccatcgggtccaacagctgcgccagcttcactcgctgcgcagggaaacattcgttgatatcccgcaggcagcatgcacagttttggcccccaccccgccccgcgtcgcatccgacaatgtgcaggcgttgatgccggatgcggtgcaagcaccttatccggcctacagaccggagccaaacatgcaaaccatcaccatcgccccacccaagcgcagctggttctcgcttctgagctgggccgttgtactcgccgtgttggtcgtctcgtggcagggcgcggaaatggccccgcttacgctgatcaaagacggcggcaacatggcgacgttcgccgccgacttcttcccgcccgatttcagccagtggcaggattacctcaccgaaatggccgtcacgctgcaaatcgccgtctggggcaccgcgctggcggtggttctctccatcccctttggcctgatgagcgccgaaaacctggtgccgtggtgggtttaccagcccgttcgccgcctgatggacgcctgccgcgccattaacgaaatggtcttcgccatgctgttcgtggtcgccgtcggcctcggcccgttcgctggcctgctttccgaagcggtggaagcgattgagcccggcccggtggaaggcattcgcgccaccggtgccaacaagctcgaagagatcctctacggcgtgctgccacaggtgatgccactgctgatctcctactccctctatcgcttcgaatccaacgtccgctcggcgaccgtcgtcggcatggtcggcgcaggcgggatcggcgtcaccctgtgggaagcgattcgcggtttccagttccaacaaacctgcgccctgatggtgcttatcatcgtcacgtggctttccttgctgattcatgggctggttgccgctgttattttactcatgccctggccactcagttacaccccgttatggatggtgttactttcgctggtggtgtttgattgcgttcgcagccagcggcgtattaatgctcgccagggggaaattcgcttgttgatggacgggcgtttgcgttggcaagggcaggagtggagcatcgtcaaagcaccgtggatgattaagagcggcatgatgctgcgtttacgttctgatggcggtaaacggcaacatttatggctggcagccgacagcatggacgaagctgaatggcgggatttacggcggattttgttgcaacaagagacgcaaagataa

SEQ ID NO: 27683 - DNA, 2001 bp, Homo sapiens
  SIMILAR (508)..(1194): 981254mologous to Escherichia coli CG Site No. 551,accession number U00039,Smith-Waterman Score=1154.
atgcccagtttgttcgcctggttgggttatctggtgtgcactgtccttacccttctggtttctcgtcgggttgataaccctttcttattgtctggtgaccgtgacacccctttggaaaggcctctaaaccctctgagttatatacttacgatggatgaattgtgtgaggaaacaagtaatgttggggacaaagtgcggttgcatgacagagaccagaattcaagagatgacgtaggagagagaaacaacaagagaaacaacagtgctggcaatggaaacctcacatcaaggattgaattagcgccaggtgtgcgtactacgctgtttatcccggtgcgagcattgccgggttatggcgatggagaaattcaggccaccattagcgggttagcgttaccgggtgaaaccgttgccgatcagcataagcagtggaaaatcggcgtccgtccggcgttcccggcacaaacggttaattacggtacggcgttacagcctgcaatatggcttctggcagaagatattaaagtcgcgttcgtgggcgcaatgtccggtccggttgcgcagtacggtgaccaggagtttaccggcgcagagcaggcggttgcggatatcaacgctaaaggcggcattaaaggcaacaaactgcaaatcgtaaaatatgacgatgcctgtgacccgaaacaggcggttgcggtggcgaacaaagtcgttaacgacggcattaaatatgtgattggtcacctctgttcttcatcaacgcagcctgcgtctgacatctacgaagacgaaggcattttaatgatcaccccagcggcaaccgcgccggagctgaccgcccgtggctatcagctgatcctgcgcaccaccggcctggactccgaccaggggccgacggcggcgaaatatattcttgagaaagtgaaaccgcagcgtattgctatcgttcacgacaaacagcaatacggcgaaggtctggcgcgagcggtgcaggacggcctgaagaaaggcaatgcaaacgtggtgttctttgatggcatcaccgccggggaaaaagatttctcaacgctggtggcgcgtctgaaaaaagagaatatcgacttcgtttactacggcggttatcacccggaaatggggcaaatcctgcgtcaggcacgcgcggcagggctgaaaactcagtttatgggtgaagatggctttgtggtggttgatgaagatgtttgtatcggctgccgctactgccacatggcttgtccgtacggcgcgccacagtacaatatgcgtgtcgcgttgtgtctccccgcttgctctttggtggcggtgttgctgcgtaggcgcgccccgccccctcgaattcgtgcctgtttgctggcgcccgtgcgggcgttatccccccgtccgtgcagctattttttacggcccacccagcaggctggtggtcgatggtggaaaggtagaactgacgctgcaaagggggaaacgcttcagcctgatgtggtgatttacggtattggtatcagcgccaacgagcaactggctcgcgaggccaaccttgatactgccaatggcattgtcattgatgaggcttgccgcacctgcgatcccgcgatctttgccggtggcgatgtggcaatcactcgtcttgataatggtgcactacaccgctgcgaaagctgggaaaacgccaataaccaggcgcaaattgccgctgccgcaatgttagggctaccgctaccgctactgccgccgccgtggttctggagcgatcagtacagtgataacttacagtttattggcgatatgcgtggcgatgactggctttgtcgtggcaacccggaaactcagaaggcgatttggtttaatctgcaaaacggcgtgcttatcggtgcggtcacgctgaatcaggggcgtgagattcgcccaattcgcaaatggatccagagcggcaaaacgtttgatgcgaaactgctgatagatgagaacatcgcgcttaaatcactgtaa

SEQ ID NO: 27684 - DNA, 3009 bp, Homo sapiens
  SIMILAR (3009)..(4): 991254mologous to Escherichia coli transposase,accession number X60200,Smith-Waterman Score=5171.
ttaaggagataattcgttgtttatatttaaatttagagctctcagttccccttttaaaatatcctctggcaacgtgaatgtataatggcccaacatattgatatgcccgtgcatcaggggagatagccgagcgatatcttcatctataatttcttcgccattacggcgcatccagctcaacgcttcctccatatagagcgtgttccacagaaccactgcattagtaaccaggcccagcgcccccagttgatcttcctgcccttcacgataacgctttctgatctctccgcgttgtccgtaacaaatcgcacgagccacagcgtggcggccttctcctcgattaagctgcgtcaggatccgccgacgataatcttcatcatcaatataattgaggagatatagcgttttgtttacacgccctacttccataattgcctgtgccagtcctgatgggcgcgagcttttcagtaaagagcgaatgagttctgacgcatgaattgtacccaacttcagcgaaccagcggttcgcatcatctcatcccactgactctccgcttttgacagatctgcatatcctcgggccaacttatccagtactccgtagtttgccgatttattcacccgccagaacaccgcctcacctgcatcggcaagccggggggaaaactgataccccagtagccagaacagaccgaaaataatatcgctgctacccgcagtgtctgtcatgatttcaactggattcagccctgtctgctgctcaagaagtccttccagtacaaaaatcgaatcccgtaatgtaccgggtaccacaatgccatggaacccagagtactgatcagatacgaagttataccaggtgatgcctcgtccagaaccaaaatattttctgttagatcctgagttgatggtcttcactggtgtgacaaagcgcatgccgtcagctgatgccacttctccacctccccaacgaccagcaagctccagtgtggactgaaaatcaaccaggcgggcattggcgctgaccagcgtttctgcacgaaggtaattctgtttcacccaactgagccgatgggcggtcagtgctggtatattgtgctttatcagcggttccagtccgatattacaggcttcagccatcaataccgcacataaactgatgtgcaaatcttgcgctcgagcaccagattcactgacatgcgcaaactcatgtgtaaatcctgtctgggcatctatctcaagtaacagttccgttaaatctaccggtgggagtagctgtttgatccgattatttagacgaagcaatgatggtggctcttcctgtttctccagacaactgatagtcagggatggatatttaccttcattacagatatgaacttccgcattcttttcaaatcgtgatgccacggctttccaggtctcatccagctgaatagccagttgttgcacacctttacgtccatcgacaggatgtcccagtgcccgacagacaggaatacgctgagtctgccactcttcaccttgcaacaacttctcgcgaggatctccccagcgatcactgttttcaagccagatgtcccggcggcgcagtgcatcctgaaggcgttccagcaaacatagtgaataacctgcacgctgtatccgtccctccgcatcgtatacgaggcgtttccagggaccggtgataatatgttcaggcgcatcatcaaggatgcgctttttcgaaccattcagttctgccagataatgaatcgcagccagtacatgttcacctgccggtgccgcacggaaatgcaggtcccgcaacaccgccggaagaaaacgtttaacccgaccgtactgctcaaccatttcgtcatggaaattattgttctgtggacgagcaagttcattaaccttgcttacagattctgccagtctgtttttgggtacgcacttgaagataacctgcctgagatctgggacatctgtattatcatccagcaacaatgcacatgcccgcgccagtaacaatgcggcctgatcaagatctttcagtgtcctgagtctttttttttgcccggttttctttgcttcgcggataatgtccagaattagcatatcaagcacatcaacggcatcgtctaatgccgttatttcctgtgctttaacgaatgcagtaagtacagcaagctttctctgctgtggcattcgagcgatatattttaccgacgccatgccagcataacgagccagattacgcagttgaatggcaggcagaccggaaaagttcagtcgggaaaactcaagacttcgtaatcggatatatcgttccagcgcttcattaaacgcaggtccactgactgtaacagggccttttttcaactgttccagtgctgatacacgctgaccttccggaatgaccagaagctccatcacttgagctgcctgccatttgttcggcagtgcggccagctttttccacagccgctgatttgccctttcacgaatttcactgatgagacgtactagtgtggttgctccgggcagtaataccttattttgaagcaaccatgcagtggcaaaatcaaacatcagacccggtcgctcattactgagccacgcccgggtatatagcagacgcttcaggcggaaagaccatggaaaatcaccaaattcatgatagccgtaatattccttaattaatgcagtatgttctctaagggtagtgtcccgttcagcatagcgggagagaacttctggacggtggatattaagctgtaccgcgacaaaatgttgaacaccaggcagaacctgagttaaatccgtcagaaatgttcccagaaaacgggctgtggtgagctgaagcgcaatgcccagcctattatgtttgccccgtcgttggttaatgaaggccagatcccgttcatcaagatgaaaatagcgcgccagttgcacgtcattaggttctgcagcataacaaccgtaattctgtttttggtcagaggttagaaagtcgacaggcat

SEQ ID NO: 27685 - DNA, 3414 bp, Homo sapiens
  SIMILAR (2616)..(814): 991254mologous to Escherichia coli transposase,accession number X60200,Smith-Waterman Score=3135.
ctataccacaattcccagagatgctccaaagatgttctcttctccctccccaggtctgatccacacagggggtgctaccatgcgctgccacttctggaaaaggcaggtcttgaggcagtcgcgggggctgaggctgtaggtcttgtggcgtgacatgagctcttgcatgggctcgagtatcacacagagatgcatggcaaggatgctgcgggggatgagctctcggtgctgccggatgctgaagtgccacgtctttatccgcatcatgtcgtcaaacatgaactccaggtacaaccggccctccacacacacctgctctaagctatatgagggcagactcttgttcactcgtgtagccttggggcccagaaaactgggtaaacatgggcttgcatgctgggtcaccatgctgccctggtcacagtcgagggacacaaagttgctgtggaatgcctccttggggtgcttaagaacatagtacagctccgtagcacccccctcaaagatgctgcggaagtagcgtgggatcagggtccggccaatggtatatctctttggtccatcctccaggcagaaagtgatggtcaacatggcatcatcctcaaagaactcagtcgtgaatgcatcccaccagagattgtcacactcctctgtccagttctgaagccgtttgttaagctcaaatattctgtagtcagtttggttgccatatggtgtgtgcctccccacatccctatccagcatggtgccgggatggaaggggggaaaggcgttgccgttcgggggctccttcggcgagtacagcttgaattgagtgaatgtataatggcccaacatattgatatgcccgtgcatcaggggagatagccgagcgatatcttcatctataatttcttcgccattacggcgcatccagctcaacgcttcctccatatagagcgtgttccacagaaccactgcattagtaaccaggcccagcgcccccagttgatcttcctgcccttcacgataacgctttctgatctctccgcgttgtccgtaacaaatcgcacgagccacagcgtggcggccttctcctcgattaagctgcgtcaggatccgccgacgataatcttcatcatcaatataattgaggagatatagcgttttgtttacacgccctacttccataattgcctgtgccagtcctgatgggcgcgagcttttcagtaaagagcgaatgagttctgacgcatgaattgtacccaacttcagcgaaccagcggttcgcatcatctcatcccactgactctccgcttttgacagatctgcatatcctcgggccaacttatccagtactccgtagtttgccgatttattcacccgccagaacaccgcctcacctgcatcggcaagccggggggaaaactgataccccagtagccagaacagaccgaaaataatatcgctgctacccgcagtgtctgtcatgatttcaactggattcagccctgtctgctgctcaagaagtccttccagtacaaaaatcgaatcccgtaatgtaccgggtaccacaatgccatggaacccagagtactgatcagatacgaagttataccaggtgatgcctcgtccagaaccaaaatattttctgttagatcctgagttgatggtcttcactggtgtgacaaagcgcatgccgtcagctgatgccacttctccacctccccaacgaccagcaagctccagtgtggactgaaaatcaaccaggcgggcattggcgctgaccagcgtttctgcacgaaggtaattctgtttcacccaactgagccgatggcgggtcagtgctggtatattgtgctttatcagcggttccagtccgatattacaggcttcagccatcaataccgcacataaactgatgtgcaaatcttgcgctcgagcaccagattcactgacatgcgcaaactcatgtgtaattcctgtctgggcatctatctcaagtaacagttccgttaaatctaccggtgggagtagctgtttgatccgattatttagacgaagcaatgatggtggctcttcctgtttctccagacaactgatagtcagggatggatatttaccttcattacagatatgaacttccgcattcttttcaaatcgtgatgccacggctttccaggtctcatccagctgaatagccagttgttgcacacctttacgtccatcgacaggatgtcccagtgcccgacagacaggaatacgctgagtctgccactcttcaccttgcaacaacttctcgcgaggatctccccagcgatcactgttttcaagccagatgtcccggcggcgcagtgcatcctgaaggcgttccagcaaacatagtgaataacctgcacgctgtatccgtccctccgcatcgtatacgaggcgtttccagggaccggtgataatatgttcaggcgcatcatcaaggatgcgctttttcgaaccattcagttctgccagataatgaatcgcagccagtacatgttcacctgccggtgccgcacggaaatgcaggtcccgcaacaccgccggaagaaaacgtttaacccgaccgtactgctcaaccatttcgtcatggaaattattgttcgacgccatgccagcataacgagccagattacgcagttgaatggcaggcagaccggaaaagttcagtcgggaaaactcaagacttcgtaatcggatatatcgttccagcgcttcattaaacgcaggtccactgactgtaacagggccttttttcaactgttccagtgctgatacacgctgaccttccggaatgaccagaagctccatcacttgagctgcctgccatttgttcggcagtgcggccagctttttccacagccgctgatttgccctttcacgaatttcactgatgagacgtactagtgtggttgctccgggcagtaataccttattttgaagcaaccatgcagtggcaaaatcaaacatcagacccggtcgctcattactgagccacgcccgggtatatagcagacgcttcaggcggaaagaccatggaaaatcaccaaattcatgatagccgtaatattccttaattaatgcagtatgttctctaagggtagtgtcccgttcagcatagcgggagagaacttctggacggtggatattaagctgtaccgcgacaaaatgttgaacaccaggcagaacctgagttaaatccgtcagaaatgttcccagaaaacgggctgtggtgagctgaagcgcaatgcccagcctattatgtttgccccgtcgttggttaatgaaggccagatcccgttcatcaagatgaaaatagcgcgccagttgcacgtcattaggttctgcagcataacaaccgtaattctgtttttggtcagaggttagaaagtcgacaggcat

SEQ ID NO: 27686 - DNA, 1262 bp, Homo sapiens
  SIMILAR (189)..(1046): 971254mologous to Escherichia coli SapD protein,accession number X97282,Smith-Waterman Score=1462.
tctaagggattcggggggccaatttcctttcgcctgaatgggggagcaatgttcggtgatgcgctggaattgatttatgtcgccccgtgcactgtcatgttgccaggtgcggcaattaggataagcgtgttgttggttaacctccttggcgatggcgttcgtcgtgcgattatggcgggggtggaataatgccattactcgatattggtaccctgaccattgaatttaaaaccggtgatgagtgggttaaagccgtcgaccgggtaagtatgcccttaaccgaaggtgaaatccgcggtcttgttggtgaatccggttccggcaagagtttgattgcgaaagcgatttgtggggtgaataaagataactggcgtgttactgctgcccgtatgcgttttgatgatatcgatttgttgcgtctctccgcacgcgaacggcgcaaactggttggccataacgtgtcgatgattttccaggaaccgcagtcgtgtcttgacccttcagaacgtgtgggccgccagttgatgcaaaacatcccagcctggacctataaaggccgttggtggcagcgttttggctggcgcaaacgccgtgccattaaactgctgcaccgcgtggggattaaagatcacaaagatgcgatgcgcagttttccctatgagttgaccgaaggtgaatgtcagaaagtgatgatagccattgcactggcgaatcaaccgcgtctgctgattgctgacgaaccgaccaactcaatggagccaacaacccaggcgcaaatctttcgcctgctgacgcgtctcaaccaaaacagcaataccactattttgcttatcagccatgacttacaaatgcttagccaatgggcggataaaattaacgtgctttactgcggtcaaacagtggaaaccgcgccgagtaaggagttggtgacgatgccacatcatccttatacccaggcgctgatccgcgcgataccagacttcggcagcgcgatgccgcataaaagtcgcctcaatacgctgcccggcgctatcccactgctggacagtaccgattggtccgagccccatttatatattaaaacctcccaaagtgctgggcattacaggcctgagccacatttccgacctgacatttattttgaagctttcatttatggagcctctggacatattgtggtaacccttttggagctcttattcgacattgttgtcgaatatttgttgtaccggggttacagcccctgttccacctggttttga

SEQ ID NO: 27687 - DNA, 2604 bp, Homo sapiens
  SIMILAR (243)..(13): 631254mologous to Homo sapiens bA162G10.3 (zinc finger protein),accession number AL135791,Smith-Waterman Score=257.
ttattcacctggacagtgcctcccaaacatttcttcctccatcacccagggctcctcttcttgctccaacttgaatatcacatccggtttggtgacttgacagcccactgtgactaggttgctgtagttctccagcatcacatctcgatacaagtttctttgagcaggtttcatttgctcccactcctcctgggtaaggtcaacagccacatccttaaatgtcactgtttcctgtaaaaacataatgctaattaatttgaagtcatcaaaattaggcattgtgatcacaacatacaagaacttgtttagctggtactcaggggtcagaggtaggagtactaacgggcacacagccagaccggtcctggaattgacgggggcacgacttcggggagactcacccgcacaccgtcgggacaggcctgagccagggacgccgtactgcttcccgtagactccgcctgtggtttcttcatcctgctctgccctgtgcgactcctggcattcggagaacgtcctgtcgttctgtcgacctccagacgccagcagcacccacccttcatactgaaaaccaaaaatgactctggacattgccaaatgcctactggggtgtaggtatgagaaacgaaatggcccctgtttgagaacacctggcttatgtattaagcgcttccacagcacagggcctcttctggttcccagctgtgctttgcttttccttggcattgttggggaggtcacctgtgccccccttccaccgggcacatgcctggacaccagtgttcgtctcgccatcgccccatatggcctcggtgacacacactcaccccatctgctctctccatggggtcgaaaggacggtctctggatgccaggagtcgcggagggcggaccagcatgaggaaaccattggcggaaaatggcagaagcagtgcggcatcccagcctcaacccatctgttctgggggacgccagtgccacgtgtggtcgcattggctccaccttggactcgcccctgttcctgtttgcacgtgtactagaaagcggtgtcttcttgcaggagccccagggttggtgagatccaaaatctgaagaggagtcctgagaccctagcaggcgccctgaagctcctcctccaccggtagaagtcggcacaaggaggtctctccagggtgtcaacaggatggtctgcgatgccaagagtggtggagtgtccgaccaggatgatgaagccacaggcggagtctgggggaagcagctcggcatcccagcttcaggtctgccgggacggcgttcgagtgagtctcccagaaagtcgtgcacccccgtgacctcgaggacaggtctgcctgtgtgcccgtgggctgctctctcacccgagagtcgttctttttctttgtctgtgcgccccgtttgcgtgtgtgtgtgttgggacgaaaatgtcttgtgcaccggagtgctgtttctttcttgtaagcctgtctttgttgagcctctttttgcgtcttttactgggtcttgcggcccattgtcagtttttccctgccgttccactttgcattttgtgaaagcctcggcaacatggggagcatcgtgggtcccgcaggagttgaattctcctccccatcctgataggcctgtcttaatgatcccctccatcgtctggggaatgggtccctgaggcttgccgatcacaatcactccgtggcagtgcatccgtgtcaaagcttttgcctgacctctcaacgtggttgacatgattgtctcagactgaataaccagccccatgggacccgatttctgcccataccttccaatccggaatcggagcagaagagcagtcccgagtgcccacctcacggtctgaagcgcctcctcctccaccgggatccgaacacgaagtcggcttaaggaggccctgaggtcaggactcttagggtcctgcgctgcttgtcgcaagcagcctcctcccccaagccgccgccggtccatctctagcattttcctggggctgccgcctgacagccattgcagcgcgcgcgagccgaccacgacaatgcgcatgcaccaaacgcgaggcaccagggcaagctctgagccagggctggcctcccagggaccaccaccattgcctgggcacgggtcccagaggcttggcagatcaggagccctctgtggcagtgtgtagagttgggctgatgtctctcctctctgagggatcagcacggtgatcccacaatccttggagactggcagggccgaactaggcttctgatgctcctcactctgtggctccgcttgggctgcggggccccacgtcctttgttttgcttgtagttcctgaagcctcggagaagtggggggctggctccaacccacaggggtccaaatcatctccccaccccggggagccactcttagcatattggttccgtatttcccatcagactcccatggggttcgtcccaaacgctcaggccccacatggggtgcactctcccggctcctcaacacgatacgcagctggcccgcctcaagagcgtctgcgtgctcggcctcacaaagtgttgggattacaggcgtgagccaccgcacccggcccat

SEQ ID NO: 27688 - DNA, 2809 bp, Homo sapiens
  SIMILAR (1562)..(2086): 981254mologous to Escherichia coli Dimethylsulfoxide reductase (EC 1.8.-.-) chain B,accession number D90801,Smith- Waterman Score=970.
atgcgttatgatgatatcgatttgctgcgtctctccgcacgcgaacggcgcaaactggttggccataacgtgtcgatgattttccaggaaccgcagtcgtgtcttgacccttcagaacgtgtgggccgccagttgatgcaaaacatcccagcctggacctataaaggccgttggtggcagcgttttggctggcgcaaacgccgtgccattgaactgctgcaccgcgtggggattaaagatcacaaagatgcgatgcgcagttttccctatgagttgaccgaaggtgaatgtcagaaagtgatgatagccattgcactggcgaatcaaccgcgtctgctgattgctgacgaaccgaccaactcaatggagccaacaacccaggcgcaaatctttcgcctgctgacgcgtctcaaccaaaacagcaataccactattttgcttatcagccatgacttacaaatgcttagccatggaaatatcgccgaggcacgagttggtgacgatgccacatcatcctatacccaggccctgatcgcgcgttacaaaattcgaaacccgatgcgcataacatccctcaatagctcccgcgctatcccctgtgaacagtaccgatggtgtctctggggcacgtgcggaagttcaggagtggaatttacccttcattacggattggaacttgggcatttttttcaaacggggatgcacggcttttcaggtttaattcggctgaatagccagttgttgcacacctttacgtccaatgacaggattgtcccagatgttccggcggcgcagtgcatcctgaaggcgttccagcaaacatgtggaataacctgcacgctgtatccgtccctcggcatcgtatacgggcgtttccagggaccggtgataatatgttcagggcatcatcaaggatgcgctttttcgaaccattcagttctgccagataatgaatcgcagccagtacatgttacctgccggtgccgcacggaaatgcaggtcccgcaacaccgccggaagaaaacgtttaacccgaccgtactgctcaaccatttcgtcatggaaattattgttctgtggacgagcaagttcattaaccttgcttacagattctgccagtctgtttttggcgcttcattaaaatccggtcacgctgcaggtcgatctacaggcaaccccgttgaaaacaccttcggggaaaatcgaaatttattctgaacgactggcgaagattgcagatacctgggaattgaaaaaagatgaaattattcatccccttcctgcgtataccccaggttttgatggctgggacgatcccctgcggaaaacctatccactgcagttaacgggcttccattacaaagcgcgtacccactccagctgcggcaatattgatgtgttacagcaggcctgcccacaagaggtgtggatcaaccccattgatgctcaggcacgcggtatccgtcatggcgataccgtgcgggtatttaacaataatggagaaatgctgattgccgcaaaagtgactccgcgtattctgcctggcgttaccgccatcgggcaagattttaaagatcttggcccggaagtcagtttccgccgtatttatgaatacgctggcggcgactggcaggaagataatggcgtctggcaccagaacgtgttcgcttattatctctccatctcctgtaaccattgcgatgaccccgcatgtacaaaagtctgccccagcggcgcaatgcataagcgtgaagatggctttgtggtggttgatgaagatgtttgtatcgcgtgccgctactgccacatggcttgtccgtacggcgcgccacagtacaatgctgaaaaagggcacatgacgaagtgcgatggttgttattcgcgcgtcgccgaggggaaacaacccatatgtgtcgaatcctgcccgctgcgtgcacttgagttcggtccaattgaagagctgcgccagaagctcggcactcttgctgccgtcgcgccactgccgcgcgcgcatttcacaaaacccaatatcgttatcaaacctaacgccaacagccgcccgaccggcgataccactggttatctggtggttatctttaccgtattgggtcaatgcgtagtaggcgcgctgattgttagcggaattggctggttcgccgccaaaaatgacgcagaccgtcagcgtattgtccgtggcatgtttttcctctggctgttgatgggcgtcgggtttattgcctctgtcatgcacctgggatcgccactgcgggcgtttaactccctgaatcgaatcggagcttctggtcgttgtcttagaaaccagtccctgaggcttggcaaagcaggagccctccgtggcagtgcttggctgtcggggctccgaggctccggcctgacctctccacggggtcgacaggaacgtctccggatgccacgagtcgcacagagctagaggctcgttcttgcaggagagcacgaaccctcgcagcctcacgggcttgacctgcatgttctggtcccgccacttcccaggtgtgctttgcttttccttgacgttgttggggaggtcacctgtgccccccttccaccaggcacatacctggacaccattgttcgtctcgccatcgccccatatggccccatctgttctgggggacgccagtgccacgtgtggtcgcattggctccaccttggactcgcccctgttcctgtttgcacgtgtactagaaagcggtgtcttcttgcaggagccccagggttgaacaccgtcccggcagttgaggctgggatgccgcactgcttctgccat

SEQ ID NO: 27689 - DNA, 1134 bp, Homo sapiens
  SIMILAR (1)..(453): 411254mologous to Rattus norvegicus mucin,accession number M76740,Smith-Waterman Score=203.
atgacctccacccctagtgcctgcgatctgactctgcccgacgtgacctccacccctagtgcctgcgatctgactctgcccgacgtgacctccacccctagtgcctgcgatctgactctgcccgacgtgacctccacccctagtgcctgtgatctgactctgcccgacgtgacctccacccctagtgcctgtgatctgactctgcccgacgtgacctccacccctagtgcctgcgatctgactctgcccgacgtgacctccacccctagtgcctgcgatctgactctgcccgacatgacctccacccctagtgcctgcgatctgactgcccgacgtgacctccacccctatgcctgtgatctgactctgcccgacgtgacctccacccctagtgcctgtgatctgactctgcccgacgtgacctccacccctagtgcctgtgatctgactccgtcctgggtcttaggctctggctgcagccctgcccgcaggctccaggtcctctgcaaggacctaactgctgaggacaagcccacaagtgaggaaacagatgctcctctagctgacactaaagataagatgcctctagaaaaacaaactcctgttatacaggaacaggatgataaatgcgataagctccatgtttgtgaaggatgcagacccccggtgtcggcgggaaccaggaagctcttggggcctccctgggccagacctgcacccgggaagccgccgcaaggcttcaggagccccaggtcgccccaaggccgcgccgcaggattgaacaaagcggcgggtgcagcaacctcggcgcttccgagcgcgttcggggccggacgcccggcgtccggcgctggctccagaaaggcggcgggtgtggggcgcagaggcctatctcgcgccctagccgcggcccgcgccccgccgcagtccccggggacggtactcacacacgcagagctccaccacgtacgcgtagtaggaccagacgaccacgaaggtgatgaagagcaccggcacccagcccacgacgcgctggcagcagcgccacagcgtccagggcgccatgttccgctggcggctgccgagccccgcgtcccaccgttctggggagcgcgggagccccggcgacggtga

SEQ ID NO: 27690 - DNA, 687 bp, Homo sapiens
  SIMILAR (630)..(19): 531254mologous to Homo sapiens NAG13,accession number AF194537,Smith-Waterman Score=494.
ctactgatttgtgtacattaattttgtatctggaaactttgctaatccttttatcagttctaggagctttctataggagtctttagggtttttgaggtaaacaatcacatcatcagcaaacagtgacagtatgacttcctctttaccaatttggataccctttatttccttctcttgtctgactgctctggctaggactttcagtactgtgttgaagaggagtggtgagagagggcatccttgtcttgtttcatttctcagagggaatgctttcaacttttccccattcagtattatgttagctgtgggtttgtcatagatggcttttattacattgaggtatgtcccttgtatgccgattttgctgagagttttaaccataaagagatgctggattttgtctaatgctttttctgcatcagtcactgttacaacatcatctttacgagcttcagccatttcctgaacatggacttctgagttcacatcaacctctttccctgataactgtaaatgagcttgaagtgaagatgggaccttgacaataatagaacctatgagtgagaacatgcggtgtttggttttttgtccttgcagtagtttgctgagaatgatggtttccagcttcatccatgtccctacgaaggacatgaactcatcattttttatggctgcatagtattccat

SEQ ID NO: 27691 - DNA, 597 bp, Homo sapiens
  SIMILAR (474)..(4): 701254mologous to Homo sapiens NAG13,accession number AF194537,Smith-Waterman Score=567.
ctatttttgtacattaattttgtatctgaaaactttgccgaatgcttttatcagttctagaagctttctggaggagtctttagggttttcaaggtaaacgatcacatcctcagcaaacagtgacagtttgacttcctctttgctgatttggatgccctttatttctttctcttgtttgattgctctggctaggacttccagtactatgttgaagaggagtggtgagagtgggcatccttgtcttgttccagtgcccagagggaatgctttcaacttttctccattcagtattatgttggctgtgggtttgccatagatggctttcattacattaaggtatgtcccttgtatgccaattttgctgagagttttaatcataaagggatgctggattttgttgaatactttttctgcatctatagaccggatggcctggtactggtcttctctagactgaaggtcctccaccaggtctcctgctgctgctacagcacttggccctaaagagaaaacactaggaggatgggaaccagggacagagaagctacttgctctgcagctgtttgggccagtatgttccctaatcttgatggccat

SEQ ID NO: 27692 - DNA, 660 bp, Homo sapiens
  SIMILAR (247)..(657): 721254mologous to Homo sapiens putative p150,accession number U93564,Smith-Waterman Score=524.
atgcgaaggctcgcattgcgaattttagctccagagcgactgcaagaacaaaccaacaatcccaagaggacccacagaccctctgaaggaagtagactgctcctgcaggaccacagagacaccacaaatactgtgagtgccccaactgcagaagtgggaaagcctccaccacctccactagaacaggtgctggtattcacggctgagagacccatagacggttcacatcacaggactctgtgtggacaaccaccagtaccagcccggagtcagattatccaccatgatcaagtgggtttcataccggggatgcagggatggtttcacgtactcaagccaataaatgtcacacatgacataaacagaattaaaaacaaaaatcacatgatcatctcaatagatgcagaaaaagcattcaacaaaatccagcatctctttatgattaaaactttcagcaaaatcggcatacaagggacatacctcaatgtaataaaagccatctatgacaaacccacagccagcataatactgaatggggaaaagctgaaagcattccctctgagaactggaacaagacaaggatgcacactgtcaccactcctcttcagcatagtactggaagtcctagccagagtaatcagacgagagaaagaaatatag

SEQ ID NO: 27693 - DNA, 714 bp, Homo sapiens
  SIMILAR (331)..(708): 741254mologous to Homo sapiens NAG13,accession number AF194537,Smith-Waterman Score=466.
atggaacatgaaaccaccaaagctaagaaccctcacggagtccattgcactcccccaatacctccactggaacagatgctggtatccacagctgagggacccatagatgatttacatcataggactctgtgcagacagcccccagtaccaccccggagctggagctggttttctgggtccctctctaaccaaatgagaaggaaccagaaaaccaactcaggtaatatgacaaaacaaggctctttgacaacccccaaaaatcacactactttaccagcaatggatccaaaccaaaaagaaatccctgaaatcatttttaccttaacaagaattcaggaagatgcagaaaaagcattcaacaaaatccagcatcactttatgattaaaactctcagcaaaatcggcatacaagggacatacctcaatgtaataaaagccatttatgacaaactcacagccaacataatactgaatggggaagagttgaaagcattccctctgagagctggaacaagacaaggatgcccactctcaccactcctcttcaacatagtactcgaagtcatagccagagcaatcagacaagaaaaggaaataaagggcatccaaataggtaaagagggagtcaaactgtcaccgtttgctgacgatatgatcaattaccttgaaaaccctaaaggctcctccagaaagctcctagaaccgataaaataa

SEQ ID NO: 27694 - DNA, 1344 bp, Homo sapiens
  SIMILAR (776)..(949): 391254mologous to Homo sapiens unknown protein,accession number M22334,Smith-Waterman Score=111.
atggccgatgagaggcaggactggattgcagctccaactcggacagacagagcagagtgccgaggcttgcatagtgaattttatctccagaacaactgcaagaacaaaccaggaatcccgagaggacctacagaccctctgaaggaagtggactgctcctgcaggatccggagacactccaaataccacattggcttaggcaaggagttcatgaccaagaacccaaaagcaaatgcagtaaaaacaaagataaatagctgggacgtaattaaactaaagagcttttgcacagcaaaaggaacagtcagcagagtaaacagacaacccacagagtgggagaaactcttcacaatctattcatctgacaaacgactaatatccagaatccacaacgaacccagacaaatcagtaagaagaaaacaaacaatcccaataaaaagtgggctacggacatgaatagacaattcccaaaagaagataaacaaatgggcaacaaacatatgaaaaaatgctcaacatcactaattgcaaatttgatttgcagggaaatgcaaatcaaaaccacaatgcaataccatcttactcctgcaagaatggccataatcaaaaaatcaaaaatcagtagatgttggcatggatgtggtgatcagggaacacttctacactgctggtgggaatgtaaactagtacagccactatggaaaacagtgtggagattccttaaagaactaaaagtagaactaccatttgatccagcaatcccactactgggtacccacccagaggaaaagaagtcattatgcaaaaaagatacttgcacacacatttatagtagcacaattcgcaactgcaaaatcatggaaccaacccaaatgcccatcagtcaacgagtggataaagaaactgtgccctcggtggttgctgtcaaaatgggcaagtgcatgaaacctgggaaagtggtgctggtcctggccagcagtattctggctgaacacaaagctgtcatcgtaaagaacattaatgatggcacctcagactgcccctacatccaagctctcgtggttggaattgatcgctatccctgcaaagtgacagctgccatgggcaaaaagaagattaccaggaggtcaaagatcgagtcttttgtgaaggtttataactacaatcatcttacgcctacagtgcactctgtggatatcctcttacacaaaactgtcatccacaaggatgtcttcagagatcctgctcttaaacacaaggcccaatgggaggccaaggtcaagctcaaagagagatacaaaacgggcaagaacaagcagttcttccagaagctacagttttag

SEQ ID NO: 27695 - DNA, 3303 bp, Homo sapiens; identical to SEQ ID NO: 14590
  SIMILAR (1072)..(2229): 941254mologous to Homo sapiens putative p150,accession number U93564,Smith-Waterman Score=1984.

SEQ ID NO: 27696 - DNA, 1923 bp, Homo sapiens
  SIMILAR (1510)..(1920): 761254mologous to Homo sapiens ribosomal protein L27,accession number L19527,Smith-Waterman Score=511.
atgggggtacagccattgggtaaatacagctgttccaaatgggagaaattggccaaaacaaaggggctacaggctccatgcaagtctgaaatccagtggacaatcaaatcgaaaagctccaaaatcatctcctttgacttcatgtctcacatccaggtcaagctcatgcaaaacataggttcccataatcttgggcaggtctgcccctgtgactttgcagggtactgcaacagccacttgcaggtacttggctttatcccgaaaaaagagaggaagaaaaagaatgatcctatagatgaggtgaaggtcaggcaccagatggataccatggcctttagcctgacagtgcccacgttggccttgaagatgcccaacggactggatggaatgtccctctctccacctggggcaagggtccctctccactacctggaaaccgaattggaagacccatttgctttcaatgaggaagatgatgacctaaagaaaggggcaactgtgagaaagaagttgcagagcaagttggcccagaatcggcagcgccagagagagacagagattttaaaagttcgacaagagcactttagtccccctcctgcaccttcacagcagcagcctccgcagcagcactcccacctgtcacctttatctacttctttaaaacctccagcgccaccgcagggttcagtctgcaagtcacctcaacctcagaacaccagcctaccaatgcagggagtggcacccaccacacacactatagcacaagcacggcagttgtctcacaagaggcctctgcccctcctgccatccagtagggctcccactgtggacccacccaggactgaccggatcctcatgaaagccacagccttctctccacacttctcatgtataagccgactgcagagactggtgaaactgtgcacccagaaacatcagttggacactgatctgtttccccatttaggtttggactggtctgaagagagcggagaggaaccagaggactcagagcaggcctcgccctaccaggttgcatggtccatccgggaaaccctcagatatcaaagacatgctggagtgatcatcatggccgatgagaggcaggactggattgcagctccaactcggacagacagagcagagtgccgaggcttgcatagtgaattttatctccagaacaactgcaagaacaaaccaggaatcccgagaggacctacagaccctctgaaggaagtggactgctcctgcaggatccggagacactccaaataccatgcagaaaaagcatttgacaaaatccagcacctctttatgattaaaactttcagcaaaattggcatacaagggacatacctcaatataataaaagccatctataacaaacccacagccaacataatactgaatggggaaaagttgaaagcattccctctgagaactggaacaagacaaggatgcccactctcaccactcctcttcaacataccctcggtggttgctgtcaaaatgggcaagtgcatgaaacctgggaaagtggtgctggtcctggccagcagtattctggctgaacacaaagctgtcatcgtaaagaacattaatgatggcacctcagactgcccctacatccaagctctcgtggttggaattgatcgctatccctgcaaagtgacagctgccatgggcaaaaagaagattaccaggaggtcaaagatcgagtcttttgtgaaggtttataactacaatcatcttacgcctacagtgcactctgtggatatcctcttacacaaaactgtcatccacaaggatgtcttcagagatcctgctcttaaacacaagtcccaatgggaggccaaggtcaagctcaaagagagatacaaaacgggcaagaacaagcagttcttccagaagctacagttttag

SEQ ID NO: 27697 - DNA, 764 bp, Homo sapiens
  SIMILAR (606)..(761): 511254mologous to Homo sapiens Human secreted protein, SEQ ID NO: 6720,accession number G02639,Smith-Waterman Score=158.
agaatattctagctgcttatttttatagttctgcttatatgattctctttttaacagatggaatcacaaccttttctgcagaatatatctgatgaatttaaaaactgatacatcaagaatattcttttgtatatgtctttcttgctgtgaaaatttatggcctttcttccccctatcttcgctctgtaattattaggtgcttactatatgcaaggcattgtataagattaggagaatacagataagactaagtagcattgcaggagtttatgagttcaattccaacttcaccaattaatagatgttctcatggacaaattttttgacctctctaagctttagcgtctgtaagtactaagtgctttttgtgcagagagatgtagagaggtgaaatttgagctggatttttagtgaatgaaaatgatttcagtaattaaagatgaaaaagtacggagtttgtgagcatggagggggagctggagtcaaaggatattccatatggaagaacaggcttcaggatgaaggagagcaccggaatgtgtgaggactcttcagagggtgaatgctttggttaccacgtcctgggaaatgaacaacttaaaacgttcatcacagcacgacttacaataggaaagtcatggaatcaacctagttgcccatcagtggggtaccggataaagcaaaagtggttcttctacagcatcgaatactacacagccatgaaaaagaataaaatcatgtcctttgcagccacatggatgtag

SEQ ID NO: 27698 - DNA, 654 bp, Homo sapiens
  SIMILAR (43)..(651): 671254mologous to Homo sapiens dJ475N16.3 (novel protein similar to RPL7A (60S ribosomal protein L7A)),accession number AL035587,Smith-Waterman Score=656.
atggcggagcaagagcaaagaaaaatccctttggttccagaaattctcctgaaaaagaggaaggcttatcaagccctcaaagccacccaggcaaagcaggcacttttggcaaagaaggagcagaggaaaggaaaagggccaggtttaagcaactgcaattattcctacatgattcctggcagcagaaatatggcaaggattgatggcatgagtttactggtgcagagaaccattgtaagactttgcctaaagaaaatttttagtggtgtctctgtaaaagtcacccctcagaacctaaaaatgctgcatataatagaaccttgtgtgacctggggatttccaaatctgaagtctctctgggaacttcttttgaaatgtggacaagccaaggtcaagaataagaccatccttctgacagacaacacagcgattgaggagcatctggggaagtttggtgtcatttgcttggaagacctcattcatgaaattgcgctcccagggaagcatttccaggagatttcatggttcttgcaccctttccacctctcggtggcctgccatgctaccaaaaatagagtgggcatcctcaaggagatgggcacatctggctattggggtgaacgcatcaatcagctcatccccctgctgaactag

SEQ ID NO: 27699 - DNA, 1357 bp, Homo sapiens
  SIMILAR (582)..(728): 871254mologous to Homo sapiens dJ475N16.3 (novel protein similar to RPL7A (60S ribosomal protein L7A)),accession number AL035587,Smith-Waterman Score=216.
  misc_feature (1)...(1357): n = a,t,c or g
cggacgcgtgggcaggctctaaaaaccctggaagcgttgcttcttttggcaggaatgggggttagcaggacctcaatggctcactatggctaagtgaacgctgactgggtcctccagcgtgagctagaacagacgtctctatggtcaagtaaacagcgcgcgtgctgtctttcccatgtggtggggttgcgcatgatcagtagctgcaccactagaaagatggcggaggaagagcaaagaaaaatccctttggttccagaaaatctcctgaaaaagaggaaggcttatcaggcactcaaagccacccaggcaaagcaggcactttttggcaaagaaggagcagaagaaaggaaaagggctcaaggtttaagcgactggaatcattcctacatgattccctggcggcagaaacgtgacaaggtgcatctcaagacaactagaagtgcaacctcacgccttggaattgccggataaatgttccttggcctttgttgtacgcatcaaaaggattgatggcgggagtttactggtgcagagaaccattgcaagactttgcctgaagaaaatttttagtggtgtcttttgtaaaggcaccccccaggattcaaaaatggctgcgtatagtggaaccttatgtgacctggggatttccaaatctgaagtctgtccgagaactcattttgaaacgtggacaagccaaggtcaagaataagaccatccctctgacaagacattacagtgatggaggagcacctggggaagtttggcgtcatttgcttggaagacctcattcatgaaattgcattcccagggaagcatttccaggagatctcatgggtcttgcgccctttccacctctcagtggcccatcatgctaccaaaaatagagtgggcttcctcaaggagatgggcacacttggctatcggggtgaacgcatcaatcagctcatccgccagctgaactagacccaggtgaggcagggctgaaaactgcccttgggctgacttttgataggccatgccttgccactttacaagttctttttgcatttactagtatttaagagtaaccttgagattgggaggaatagaggaggctggtacaaatagatggagacctgctgggatcagtgaatgcctgattaggacatggggctatgcatagcctaagagttatagggcttaaagatgttcgagtaactgaaaaactgtattgctggccggggcgcggtggctcacggctgtaatcccagcactttggggaggcccaggcgggcagaccatgaggtccaggagattgagacctnctggccaacatggtgaaccctgtctctanttaggaatacaaaattgagct

SEQ ID NO: 27700 - DNA, 714 bp, Homo sapiens
  SIMILAR (251)..(307): 891254mologous to Ovis aries ribosomal protein L32,accession number AF190579,Smith-Waterman Score=87.
atggagtttcaagcaaggttggaacctaaagagagtattttagaagctgaagagcggggacgactggagacaataatggatgccatttttaccaatgcccaaggtctgtccaccatggcatgccacacttcatcaactgtggacacccagtgcaagtccaacattaagaaagtaaatatgttctctcttccttggcactgcctatggaggcggcagccatctcctcctcagcatcatggccaccttcataccccttgtgaagcccaaaatagtcaaaaagagaaccaagaaattcatcgggcaccgactggcttttcaaatacaagcacattagggattctgctaatggagccaaaagcaccttctctaattccaagtgaagtgcggatagccgctctctgccaagccttgtttttcttgctttcactttggtttgcttcctgtgggtttcatgtacctcatcagaaactgaagagggcagaggcaaggagctccatgaaaatcaagagacagtactacacttccattagggaaggcaagtacagaataattccagtacttagtgttttggctttactctgttggagaacatggatgaatacagaccttctccagtattctcctcaacccctgaagacctttaggccaatccagaggaaaaccaatgctcaggaaccaacccgaagtttacctgagcaagagccgctttcttga

SEQ ID NO: 27701 - DNA, 455 bp, Homo sapiens
  SIMILAR (391)..(450): 1001254mologous to Homo sapiens rpL32 (aa 1-135),accession number X03342,Smith-Waterman Score=97.
cggccgcgtcgaccggaggtggcagccatctccttctcagcatcatggccgccctcagaccccttgtgaagcccaagatcgtcaaaaagagaaccaagaagttcatccggcaccagtcagaccgatatgtcaaaattaagcgtaactggcggaaacccagaggcattgacaacagggttcgtagaagattcaagggccagatcttgatgcccaacattggttatggaagcaacaaaaaaacaaagcacatgctgcccagtggcttccggaagttcctggtccacaacgtcaaggagctggaagtgctgctgatgtgcaacaaatcttactgtgccgagatcgctcacaatgtttcctccaagaaccgcaaagccatcgtggaaagagcttgcccaactggccatcagagtcaccaaccccaatgccaggctgcgcagtgaagaaaatgagtaggc

SEQ ID NO: 27702 - DNA, 423 bp, Homo sapiens
  SIMILAR (104)..(421): 251254mologous to Homo sapiens dJ543J19.5 (CGI-107 Protein),accession number AL109840,Smith-Waterman Score=135.
cgcccatgtggctgtccgagtgtgggcgcctccgggcctctgcggagccctgggcagctctgagctcgcggaggcgtggccggtgcgcggggatgtgcaccaggtgtacaagtaccccttcgagcaggtggtcgccagctttctccgaaagtaccccaaccccatggataaaaatgtcatctcagtaaaaatcatggaggaaaaaagagatgaatcaacaggggtcatctacagaaagaggattgcaatctgtcagaacgtggttccagaaattttaaggaaggtgagcattttgaaagtacctaatatccaattagaagaggagtcatggctcaatcctcgggaaagaaacatggccatacggagtcactgccttacgtggacacagtatgcatccatgaaggaagagtctgtcttccggga

SEQ ID NO: 27703 - DNA, 1698 bp, Homo sapiens
  SIMILAR (565)..(479): 381254mologous to Mus musculus proline-rich protein,accession number M12099,Smith-Waterman Score=44.
tctcaattggcactggttaccatcttcagggctctacaagccttggagtctgcagtaaaagatcaggcccctcttcttggtcatggagctagtagaggtggattggaaggggatattcccgaggacagctgttttcactgccgagggtcgggcagtgccacctgctctctgtgccacggcagcaagttctcgatgctggccaacagatttaaggagtcctatcgggccctgagatgccacgatgagaactcgggttttactctgagtgagggcctgctgtggatagagcctgctttctgctaccgccctccgcactccctttcaaccccccgcccccttgctgctggggcaggagacgtgcaaactacactttccggaccccccgtgcccgctggcttcctgttagggcagctgcaggagcagcagcagcagctaggaatgctggccggctgcttgcttccaccagtagctgctttactggctctggttgtgggctcgctgaaacaccattttcccttttgttcctccttcctaggggtggtgccttatggagaggtccacgtggcaaggagcagaaggtggcttccaaccaacagccagcaaggaactgaggccctcagtcagctgcctgctgggaagggaatcctgccaacagccacggtatggggtgggacactctctggaatgagaaatcaatcagaaaagccaggaaagattagagtcctgccttgggcaggtgaagggaagtcagaagaaggattcagtggacaaatggagacactggtgctaaaacaaagtgctgacagttcacccacaggaacaagagtgaaggcaaggcatttggtctgcttgttgattgggtgtgaaatcagccggctcatcagcagagctggtgtttcctccctgcggaatccgcagtgcccactacagcgctggggcataggaggcctcagaaccgtgctgaatacacggattaacgcgcggccgcgggagggcaccagggccgctctggcgccgccagcgtggagaccgcggggccccgggtgctctgggagcgctccagcgcctcccgcgctctgtaaccccaggccccggactctggcagtaggggcgtgggcgtggccgactgcgcgtttctccgagtggccaataaagtttcgaaagtttgaaaagcggaggaaaaaggccacgcccatgtggctgtccgagtgtgggcgcctccgggcctctgcggagccctgggcagctctgagctcgcggaggcgtggccggtgcgcggggcccgcggcgcgcggggatgggggtctcggtggatgtgcaccaggtgtacaagtaccccttcgagcaggtggtcgccagctttctccgaaaggtaccgccccgcttccaccttccgtatcccgcgctgcctccgctgcttgcccctctctcctctccttcatccacgcggaagctggcaccgccagtgtctctttccagctgcgggctttgcttcagggatgtgtgggtcgagagggatttcctcgaagactccctttacagggagcgggaaaaggggccgtgcttggcatcacgttcacacctgccccagctgaaagaagaggctttccttttaggaagagcctccgggaatcccagctcgtgagctccgtggagttgcagatgaccgacgtgtggagctttccggttcatcactga

SEQ ID NO: 27704 - DNA, 1686 bp, Homo sapiens
  SIMILAR (462)..(4): 861254mologous to Mus musculus calcium entry channel,accession number U49069,Smith-Waterman Score=667.
ctactccacatcagcatcatcctcaatttcctggaatgaattgttgatcatggcaattaacacatttagcaaaacaatgaccactgtaacattatagactccataacgaacataaccaatattttcaatgaatttgtggttatagttgatgaccactgatttcacttcagcaagtccaaatatagcccagaacagtgtcttaaaactctcttcaactgttgtgaaggcttcattttgttttgcaccaatgtagtaggagtagaagttgaacgttccaatcataaaggccacaaacaccataatgaatatgaccatgaacctgaagatgtctttgactgctcctccaagtgacatctgcagaggtccaaagctttcatttgctggcaaaatacaagctatcccagagaaactcaaaaccacagcaactgcacaaagacctttagacacaataggcttggaagtgcctgtccctgctgcctggcttctctcagctgtcaggaactgctccaaactcagagcaacatcagggccgaatctggacaccatgaatggcagcaggaggcagacaggttcctggacggaagggagcaggtcctcgatgaagccccatcttctttccgacattactggcgcactcagattccaaaggtcagctgagccttttgcaggttggccacttggcccttcaacttccttcagtcgggcatcctgagttgatggcgaaatggatgaatgggccccaatggtcacgtaggccagcctacccaaggaaacctccacaccagagaaggcaagcttgggggactctggaacccgatgagcatcataaatgagtagagcaagagatagttgtcttgccttaaaaccactgcgtgtggggaaagaaaccagacctccaaaatagcagcccgtgtgaatctgcattttgaaatgagggctgcgtggggccagccgctcccatttgctcaaagccccatatttagggtgaccagatttatcagaagggaaaactgagcttgttgttctggcagaagacatgttgaggacagacaggaaaaatacagcctccctacccttaatagcacagctgccgcacaaatttcttttctggaaagaaaacatcaccatcaatcctttgtattcttggggattccaaaaacagaccctggtgtttggtgtttctcgcttcttttggtttcctggtcccaaaggggtcactaacttctgtagctcacaaataccaatatcggttccacctgccacagtgtgtcctaatgtggcaaaagcagtatggggaatacctttggcagtgcatctaacacccaggtgagcaagcccctccatggccatacggaccacagagactatggctgcccatctcaggccagcatgccatagaattatctctgtgtgaccacttgtggaaattacagccactgggagccaggctggctgtgtgttgggtgggttggggggtgggggcaagaggactgagagaaattgctcacaggcactctgggcttcactgagtgcacttctggaacagagactgtggttactcccacctttctgttttacagatgaggaaatagaagcacacaaaggtccaattccttgcacaaagtcatcagccagtaagtggcagagctggaatttgaatccaggtggtctgacctcagagcccat

SEQ ID NO: 27705 - DNA, 904 bp, Homo sapiens
  SIMILAR (168)..(82): 441254mologous to synthetic construct BBO5 epitope,accession number A21467,Smith-Waterman Score=76.
tgtaccggcccggaatttccgggtcgacgatttcgtccgggcctctgcggagccctgggcagctctgagctcgcggaggcgtggccggtgcgcggggcccgcggcgcgcggggatgggggtctcggtggatgtgcaccaggtgtacaagtaccccttcgagcaggtggtcgccagctttctccgaaaggtttccacgctttgagaaggactgaatgagatcatgcgcatggcagcttctctaggatagcaccctgcgtgaacacagtagctgctcagttaagtctttgatgggtgtgatcctgattcagcttgatcaattctgcagtcatactggattgtgtttgaaaaagtgtccagaaaaacctggccatctgcctcctgtcttcccagtacccccaccccatggataaaaatgtcatctcagtaaaaatcatggaggaaaaaagagatgaatcaacaggggtcatctacagaaagaggattgcaatctgtcagaacgtggttccagaaattttaaggaagaagtctgacctgcctttcagcggagtatcatcacttactcaggaaacggtgtcacactgggaggaggcagttcccttatcagcttggaatatttttgttgtggtttacatctttctcaatgtgactgtgttgcaaaggacagacttgttgcctgccattgtgaggactatcagctgtatctacagcaacttcttggattcagtgcagccaaacaagaagttatctctactccaagcaggtgaccgagcttactgggtaactgaggagcagtctccatgtccttggcagacaaagccagtcttttccattgaaatggtcaggttacctgaaacccctagcacacatgaacaccagcaagaacatccaaagcaagtgatataa

SEQ ID NO: 27706 - DNA, 1180 bp, Homo sapiens
  SIMILAR (89)..(586): 241254mologous to Homo sapiens dJ543J19.5 (CGI-107 Protein),accession number AL109840,Smith-Waterman Score=175.
agacatttcgttctgagctcgcggaggcgtggccggtgcgcggggcccgcggcgcgcggggatgggggtctcggtggatgtgcaccaggtgtacaagtaccccttcgagcaggtggtcgccagctttctccgaaagtaccccaaccccatggataaaaatgtcatctcagtaaaaatcatggaggaaaaaagagatgaatcaacaggggtcatctacagaaagaggattgcaatctgtcagaacgtggttccagaaattttaaggaaggtgagcattttgaaagtacctaatatccaattagaagaggagtcatggctcaatcctcgggaaagaaacatggccatacggagtcactgccttacgtggacacagtatgcatccatgaaggaagagtctgtcttccgggaaagtatggaaaacccaaattggacagagttcattcaaagaggcaggatttcaatcacaggggttggatttctcaactgtgttttagaaactattgacagcacattcttacgacagggagcccagaagagttttcgtctgatgaaacatagcttttgcagggaaaacagctttgtggaaatgagtattctatggggcttcatcgaggacctgctcccttccgtccaggaacctgtctgcctcctgctgccattcatggtgtccagattcggccctgatgttgctctgagtttggagcagttcctgacagctgagagaagccaggcagcagggacaggcacttccaagcctctacatgactttgaacaagtcatttacctctccgaggctgagttttcttacctggaaatggtgagagcagaactgtcttacctcacgggactattgagagggttaaatgagataatatcattaggagggagaaatgcaatttcaagaattatccgtagtgatagaattcaagtggactctgaagagttgcttcagaaaagagggcaaataagtattgattgggtgttctgctggttgtctgatgatggtgtcagggcagctaaggacaggataaaggcctggagagggtgcttgtgcccttatgttatcagcaccgttgttcctaggattcgtgaggggattctggaaccaataagggagttgaactggtacctgattcacgggtggactggaacaaacaggaatgtaccagacctatgttga

SEQ ID NO: 27707 - DNA, 1158 bp, Homo sapiens
  SIMILAR (571)..(1146): 501254mologous to Homo sapiens cytokeratin 18,accession number X12881,Smith-Waterman Score=387.
atgcggcggaggaagaaggaagcagcggtggaagaaggaagcggtggtggagcggacacagcggacacagcagacacagcagacacagcagctcaggcggcgccaggttcctgggaatgtcagtgcggcacggtagttggtgcggatcccgcggagcttggagttaaattaaggaagaataaaagagatgaacatctcttaaagagaaggaatgtaccacatgaagatatctgtgaagagtctgatattgatggtgattatagagtgcaaaacagcatgagcttcaacacttgctccaccttctccacctgctccaccttctccaccaactaccagtccctggggcgcctggacagtcagcgcgtggccagcatctatgcaggtgctgggggctctggttcccagatctccctgtcccactccaccagcttacagggtggcatggggtccagaggcctgtccacagggatggccgggggtctggcaggaatgggaggcatccagaatgagaaggagaccatgcaaagcctgaacgacctcctggcctcctacctggacagaatcgacaatgcccgtcttgctgctgatgacttgagagtcaagtatgagacagagctggccatgtgccagtctgtggagagcgacatccgtgagctccgcaagaagaaccatgaagaggaagtaaaaggcgtacaagcccagattgccagctctgggttgactgtggaggtagatgcccccaaatctcaggacctcaccaagatcatggcagaaaactgggcccaatatggcaagctggctcggaagaaccgagaggagctggacaagtactggtctcagcagattcagaagagcaccacagtggtcaccacgcagcttgccgagatggagcagctcaacaggatccggccgcacctggagtcagagctggcacagacccaggcagaaggacagggccaggcccaggagtatgaggccctgcagaacatcaaggtcaagctggaggctgagatcaccacctaccaccgcctgctggaagatggtgaggacttcaatcttggtgatgccctggacagcagtaactccatgcaaaccatccaaaagaccaccacctgccagatagtggatggcaaagtggtgtctgaaaacgagcaatga

SEQ ID NO: 27708 - DNA, 1271 bp, Homo sapiens
  SIMILAR (382)..(1080): 561254mologous to Homo sapiens cytokeratin 18 (424 AA),accession number X12883,Smith-Waterman Score=481.
acgagaaggagaccatgcaaagcctgaacgaccgcctggcctcttacctggacagagtgaggagcctggagaccgagaaccggaggctggagagcaaaatccgggagcacttggagaagaagggaccccaggtcagagactggagccattacttcaagatcatcgaggacctgagggctcagatcttcgcaaatactgtggacaatgcccgcatcgttctgcagattgacaatgcccgtcttgctgctgatgactttagagtcaagtatgagacagagctggccatgcgccagtctgtggagaacgacatccatgggctccgcaaggtcattgatgacaccaatatcacacgactgcagctggagacagagatcgaggctcctcaaggaggagctgctcttcatgaagaagaaccacgaagaaggaagtaaaaggccttaagacgccaaattacgcagctctgggatgaacgcgtggaggtagatgccccccaaatctcaggacctcgccaagattcatggcagacatccggggcccaattatgacgagctgggctcggaaagaaccgagaggaagctagacaagtactggtctcagcagattgaggagagcaccacagtgttcaccacacagtctgcttgaggttggagctgctgagacgaaccttcacagaagcttgaaacgtacagttccagtccttggaagatcgaccctggacttccatgagaaatctgaaggcccagcttggagaacagccttgaggggaggtggaggcccccctacgccctacaagatggagccagctcaacgggatcctgctgcaccttgagtccagagctggcacagaccccgggcagagggacagcgccaggccccaggagtatgaggccctgctgaacatcaaggtcaagcttggaggctgagatcgccacctaccgccgcctgctggaagatggcgaggactttaatcttggtgatgccttggacagcagcaactccatgcaaaccatccaaaagaccaccacccgccggatagtggatggcaaagtggtgtctgagaccaatgacaccaaagttctggaggcattaagccagcagaaagcagggtagcctttggggggcagggaggccaataaaaagttcagaggtcattggaaaaaaaaagtattatctcgctaacaaagctaaatataatgaactatacgttaatattttgcctatatttttcatgtgctttaaaatatttaactttaatattgaaatgcatttca

SEQ ID NO: 27709 - DNA, 1308 bp, Homo sapiens
  SIMILAR (277)..(651): 291254mologous to Homo sapiens retinitis pigmentosa GTPase regulator,accession number AF286472,Smith-Waterman Score=109.
atggggagtgatggatgggttctgccctctgctagtgcaaaacatatcactgaaagtctagaggaacagactcctgggtaccttttaatgatcacttctgtagtgtattgcaggatactctggcaacaacttgaaggccttaatgtgactgccacaactgcctcaaagcttgccacatctttaatgccagcagaaaaactttcatcagcatggctttcaaactttcttgcagattcatcatccaggaaaagcaacaaagaggatccaagatggatgaaggaggcggaaaaaactttttataagcccaagaatagagatgagttgggagaccaggaagcatgccagggaacagagcatcagcaaagccaaggactgagagaaggcaaagaaggaagtgagggaggacaagagatcaaaggtggcagagaggagttctatgttcagaatcacagtgatgcagaagctgtagaaacaatggcagagaagaataggcaagaaggtggccagtgtcctgccactgagaaacagccctggaccaccacagatggaggcagtgagggtggaaagggagagcccatgagggttgtggacacaagccaagatgggattggtggtatctctgcaggacaagaaagtggcccggaagtgcaagggatgccctggctcttcctccgtactccgcagggtaaaaactctatggcagctggagccatgtgttacttgcttatcactgtgtccacggagctgaggaccctgtctgatacattaagcatgggctcagtaaatatggatggtataagaggtgtggccatggaagtcaccttcctccacagggtacgaaagaagagatgccaccaaaggaagcattctgcttgtggaggatttgttccactctgtcattcaaggagccaggaatctaccatggtgtcaatgccttcccgaaggaaggtgcacatcccgtggtttatggtgcctctggcacactgccaacaccccagtttgaaaagccaggcattcaaccaaacttgcgaacgccagcccttgcatataattacaggaacctgtgaaagtgatcaccggcagctcaggggctccaagcttccgcaagttctgaatcccttagcaagccggaaagatctgctggcgctgcccatatttgatttaaaagcaaaaaggagaagagggaagaagaaagaaggggaagaagagattgaagaagagaaagaacagccaaaaggagaagagctggaagtagacagttcttgttctcagtttgagagaaaacgagaaagaaacagtcctgtttag

SEQ ID NO: 27710 - DNA, 748 bp, Homo sapiens
  SIMILAR (659)..(603): 571254mologous to Homo sapiens Human neurofilament-H mutant protein fragment 2,accession number Y20843,Smith-Waterman Score=50.
atggggatggagtacccagaaagcagagacaccatgaaacagtgtggcacagtggtgaaccgcaagtttctggatgcaggacaactcaagagctttctgtctccaggtgggtggcgatttgactcctcatcaagccaatggccacccccttgcaatctttatgcaatgcacagtatcctctgcctgcaacgggggcttgctcccttgatggagaaaatacagaataactggacgccaggaaacaggcacagctttctgggcccggagggcggccgcttcccaccgtccctctccccttactggcagagcgcgctgcgggcggactcccgggcccggagcagcccaccggccaccccaccgcccacccggctcccggtgtctcctcccggccgctctacccagcaactttccgtgctttgttccccgactggaaatgctttacggaagcgtcttggacagggtctccgccaggcgacaagagctcggtgctgagatgtgtttacgttctcatctccccatcaattatggatggaaacaaataaggaagagtcaattttgctgagccccttctccggcaacgagagggcgttctgcagccgggagggagccgccgctcgcgcccgcagccgctggcaggggcatggtgaggaggaaggtagctcagtggcatttctgagcaggggccaccctgacttcaccttggcccaccatgagggtcttcctgctttgtgcctacatactgctgctg

SEQ ID NO: 27711 - DNA, 1326 bp, Homo sapiens
  SIMILAR (825)..(676): 921254mologous to Homo sapiens transcription initiation factor IA protein,accession number AJ272050,Smith-Waterman Score= 252.
tcagggtcctcccacatccccattccaagttgcagggtcccattcttttccaatcaatgccctcattttaacagtagacacctggtgaggctgtgcatgcaccttttgttgcaggtcagccactcgcatgataagagcttgtgtctgtttttccacaatttcaactctttctctacagctgataagactctcactcagggcaatcttagcagatctgaggctcagtatctgcttcagagctgtctctgtgcccacgaaaacatgccgctcctccacacagtgctgagcacaggcaaatctctcagggcttggcgtcttcttgctggggggcgggaggggacaaggtagtgtctgcttcgatggtggggtcggcacctgggcagtgtccagtgtctgctttgatgacggggtcagcatctgggcagtgtccaggacacccttgctggtctggcacgaatgccggtgtgctccttcccgggagggagccgctgtggtgctctgtcgggacatgaaggtgttggggtgtccagtagagtgggacgtgatctgggacctctgccggaacggcggcttgtccccttttttggtgtacatgttcgtggtttttgaatgtggttcttggttgatggggtgtgttttgttagttggcggagtgttctctgtgttgaagtcgccttgtgttctcttcagcacacagggatcaaaggggaagaaggtgtccagtgggtttgtgcaggtctgcactgagtctcctccagtggtactcctaatgactggcagcatctggcgattgttcctctcaatgatggtgtagcagaagacgaggctggtacttactccttggattccataactattggcggtcctcaactttcctcgtgaggtgtactccaagttgtcccggtggttgctgtccccgttacgggatttatcctgtccgtagttgccccaggttgccaggtggtgtgtcccggtacgggagtatccactccggtagtggtgctcatggagtccgtcgtggtccccttggttaacctcggttactcctcgtctgtatgtggccctcatgtaagccgtggtgtgtcccgtagtaggaaaacagccgtagtgactccagtagccgtggtgtgtccgtagtaggataacaagccgtagtgactcagtagcgtggtgtgtcccgtagtatgggaaacacgacgtagtggactctagtagcgtggttgtcccgtagtaggaaaccaagcgtattgactcagtagccgtggtgtcccgtaagtaggaaacagcgtagtgaccagtagcgtggttgtccgtagtaggaaacat

SEQ ID NO: 27712 - DNA, 1215 bp, Homo sapiens
  SIMILAR (609)..(674): 451254mologous to Caenorhabditis elegans similar to C. elegans cuticlin 2 precursor CUT-2 (SP:P34682),accession number AF016446,Smith-Waterman Score=55.
ctacccctcctgcacgggctccccctcggctgaatgtgtttctctctcagttccttcctccttgcgtacagaagagcccctgccaggggcgcctggcaagtgctgtgcccacgtccgccaggacccagccgtgttgagtgaagctcttggggccagcgtgcgtccttcccggttctcattcacgtgaagcaccgctggctgctgcacacgggggtctcgtggtgggggctcctcgtgtgcagcggcctcatcctgggagccacctgccgccgcgtggtctctgggaggcttgttagggccaccattcagctgactgtctttgccaagcacaggcagtggagactgtgcatgctctgatccgaacaatcgtccttctgtctgccgcccgacttccccgccctgagcacctcggtccgatctgccacctctttgggtggcgccccggagcttctctgagcagcatcttccctggagggggcgttgggaccgtgtgtttttacaagcgctgggactggcatgagatttgatccaagcatttcttgtttcgccttggatgcattcaggatcagtgttcccagaccaggcaccccggggcttctcggctgctggggaggggtggggctgggggaagctgtccaggtcctcctcagtcgtcctcacagccaggagggggagagaggtggtggggctgggcgtcaggtggtacgtggatgtcagcacagttctacacagaccttctctggcccattcctgctctgctcgggggacacccaaccagcccagccctgtttcttcgaaactagactcaaacatagggtaggtaggcaaaacagtaagaaaattccaggactcatccagaacaccgaactctaaacagcaggagttctcacaggaaacctttggagataatctcgagatctcaagtaggttagttagactgagagccaaatcttgttcggactcatcactgtccatgtgtaaaagtagggctttgtgcttgcttcggcgcacatatccagagctgtctcgtgcccacgaaaacatgccgctcctccacacagtgctgagcacaggcaatctctcagggcttggcgtcttcttgctgggcagtgtccagtgtctgtttgatgacggggtcagcatctgggcagtgtccaggacacccttgctggctggcacgaatgctgtggccacggcagcatctgaaggtggcat

SEQ ID NO: 27713 - DNA, 547 bp, Homo sapiens
  SIMILAR (142)..(258): 611254mologous to Homo sapiens Similar to hypothetical protein DKFZp434G0522,accession number BC001044,Smith-Waterman Score=119.
cctctagtccctgtgtggaattctctacgtctatgggggcatgtttgaggccggcgaccgccaggtcaccctcagcgacctgcactgcctggacctgcacaggatggaggcgtggaaggccttggtggagatggaccccagaaaactcaggagtggctggaggagacgggacctcggaagaggacagtgaggaggttgagggcgccgagtggtggggtcgacgacgaagacagcggagaggagagcggtgcggaggactgagaagagccccctgccagggggcgcctggcaagtgcttgtgcccacgtccgcccaggacccagcccgtgttgagtgaagctcttggggcccagcgtgcgtcctgaccgcacaggagagagctgaaggtgggtggcccaggcccagggtgtgaactttctcccatggtttagtctctgacgcggcactgggccggaagttcaactgagtgcagtgcaggtggattccctcagcagcctgtgtgttgtgtgaaataaattggacttgaaacaagaaaaaaaaaaaaaaa

SEQ ID NO: 27714 - DNA, 493 bp, Homo sapiens; identical to SEQ ID NO: 17810
  SIMILAR (423)..(1): 1001254mologous to Escherichia coli K12 putative amidase,accession number AE000167,Smith-Waterman Score=729.

SEQ ID NO: 27715 - DNA, 1500 bp, Homo sapiens
  SIMILAR (175)..(921): 751254mologous to Escherichia coli 100 pct identical to sp:YI5B_ECOLI,accession number AP002527,Smith-Waterman Score=945.
atgggcaattttgttgagcaatcaacgcttaataaaacacatccggtaatttataacgtctgcaattatcagaaacccgctgccggtgagcctgcgttgttactctgggatgatgtcataaccttattccatgaatttggtcatacgctgcacggcctttttgcccgccagcgttatgccacgctttccggcaccaacacgccgcgtgattttgtcgaatttccgtcgcaaatcaacgaacactgggcaacgcatccgcaggtattcgctcgctacgcccggcattatcagcgcggggcagcaatgcctgacgaactgcaacagaaaatgcgtaatgccagcctgttcaacaaggcgattaaggtcaagcgataccgctcttacagaggagaggtagggcaaaccgcccctaatgttctccaaagagatttcaaggctacgcggccaaacgagaagtgggttaccgatgttactgaatttgcagtcaatgggcgcaagctgtatttgtctccagtaatagatctcttcaacaacgaagttatttcttacagcctttcggaaagaccagtgatgaacatggttgagaatatgctcgatcaggcattcaaaaagcttaatcctcacgagcatcctgttctgcactctgaccagggatggcagtatcgtatgagaagatatcaaaatatccttaaagaacatggtattaaacaaagcatgtccagaaaaggcaattgtctggataatgctgtggtggagtgtttctttggaaccttaaagtcggagtgtttttatcttgatgagttcagtaatataagcgaactgaaggatgctgttacggaatatattgaatactacaacagcagaagaattagcctgaaattcaaagcgttatcgctgatttataacaaagatctgctgccgaacccgccaaaaacctgggaagagatcccggcgctggataaagaactgaaagcgaaaggtaagagcgcgctgatgttcaacctgcaagaaccgtacttcacctggccgctgattgctgctgacgggggttatgcgttcaagtatgaaaacggcaagtacgacattaaagacgtgggcgtggataacgctggcgcgaaagcgggtctgaccttcctggttgacctgattaaaaacaaacacatgaatgcagacaccgattactccatcgcagaagctgcctttaataaaggcgaaacagcgatgaccatcaacggcccgttcacttacaccgcttctcaacccggtacgcaccagaaaatcattgatatggccatgaatggcgttggatgccgggcaacagcccgcattatgggcgttggcctcaacacgattttacgtcacttaacaaaactcaggccgcagtcggtaacctcgcgcatacagccgggcagtgacgtcatcgtctgcgcggaaatggacgaacagtggggctatgtcggggctaacatcgcgccagcgctggctgttttacgcgtatga

SEQ ID NO: 27716 - DNA, 776 bp, Homo sapiens
  SIMILAR (231)..(776): 931254mologous to Shuttle vector pMAL-pIII maltose binding protein-lacZ alpha peptide fusion protein precursor,accession number AF031088,Smith-Waterman Score=867.
gacgacgtccgccccaagccgccgcctcccccgctaccgcctccgccgtccgtctccctgcacctcccagtccgccccccgcgcccaccccggccacttcccccccccgcccggtcgcgccgctcatctcggccgcggcgactcacccgcgtcaccccgggtttccccagtcccgacgttgaccccgccgccaggtccacgccgccatccctcgggtcggcctctaggggatcccggcgctggataagaccttcaaagcaaaaggtaagagcgcgctgatgttccacctgcaagaccggtctttcccctggccgctgattgctgctgccgggggttatgcgttcaagtatgaaaccggcaagtacgccattaaagccgtgggcgtggataacgctggcgcgaaagcgggtctgaccttcctggttgacctgattaaaaacaaacacatgaatgcagacaccgattactccatcgcagaagctgcctttaataaaggcgaaacagcgatgaccatcaccggcccgtgggcatggtccaacatcgacaccagcaaagtgaattatggtgtaacggtactgccgaccttcaagggtcaaccatccaaaccgttcgttggcgtgctgagcgcaggtattaacgccgccagtccgaacaaagagctggcgaaagagttcctcgaaaactatctgctgactgatgaaggtctggaagcggttaataaagacaaaccgctgggtgccgtagcgctgaagtcttacgaggaagagttggcgaaa

SEQ ID NO: 27717 - DNA, 1812 bp, Homo sapiens
  SIMILAR (1138)..(1677): 981254mologous to Escherichia coli periplasmic maltose- binding protein,accession number J01648,Smith-Waterman Score=908.
ttattctgagccaaatgtgagaagcatgaccggtgacacagctccagggggtcctgaggacatgtgccgcagggggttgggccacagcccgagctcatacatcccccgccgccaccatataacaggtggtatccagcgcacgagcggcaagcaacgttgaccagtgatgctctttgagcggcccgcgaacccaggcggcaggaagtaccaggatttcagctccctgtaatgcctgtgccagcgccagctctgcttcaggggagcaaagggggctgctggggtgctcgggctggctaatgtcacatgtgtgaatggcacacgtgtgctgatgtcacgcgtgtggatgtcacacgtgtgtgctgatgtcatgtgcgtggatgtcacgtgtgtgctggtgtcacgcatgtgggtgtcacgcgtgtggatgtcacgcgtgtgtgctgatttcacgcgtgtggatgtcacacgtgtggatgtcatgcaggaccgcagctccctcctcaccaacaaattgcttcccacaacaatggtgcctctgtgcacacctcctcctccactctgccccgctgtctttgcaccccgctctgcagcctccagggggcagcaattgcggcttccttcgttgttgtgtgtacgccggcggtcacctgtctttgcaccctgctctgtagcctgcaatggggctttcccccaattcctcccacgcatcaatgtgtgttcactcaccaacttgcccctctgtgagccaaggtcccctaaggacggaggcagagcctggcggggtgcaccggcgtaccggggaacgccgaggatggctggcacccccgggcaggctccttgatgccagccctctgctttcagggctgccgaaggacgtttgggccgattccgggtctgccaactggacacagagctgctgtgagcctttgtgcccaggtcggcctttgtgctcacattggccgtctgcccctcagtcccagcacccagccagtgctccaggaatgtttgtaagggctttggcgtgtgcatgttgaacaaacccttctccagagcggccatgccacgttcccaccagcggtgcatgagggttcccgtggctcctctgcctctggcacgtgggcccaccagtctctctggggtcggcccttcctggttgacctgattaaaaacaaacacatgaatgcagacaccgattactccatcgcagaagctgcctttaataaaggcgaaacagcgatgaccatcaacggcccgtgggcatggtccaacatcgacaccagcaaagtgaattatggtgtaacggtactgccgaccttcaagggtcaaccatccaaaccgttcgttggcgtgctgagcgcaggtattaacgccgccagtccgaacaaagagctggcgaaagagttcctcgaaaactatctgctgactgatgaaggtctggaagcggttaataaagacaaaccgctgggtgccgtagcgctgaagtcttacgaggaagagttggcgaaagatccacgtattgccgccaccatggaaaacgcccagaaaggtgaaatcatgccgaacatcccgcagatgtccgctttctggtatgccgtgcgtactgcggtgatcaacgccgccagcggtcgtcagactgtcgatgaagccctgaaagacgcgcagactcgtatcaccaagtaatgctgtgaaatgccggatgcggcgtgaacgccttgtccggccctcgccagacctggggccaggtccaagcagcagcagcagcagcagcagcaggagcagcatgattggcaggcacgcaggtagcggccccat

SEQ ID NO: 27718 - DNA, 690 bp, Homo sapiens
  SIMILAR (425)..(517): 461254mologous to Homo sapiens Amino acid sequence of a human secreted protein,accession number Y19503,Smith-Waterman Score=67.
tgcttttgctttatcacttcagtatgtaatagctgaccaggcccagaagaaaacagaaatagaacagaattcatctgtgaaaaggccaggcagtatgagacttgtgaaaacctgtgaccctgcctaggcaaccactgatgaactttctatcactatagatgcagctgcattttctggagcttccatgctttaattcaacagactggggaagaagcaaagctgggtgacttctaaggctgggcttaaggtgtctgcagctcctgcacagttggaatgctccctcctgaatccctgccaccatgctgtgagaaacccaaggcatgcagaggtcatatggaggagaaccttgggtcaacagcctcaagttggtctcctagctgacagccaattttcctccacttccagtaacacccatgaatgtagtcctacccgaacagctgcacgtgccttctcaccaggctccctgcttccactcttacctctttccaatccactgtccagacagcagacagagccacctcttaaaatgcaaatcctacacatcacatcactcctcgagtgaacagccttcaatggctgccctaggcatggagaataggtccacgttgcacactgtggcctctgaggtcttgcaaggtctctgtctctctctctaacctcctgtcacacttggcccaccggacgcgtggg

SEQ ID NO: 27719 - DNA, 423 bp, Homo sapiens
  SIMILAR (1)..(336): 1001254mologous to Homo sapiens RAMP1,accession number AJ001014,Smith-Waterman Score=613.
cgggagctctgcctcacccagttccaggtagacatggaggccgtcggggagacgctgtggtgtgactggggcaggaccatcaggagctacagggagctggccgactgcacctggcacatggcggagaagctgggctgcttctggcccaatgcagaggtggacaggttcttcctggcagtgcatggccgctacttcaggagctgccccatctcaggcagggccgtgcgggacccgcccggcagcatcctctaccccttcatcgtggtccccatcacggtgaccctgctggtgacggcactggtggtctggcagagcaagcgcactgagggcattgtgtatgcggggcccaagctgcccgcgggtgcacccaggctgcagggtgaggccaggcaggcctgggtaggggcagcttctggagccttg

SEQ ID NO: 27720 - DNA, 581 bp, Homo sapiens
  SIMILAR (238)..(306): 951254mologous to Homo sapiens RAMP1,accession number AJ001014,Smith-Waterman Score=127.
tcaagcccatgcctcgccctcgccttcgcccccgacctgccccccggtctctgtccgtcgcacctcggatccgctagaaagccgccgccgtgccgcctccacggccagcgccccgctctccgcagccgcctccgagtcagtgcgccaccggagcagcgcggcgcctgttgggtaacagtcaccagcgcccgcccaccgctgtcgggcagtatgaaaagtgcggcactgtgattggccagccagttccaggtagacatggaggccgtcggggagacgctgtggtgtgactggggcaggaccatcaggtgagtcccatggccccttttggatgttcccggagtcacttagctctttgacctggttaacatctggtttcttgtggattttaatgttgttaccaaatccaggcctccgagggctggtgaccctggcagccatttcccgtcctgtgcaactccgcctttctggctttaagaagtatgcttggagctcatctaacatcttattttccattttctgtttcttaatacttacagaggcttccgactttttctccaggtctgtattttccttgttcttct

SEQ ID NO: 27721 - DNA, 1695 bp, Homo sapiens
  SIMILAR (805)..(1617): 571254mologous to Homo sapiens RLIP76 protein,accession number L42542,Smith-Waterman Score=702.
atgtccagtttatgtcctgttataaaggatacaactcaggaacagtcagatggcagagatgcatggggcaaggtctcggtcagaaagaacgcttttgcagcggcagaaagggagactcgggatccgggcctggggtcccgcggccggcccctccccactccccgcgacccgctggaacgcgcacggccggggacgcggcggggaccgcgcgggcaggcggcgcacggccggatagcgcgagggggccgcgtgaggcggtgcgacgttctgggccccaaagccggtctagcgcgcgggcgtcttccttacttccgctgccgccgccgccacatcccgggacccgacggccgcggcgcgaggcctcggggcaaggcccggcgaagcccgacccgcgcggcgcccccagggccaggggaggagcctaaggacccggacgagcgccgctccagtaggaaggtggacgcacaagatgaaagcagctgtgatccctacatcaccatctggaggaaagttgcattatcctcatggaatgtgatgagcaacagccccagtgaacaccacagggtggagcatggcagtgggcttacccagacccccagctctgaagagatcagccctactaaatttcctggattgtaccacactggtgagccctcacctccccatgacatcctccacaagcctcctgatatagtgtctgatgatgagaaagaccatgggaagaaaaaaggaaattttaagaaaaaggaaaagaggaccgaaggctatgcagcctttcaggaagatagctctggagatgaggcagaaaagcttatgcctagatttgaagaggcttatgggaggaccacagagactgagaaagtgcaggaattccagcgtttactcaaagaactgccagaaggtaactatcttctgatttctttgttcgttgtgcacatggaccatgtcatcacaaaggaactggaagcaaaaatgaatatacagaacatttatatagtggtcagcccaactgtgcagatcagcaatctagtcctgtatgtgttcttcacacatgtgcaagaactctttggaaatgtggttctaaagcaagtgacgaaaactcggcgatggtctaacgtggccacgatgcccacgctgccagagacccaggcaggcttcaaggaggagatcaggatacaggagttgcttttgaattgtttacatcaagatctgcagggtgggataaaggatttgtctgaagaagaaagattatgggaagagaaagagatcctgactaaacaggaggagctcctgggcatggagcagtttctgcgccggcagattgcctcagaaaaagaagagattgagtgcctcagagccgagactgcggaaattcagagtcaccagcagcagggcctaagcgagactgaggagtactcctccgagagcgagagtgaggatgaggaggagctgcagatcattctggaagatttacagagacagaacgaagagctggaaataaagaacaaccatttgaatcaagcaattcacgaggagagtgaggccgtcatcgagccgcgcatgcagccctggctgctccagttgcagccagacagggccaagcagcaggcgcaggaggacgaggagcccgagtggcgcggaggtgccatgcagacgcccaagaatggcatcctcgagccagtagcagctaaatag

SEQ ID NO: 27722 - DNA, 2192 bp, Homo sapiens
  SIMILAR (225)..(2189): 1001254mologous to Homo sapiens RLIP76 protein,accession number L42542,Smith-Waterman Score=3363.
agtctggtttaactggttggaacgactaaagcacgctggcgcaaggaaagctctcaacttcgggagctgaggcgcaggctggccagagcgtggagaggaaagccctttccatcctcaaggccgttgcaggagatgcccgcgagccaccttcgccagcaccacaccggggtgtaatggataggtaacagagaagacctcgtcccttccctagtcagggcatcagcatgactgagtgcttcctgccccccaccagcagccccagtgaacaccgcagggtggagcatggcagcgggcttacccggacccccagctctgaagagatcagccctactaagtttcctggattgtaccgcactggcgagccctcacctccccatgacatcctccatgagcctcctgatgtagtgtctgatgatgagaaagatcatgggaagaaaaaagggaaatttaagaaaaaggaaaagaggactgaaggctatgcagcctttcaggaagatagctctggagatgaggcagaaagtccttctaaaatgaagaggtccaagggaatccatgttttcaagaagcccagcttttctaaaaagaaggaaaaggattttaaaataaaagagaaacccaaagaagaaaagcataaagaagaaaagcacaaagaagaaaaacataaagagaagaagtcaaaagacttgacagcagctgatgttgttaaacagtggaaggaaaagaagaaaaagaaaaagccaattcaggagccagaggtgcctcagattgatgttccaaatctcaaacccatttttggaattcctttggctgatgcagtagagaggaccatgatgtatgatggcattcggctgccagccgttttccgtgaatgtatagattacgtagagaagtatggcatgaagtgtgaaggcatctacagagtatcaggaattaaatcaaaggtggatgagctaaaagcagcctatgaccgggaggagtctacaaacttggaagactatgagcctaacactgtagccagtttgctgaagcagtatttgcgagaccttccagagaatttgcttaccaaagagcttatgcccagatttgaagaggcttgtgggaggaccacggagactgagaaagtgcaggaattccagcgtttactcaaagaactgccagaatgtaactatcttctgatttcttggctcattgtgcacatggaccatgtcattgcaaaggaactggaaacaaaaatgaatatacagaacatttctatagtgctcagcccaactgtgcagatcagcaatcgagtcctgtatgtgtttttcacacatgtgcaagaactctttggaaatgtggtactaaagcaagtgatgaaacctctgcgatggtctaacatggccacgatgcccacgctgccagagacccaggcgggcatcaaggaggagatcaggagacaggagtttcttttgaattgtttacatcgagatctgcagggtgggataaaggatttgtctaaagaagaaagattatgggaagtacaaagaattttgacagccctcaaaagaaaactgagagaagctaaaagacaggagtgtgaaaccaagattgcacaagagatagccagtctttcaaaagaggatgtttccaaagaagagatgaatgaaaatgaagaagttataaatattctccttgctcaggagaatgagatcctgactgaacaggaggagctcctggccatggagcagtttctgcgccggcagattgcctcagaaaaagaagagattgaacgcctcagagctgagattgctgaaattcagagtcgccagcagcacggccgaagtgagactgaggagtactcctccgagagcgagagcgagagtgaggatgaggaggagctgcagatcattctggaagacttacagagacagaacgaagagctggaaataaagaacaatcatttgaatcaagcaattcatgaggagcgcgaggccatcatcgagctgcgcgtgcagctgcggctgctccagatgcagcgagccaaggccgagcagcaggcgcaggaggacgaggagcctgagtggcgcgggggtgccgtccagccgcccagagacggcgtccttgagccaaaagcagctaaagagcagccaaaggcaggcaaggagccggcaaagccatcgcccagcagggataggaaggagacgtccatctga

SEQ ID NO: 27723 - DNA, 434 bp, Homo sapiens; identical to SEQ ID NO: 21917
  SIMILAR (2)..(124): 971254mologous to Homo sapiens RLIP76 protein,accession number L42542,Smith-Waterman Score=195.

SEQ ID NO: 27724 - DNA, 1695 bp, Homo sapiens; identical to SEQ ID NO: 27721
  SIMILAR (805)..(1617): 571254mologous to Homo sapiens RLIP76 protein,accession number L42542,Smith-Waterman Score=702.

SEQ ID NO: 27725 - DNA, 3860 bp, Homo sapiens
  SIMILAR (244)..(2190): 951254mologous to Homo sapiens RLIP76 protein,accession number L42542,Smith-Waterman Score=3154.
agtctggtttaactggttggaacgactaaagcacgctggcgcaaggaaagctctcaacttcgggagctgaggcgcaggctggccagagcgtggagaggaaagccctttccatcctcaaggccgttgcaggagatgcccgcgagccaccttcgccagcaccacaccggggtgtaatggataggtaacagagaagacctcgtcccttccctagtcagggcatcagcatgactgagtgcttcctgccccccaccagcagccccagtgaacaccgcagggtggagcatggcagcgggcttacccggacccccagctctgaagagatcagccctactaagtttcctggattgtaaccgcactggcgagccctcacctccccatgacatcctccatgagcctcctgatgtagtgtctgatgatgagaaagatcatgggaagaaaaaagggaaatttaagaaaaaggaaaagaggactgaaggctatgcagcctttcaggaagatagctctggagatgaggcagaaagtccttctaaaatgaagaggtccaagggaatccatgttttcaagaagcccagcttttctaaaaagaaggaaaaggattttaaaataaaagagaaacccaaagaagaaaagcataaagaagaaaagcacaaagaagaaaaacataaagagaagaagtcaaaagacttgacagcagctgatgttgttaaacagtggaaggaaaagaagaaaaagaaaaagccaattcaggagccagaggtgcctcagattgatgttccaaatctcaaacccatttttggaattcctttggctgatgcagtagagaggaccatgatgtatgatggcattcggctgccagccgttttccgtgaatgtatagattacgtagagaagtatggcatgaagtgtgaaggcatctacagagtatcaggaattaaatcaaaggtggatgagctaaaagcagcctatgaccgggaggagtctacaaacttggaagactatgagcctaacactgtagccagtttgctgaagcagtatttgcgagaccttccagagaatttgcttaccaaagagcttatgcccagatttgaagaggcttgtgggaggaccacggagactgagaaagtgcaggaattccagcgtttactcaaagaactgccagaatgtaactatcttctgatttcttggctcattgtgcacatggaccatgtcattgcaaaggaactggaaacaaaaatgaatatacagaacatttctatagtgctcagcccaactgtgcagatcagcaatcgagtcctgtatgtgtttttcacacatgtgcaagaactctttggaaatgtggtactaaagcaagtgatgaaacctctgcgatggtctaacatggccacgatgcccacgctgccagagacccaggcgggcatcaaggaggagatcaggagacaggagtttcttttgaattgtttacatcgagatctgcagggtgggataaaggatttgtctaaagaagaaagattatgggaagtacaaagaattttgacagccctcaaaagaaaactgagagaagctaaaagacaggagtgtgaaaccaagattgcacaagagatagccagtctttcaaaagaggatgtttccaaagaagagatgaatgaaaatgaagaagttataaatattctccttgctcaggagaatgagatcctgactgaacaggaggagctcctggccatggagcagtttctgcgccggcagattgcctcagaaaaagaagagattgaacgcctcagagctgagattgctgaaattcagagtcgccagcagcacggccgaagtgagactgaggagtactcctccgagagcgagagcgagagtgaggatgaggaggagctgcagatcattctggaagacttacagagacagaacgaagagctggaaataaagaacaatcatttgaatcaagcaattcatgaggagcgcgaggccatcatcgagctgcgcgtgcagctgcggctgctccagatgcagcgagccaaggccgagcagcaggcgcaggaggacgaggagcctgagtggcgcgggggtgccgtccagccgcccagagacggcgtccttgagccaaaagcagctaaagagcagccaaaggcaggcaaggagccggcaaagccatcgcccagcagggataggaaggagacgtccatctgagcagcctgcgtggccgtctggagtccgtgagactgaaaggacccgtgcatcttactgtaacccgggggccaggccggctctctcgctgtacattctgtaaaggtgtcttctcttctcagactcttcctctgtcacacgtctgactccttcacgtcaggctcaggttccatgggaggacgaagcagtggacgcattgtgggctttagggacagatgagttttccagatagtgtcagcttatttgaagattaattttctttgttaacttaaaataactattttaacccttgagtggcttctttttaaaccaaaaaccgtctttctttgcttttttatcacagcagaatcaggatctctttctcattcaaggggggaaccacaccaggtcagcgctgcgcctgctgtggccgccgcgagccacgccctctgggatctctggtaccgtcactcttgcttgtgccttccacaccttctcggtgcagatccctatgggggagctgcctcacgttctctgactggtcagagcagcgcctggtgggtgttccctggcccactctcctctctccttctgcagttctaaaccacagtctataagcccgagtcaccaggacggcctgtctggccacagacaggggctgcctgtggagcctgcccaccggcccccggcagtgcagtccagcggggaggaggctgcccgttcctgccagttcctcactgcggggaccagcaaaggccttctcactgggttggtcaaaggtagtcaccttggcctggtgcatccacagaggatgttgttcaaaccagaaatcttttaaacgactgaccttccttaaaaacagaatgactccgattgcttgcttgggctagaatgtacacgtctccttgcctgaataagccatatatatgctcttaaacaaaagtttgaaattatccatatcatctcagtgaacctactggtggactcccaattgacaagattgagcaatagaaaaaaattcctttcctttgaatgatagctgtgattcaccccaccccattttcttgtttctggtccatccgatgagacggatgctctgatgctctgaggcttctgggaggctgggccctggaggcaacgtgctgcaggcgcactctgtcagagtgaacagcaccgcgagacaggccaggctcgtggctcggaagacaaaccccacacacactcaaggggtcgaaaacaaaccccacacgagggctctcacctccttctcctaggtagtatttattttcagcacctgtttgatgcagtttttaatcctctacctattgcactgttgtgactcgttggccattatttgattttggtacgaaaaaaagctttgttatagaaatcagcatactatttttttaaatctggagagaagatattctggtgactgaaagtatggtcgggtgtcagatataaatgtgcaaatgccttcttgctgtcctgtcggtctcagtacgttcactttatagctgctggcaatatcgaaggttccttttttgtttgtgtaaactctaatttctatcaaggtgtcatggatttttaaaattagtatttcattacaaatgtctcagcattggttaactaattttgggcaggaccattattgatcaagcaaataaattcaacagccatttgggaaaaag

SEQ ID NO: 27726 - DNA, 508 bp, Homo sapiens
  SIMILAR (223)..(101): 1001254mologous to Homo sapiens transcription factor-like 5,accession number AB012124,Smith-Waterman Score=211.
  misc_feature (1)...(508): n = a,t,c or g
agtcagactagccgagcagagctccagggttgcagaaggcgtgcacaggtcacgaaggaatggctgttcaccccccgaggattcctgttcagtccgatcacttgatctccatcgaggggctgctctgtaaactcccctgtgcaggacaggtcaccaaggagtccggtctggtcagctttagccttcggccagttttaccgcaaaatacgctctcaaattccttctatctctttccattcggttatgcctctccctacgttgagaccttcctccctggggcccactctgggcctgctcccccaggtttgcctgtgaggactccgaggactgccaagcgccttgtgtggcggtggcaccttcgcccacattctgaatctctccaagggctcttcgctctacatttgtgtccaactgacgcattctactccgattcctcgaattccacgacactggactagggacatcagttnncngcncnctncaaagggaatccaggnnnngaaaccca

SEQ ID NO: 27727 - DNA, 754 bp, Homo sapiens
  SIMILAR (127)..(360): 1001254mologous to Homo sapiens dJ885L7.5 (putative novel protein similar to D. melanogaster CG14701 (Tr:Q9VGQ9)),accession number AL035669,Smith-Waterman Score=432.
atggctgttcaccccccgaggattcctgttcagtccgatcacttgatctccatcgaggggctgctctgtaaactcccctgtgcaggacaggtcaccaaggagtccggtctgcaacccccgctgaccatggcagtatttcatgacgaggtggaaatcgaggacttccaatatgacgaggactcggagacatatttctgtccctgcccatgcggagataacttctccatcaccaaggaagagctggagaatggggaaggtgtggcaatgtgtccaggctgctctctcattataaaagtgatttatgacaaagatcagtttgcgtgtggagaaacagtgccagtgccttcagtcaacaaagaatgagttaaatgctaaggaagccttcaggaatccgaaccctgaacagctggaaatgagcccagatagaaacttcaaatgcaaagctcctggcttcccacagacacccatttatgctgtcgtgttctgtaagagtgtggattctttctatcaactgctgatatcatcttcaggaagcaagtccatcacattgcatatctggattttgtgcttagacccttaaattgcaagcattcttaattatgcatctaaatttaaaagaagatagtttcagtccagtgctttctttcccttggtttcatcgttttcatgtcttcaacccaattaattcggtatttgaccccagcgacttgtgcctcagtctttagggtttcttaataaaaaaaaaattgtaaaa

SEQ ID NO: 27728 - DNA, 1811 bp, Homo sapiens
  SIMILAR (99)..(1442): 971254mologous to Homo sapiens transcription factor-like 5,accession number AB012124,Smith-Waterman Score=2243.
caggcggcgaggcggccgtcgagggcgcgggcggcggggacgcggcgctgggcgagccggggctgagcttcacgaccaccgacctgagcctggtggagatgacggaggtggagtacacgcagctgcagcacatcctctgctcgcacatggaggcggcggctgacggcgagctcgagatgcgcctcaactcggcgctgctggcggcggcgggcccgggcgcaggcgcgggcggcttcgcggcgggcggtcaggggggcgcggcgcccgtgtaccccgtgctgtgcccgtccgcgctggcggccgacgcgccctgcctgggccacatcgacttccaggagctgcgcatgatgctgctaagcgaggcgggcgcggcggagaagacgtcgggcggcggggacggagcgagggcccgggccgacggcgccgccaaggagggcgcgggcgcggctgcggctgcggctggacccgacggcgcgcccgaggcccgggccaagccggccgtgcgcgtccgcctggaggaccgcttcaacagcatccccgccgagccgccgcccgcgccgcgcggccccgagccccccgagccgggcggggcgctcaacaatttggtaactctcattcgacatccatctgaactaatgaatgttcctcttcagcaacaaaacaaatgtacagcattagtgaaaaataaaactgcggctacaactactgctttgcaatttacatacccactgtttactacaaatgcttgctctactagtggaaattctaatctttcacagacacagagttctagtaactcatgttctgtacttgaagctgccaagcaccaggatattggattgcctagagcattttctttctgttatcagcaagaaattgaatccactaaacagacgttaggtagtagaaacaaagttttgcctgagcaagtttggattaaagtgggagaagcagcgctatgcaaacaagcactgaagaggaatcggagtagaatgcgtcagttggacacaaatgtagagcgaagagcccttggagagattcagaatgtgggcgaaggtgccaccgccacacaaggcgcttggcagtcctcggagtcctcacaggcaaacctgggggagcaggcccagagtgggccccagggaggaaggtctcaacgtagggagaggcataaccgaatggaaagagatagaaggcgcagaatccgcatttgctgtgatgagttgaatctcttagtgccgttctgcaatgccgagactgacaaggccacaactctgcagtggaccacagcattcctgaaatacatccaggaaagacatggagattctcttaaaaaggaatttgagagcgtattttgcggtaaaactggccgaaggctaaagctgaccagaccgggactcccttggtgacctgtcctgcacaggggagttttacagagcagccccttcgattggagatcaaagtgatcggactgaacaggaatcctcggggggtgaacagccattccttcgtgacctgtgcaacgccttctgcaaccctgggagctctgctcgggcttagtctgactcgaaaagggcgttgattcaagctggacggggactccagtagggatttttgagagcacattttgtaaaaatatttatctagacgcaaatgcttatccatgaatgtcctcttagaccatttggggatgaagccatcttaataattagtaataattaattagtaataattagtaagcattttctcaatgctctgattccatcatgttttcttaacatgataacttaaaaaattgacatcctttgtacttt

SEQ ID NO: 27729 - DNA, 381 bp, Homo sapiens; identical to SEQ ID NO: 4562
  SIMILAR (60)..(308): 1001254mologous to Homo sapiens glyceraldehyde-3-phosphate dehydrogenase,accession number X01677,Smith-Waterman Score=435.

SEQ ID NO: 27730 - DNA, 455 bp, Homo sapiens
  SIMILAR (95)..(328): 1001254mologous to Homo sapiens SIB 121 intestinal mucin,accession number R12603,Smith-Waterman Score=444.
tgcaggggggagccaaaagggtcatcatctctgccccctctgctgatgcccccatgttcgtcatgggtgtgaaccatgagaagtatgacaacagcctctgacttcaacagcgacacccactcctccacctttgacgctggggctggcattgccctcaacgaccactttgtcaagctcatttcctggtatgacaacgaatttggctacagcaacagggtggtggacctcatggcccacatggcctccaaggagtaagacccctggaccaccagccccagcaagagcacaagaggaagagagagaccctcactgctggggagtccctgccacactcagtcccccaccacactgaatctcccctcctcacagttgccatgtagaccccttgaagaggggaggggcctagggagccgcaccttgtcatgtaccatcaataaagtaccctgtgctcaacc

SEQ ID NO: 27731 - DNA, 732 bp, Homo sapiens; identical to SEQ ID NO: 11527
  SIMILAR (475)..(729): 821254mologous to Mus musculus glyceraldehyde-3-phosphate dehydrogenase,accession number M32599,Smith-Waterman Score=369.

SEQ ID NO: 27732 - DNA, 765 bp, Homo sapiens
  SIMILAR (379)..(762): 901254mologous to Homo sapiens glyceraldehyde 3-phosphate dehydrogenase (EC 1.2.1.12),accession number J02642,Smith-Waterman Score=585.
atggggaaagtgaaggttggagtcaatggatttggttgtattgggcgcctggtcatcaggactgcttgtaattctggtaaagtagatattatcgccatcaatgacccattcattgacctcagctacatggtctacatgttccagtatgatcccacccatggtaaattccatggcaccgtcaaggctgagaacgggaagcttgtcatcaatggaaatcccatcactatcttccaggagccagatccctccaaaatcaagtggggtgatgctggcactgagtatgtcatggagtccactggcatcttcaccaccatggagaatgctggggctcacttgcagtggggagccaaaaggccacagggctctccagaacatcatccctgccactactgggctgccaaggctgtgaggaaggtcatccctgagctgaatggtaagctcactggcatggccctccgtgtccccactgccaacgtgtcagtggtggacctcacctaccatctggaaaaacctgccaaatatgatgacatcaagaaggtggtgaagcaggcatcagagggccccctcaaaggcatcctgggctacactgggcaccaggtggtctcctccgacttcaacagtgacacccactcttccaccttcaatgctggggctggcactgccctcaacgaccactttgtcaagctcatttcctggtatgacaatgaatttggctacaacaacagggtggtggacctcatggcccacatggcctccaaggagtaa

SEQ ID NO: 27733 - DNA, 390 bp, Homo sapiens
  SIMILAR (2)..(331): 901254mologous to Homo sapiens glyceraldehyde-3-phosphate dehydrogenase,accession number X01677,Smith-Waterman Score=512.
  misc_feature (1)...(390): n = a,t,c or g
cggaaagctcactggcatggccttccgtgtccccactgccaacgtgtcagtggtggacctgacctcccgtctagaaaaccctgccaaatatgatgacctcaaaaaggtggtaaagcaggcgtcgaagggccccctcaagggcatcctgggctacactgagcaccaggtggtctcctttgacttcaacagcgacacccactcctccccctttgacggtggggttggcattgccctcaacgccccctttgtcaagctcatttcctggtatgacaacgaatttggctacagcaacagggtggtggacctcatggcccacatggcctccaaggagtaagacccctggtcccccagccccagcaaaagcacaagagaaaggtcgncgcggccgca

SEQ ID NO: 27734 - DNA, 373 bp, Homo sapiens
  SIMILAR (6)..(365): 811254mologous to Homo sapiens glyceraldehyde 3-phosphate dehydrogenase (EC 1.2.1.12),accession number J02642,Smith-Waterman Score=516.
cccacgcgttcggaaaggtcatccctgagctgaacgggaagctcactggcatggccttccgtgtccccactgccatcgtgacactggcggacctgacctgccgtgtaaaaaaacctgccaaatatgatgacatccaaaagggggggaaccgggcgacattgggccccctcaagggcgtcctgggctacactgaccaccacgcgggctcctctgactttgacagagacacccactcctccacctttgacgctggggctggaattgccctcgacgaccactttgtcaagctcatttcctggtatgacaacgaatttggctacagcaacagggtggtggacctcatggcccacatggcctccaaggagtaagaccc

SEQ ID NO: 27735 - DNA, 1007 bp, Homo sapiens; identical to SEQ ID NO: 11528
  SIMILAR (750)..(1004): 901254mologous to Homo sapiens glyceraldehyde 3-phosphate dehydrogenase (EC 1.2.1.12),accession number J02642,Smith-Waterman Score=408.

SEQ ID NO: 27736 - DNA, 548 bp, Homo sapiens
  SIMILAR (221)..(126): 401254mologous to Homo sapiens H6FXtripa fusion protein sequence,accession number W94270,Smith-Waterman Score=53.
aagtgattacccgccttgcctttccaaagtgctggattacagacgtgagtcaccgtgcctgccctgcccaggctctttttaacaaccagctctctccgtgggcctctccggactgtcatactcaggagccgggtcttgggctcctcctgcacaggctcctgggggttgccaaggtgggatttttcggacaccatttccttggggacagcagttggtggctgtttctttcttggctgtcttcgaacctttgagttcttattctgtcttcccatgtctgcatcctcatcattttcaatgaactcctctgtaattatttttactttttcttccctgggattcattttggctgggatgggtccttgttaatgtcagcccatatccattagaatatagcttaagaaactttacaaaaggcactttgcagattctgcattctaggatggaagtggagagagacggtgctgttgaatcttttaaaagggtccggagggaaaggctgagtgttggagatgcccctgggctcctccctgggaagctgcagccatgtc

SEQ ID NO: 27737 - DNA, 1167 bp, Homo sapiens
  SIMILAR (1014)..(448): 231254mologous to Homo sapiens heavy neurofilament subunit,accession number X15306,Smith-Waterman Score=124.
atttaattcttttttccacaaaagaaaaataaacaggtttaatcaaggttcttcctaccacattgtagggtctaacccagagctacagggagccatgtgaattcagtacttgggatttcaactcagacgtggagtgtcattctcctggtggtggcaggtttctcctcagccactttctttcttgcagggacatcagctttttcctcctagccctccacccacacctcattaccatcctgatattaaataccatttcctttcctcctccttgtgcaggtggttcttcttcttccccttcctcctcctcttgattaagttcccgctctatgtcttgcttttggtttttcctctgatccttctggttcgggatcaaagttgaaagtaaagaagttataggcctcttctgcagaagggaagccaggtggaacctgggggtttaggcttgatttttcgtgcagaatcatggaacttgactcttgagtaactttgggagtcaacttcttgttgagtcctttctacctctttccctggctctgtgccaaattcagtctccaattctttcttactgggacttcgtaagcgtctgggccgaggagtggggatttcctgcagcaatgcactttctgctttggacctcgctgcttgcaatttctccctcatgcgtcccctcatggaaaattctgcaaagcctgttctggaagttgaaggaattggaggtaagctccgtgggcctctccggactgtcatactcaggaggcgggtcttgggctcctcctgcacaggctcctgggggttgccaaggtgggatttttcggacaccatttccttggggacagcagttggtggctgtttctttcttggctgtcttcgaacctttgagttcttattctgtcttcccatgtctgcatcctcatcattttcaatgaactcctctgtaattatttttactttttcttccctgggattcattttggctgggatgggtcccttaagaaactttacaaaaggcactttgcagattctgcattctaggatggaagtggagagagacggtgctgttgaatcttttaaaagggtccggagggaaaggctgagtgttggagatgcccctgggctcctccctgggaagctgcagccatgtcttggagcaaaacccacgcgtccgcg

SEQ ID NO: 27738 - DNA, 4468 bp, Homo sapiens
  SIMILAR (3888)..(4097): 611254mologous to Homo sapiens SIB 121 intestinal mucin,accession number R12603,Smith-Waterman Score=211.
ctcactgccggcttcctcactggaatgtcgtaagctcgcacaatgttcaccagcagctttatgtctccatcagacaggttttgggctgtcaccttcttccgaccttttctccttggccgcagtggtcgcttttgttctgccagcttgaaaaggcttaggcccaaaatgctttcacggagatgatatgcaagaaacacttccagctgtggtgctgcaaccaggtttcctcgtccaccccagaagcttgtgggtggggtctcagccacctctactgccatgcgacaggagagtaagggaatgtctggcactgggagactgatattgggaacttcttcttctactatcatatcagcaagaagaaaatattgttttgcaattaagaaacgatttatcactgattctctaacctgctggaggtacttggctactatggccctatgggtgtctatgtgttccttggtttctattacatttctgtctcgtaaccgtttctcatagtcctggaataccttttccataatttctcggtcatagactggaacttgcttataatttcggaattctggcacctcttggcttctaagatgaagaagcctaaatcgtttggatctatttaattcttgatctgaaacaaagttaaactcctgttgcagctgctccagtctaaagaaatcagggacataggattcaccactggtagcaaccgagataagctgcatcaaaggggcattgttggggtcatttgggtcgagcttggactctgctgcccacttggccaattttttcatgtctgtcagtcctgatgtgccaatagatgagatggcatctgctttcttcaaagcactccgaaatccgatgttctgctgtgacaatggaggaattaaaggtatcccgttttctccaatggcccatgccacactatgagacactttccctgaggtcatcagagtcagctggttactgccatcagcttcaaatgagaagggcactccacttccaactccctcgtggtccagtgtcacatgctgattactgctaaactccacttcttcagtaggagcccttccagtgacaacagtagtctcaggaataggcagaaacacttctgctagcaaggtgggactactgtgtccgacagtttcatagaccttctgcttgtagaactgccttggcattcttatctcaagcctggctagaagctctgagcccatcagtggaggcatggctgggcacctgcaggaggggaggccttcttgccttctctcctgtctttctgagtctgccagtgggtgtctcctggcccacttcctttccttcctgcctgcctcattactgtcttctgctcttccttctagctctctatccggtcttctcatgttaatcttggtcttcctgatatcagcttttcctactgctaagaggacagaggaagaggagcccttcaagtgttccaggccatcagcctcagcagaagccccagagcagatggaatagagagtccacgtggaccccacagcaggggcagggacctcacaggggctgtgtccagtgaccacgtatctgaaggctgccccagttctcctctccagtgcagagttgggcaactctctacttttacctcctgggttcattagaagagctgcccaccacagcttgggaacaggaccctggaggcgctggccttggtcagccaccccctttaattggtcaattgtggtaaggtccagggggtccttgaagtggggcttatgtggccaggatggcatctgaagtgttaaactctccggccagttgactatttgcaaattgaaaatctgcccaaagtgaactcggaagtctgctcctagtggccgactgactgtcctggacacctccttgttgttgaacagcacttttaagtacactgagcgctttctttacatcctcccttctcgagacctccgctctggggcactggtcattgggtgttacgcttcctgccaggcttagctccgggaccagcgtgggctcccaaggcctcctcctgctctgggctgctctctccctcacctcctgctctatcactgcccgatcagtgggctctggagggctgggcttcacaaggtcctcctcgggatacggctctgcaatctcatcaccgggatgttcttctgctgcttgtttccttttcttcttcttggccctctgttgagttagaggcaacatgatatcaaacaggaattttggaatttcatttaagagcacagtcttcatagccagatggacttgcactttcctccaggccttccactgttgtaacgacgttctgtattcttccatcttctgtgcgtactcctccgtgtgctcttctaacagttcacttatttcagcttgaatttctgcttcatatgcttcttcatctgctttctggtcagctttttcctttctcaaaacaagtttcaagggagtatttgtaaatctctggaactctcgaagggatttcatctctttccaaacttttatgatagtcttaagcaatgttctatctttttcttgttcagcatcacggaattttcttgtttgtcgaatttcagatttatactcattgatggttttttggatggtatcgagagactgatgaggtttttctggatcaaggccagtctgaacagcatttcttaaagcttggagcttatcagtaagaaatttcgccttgtttctctggtgtcttgcaaggtactggtcatataactgggccagcttggctgccaaaacatgctctcggctaaaacagggatgatgagtgaagattaaccctgaaatatcaatgtccagttggaaatttccaggagggtctccagatctgatcacatgctgactactgtgaacgtattttacagcctttttatacagtgtttcaagctctgccttaatgctctgctcctgtgttagtactggcggccttgaaggaaatggcttgatggggtttggcagagctaggatcctgccgtcatctccaaaccatcttctttcggggtcctgcatcagcaatctgttctccatgatgttctgattggtgcgtgccacctctggtcttaccccggtgtaaaggccttcatcttccaggaacctgggctgtacattctcaggaagctttttatatgtagggactgtctgcctactgggtatgaagagcatttctctttccatctgcagccgatcatggatgctttcataatctgcaggtctgactgctacaaaatcgtcagccacgtgatctaagcccaataggaagtcctcggcatcatcaccattaagcagttcttcctcatccatttcctttcctcctccttgtgcaggtggttcttcttcttccccttcctccctctcttgattagttcccgctctatgtcttgcttttggtttttcctctgatccttctggttcgggatcaaatgttgaaagtaaagaagttataggcctcttctgcagaagggaagccaggtggaacctggggtttaggcttgatttttcgtgcagaatcatggaacttgactcttgagtaactttgggagtcaacttcttgttgagtcctttctacctctttccctggcacagagctgaatccccctatatccccactggctgtcaactccactgagctcctcaagggtgagctgtcactgtcatcactgggtgttctgagcctatcggacacctctgtgccaaattcagtctccaattctttcttactgggacttcgtaagcgtctgggccgaggagtggggatttcctgcagcaatgcactttctgctttggacctcgctgcttgcaatttctccctcatgcgtcccctcatggaaaattctgcaaagcctgttctggaagttgaaggaattggaggtaagccttcgatgctggggctggcattgccctcagtgaccactttatcaagctcatttcctggtatgacaatgaatttggctatagcaatagagtggtggacctcatggcccacatggcctccaaggagtaagaccctccgtgggcctctccggactgtcatactcaggaggcgggtcttgggctcctcctgcacaggctcctgggggttgccaaggtgggatttttcggacaccatttccttggggacagcagttggtggctgtttctttcttggctgtcttcgaacctttgagttcttattctgtcttcccatgtctgcatcctcatcattttcaatgaactcctctgtaattatttttactttttcttccctgggattcattttggctgggatgggtcccctctctcctggctcccatccatcttctatccctgtctgttctgagttttgcccaagaagttcatctctgtgcactgcatcaccaagactatctgggcacctggagtcatgggctttgaccagtgaggggtataaataggagacatgtgataggatggtggtgccctcttcatcttccaccat

SEQ ID NO: 27739 - DNA, 3627 bp, Homo sapiens
  SIMILAR (1933)..(2766): 981254mologous to Cloning vector pSacBII RepL,accession number U09128,Smith-Waterman Score=1395.
  misc_feature (1)...(3627): n = a,t,c or g
gggcccctcccggttcaaaaaagccccnnnnnnnnnnncacccccaaaagggggggccttaaaaggccccccccggggtttttccggggttttaaagggcccctttaatttaaggggcgccccnnnnnnnnnnnnnnnnnnnnnnnnnnnnnnnnntggttgagcacagggtaactttattagatggatacatgaacaaggtgcggctcccctaaggcccctccccctcttccaaggggttctacatggcaaactgtgaaggaggggagattccagtgtggtggggggactggagtgtggcagggactccccaagcaattaagggtctctctcttcctcttgtgcttcttgcttggggctggtgggtccaggggtcttactccttggaggccaatgtggccaatgaggtccaccacccgtgttgctgatagccaaattcgttgtcataccaggaaatgagcttgacaaagtggtctgttgagggcaatgccagccccagccgtcgaaggtgggaggaagtgggtgtccgcttgttgaaagtcagagggagacccacctgggtgctcaagtgtagccccaggaatgccctttgaggggggcccttccgacggcctggcttcacacaccttctttgatgtcaatcatatatttggcaaggtttttcctagacgggcaggttcaaggtccaaccactggacacgttttggcagtgggggacaccggaagggccatgcccagtgaagctttcccggttcaagcttcagggatgacccttgcccacaggccttgggcagcgcccgtaaaggggcagggatgatgttctggaaagcccccgcgggcctttacgcccacagtttcccggaggggccatccacagtcttatgggtggcagtgatggcatggcctgtggtcatgagtccttccccgataccaaagttgtcatggatgacccttggccaggggtgctaagcagttggtggtgcaggaggcattgctgatgatcttgaggctgttgtcatacttctcatggttcacacccatgacgaacatgggggcatcagcagagggggcagagatgatgacccttttggctcccccctgcaaatgagccccagccttctccatggtggtgaagacgccagtggactccacgacgtactcagcgccagcatcgccccacttgattttggagggatctcgctcctggaagatggtgatgggatttccattgatgacaagcttcccgttctcagccttgacggtgccatggaatttgccatgggtggaatcatattggaacatgtaaaccatgtagttgaggtcaatgaaggggtcattgatggcaacaatatccactttaccagagttaaaagcagccctggtgaccaggtcgaaggccgtggcggcggcacttttgcccatgaattgctcgctgtggagtacgcaggctggatttctcccgcgtttcggctgaaggtaaaccagacatttatcgactatcgaaccggaagattacaacctgctattccgcagagtctccctgaagctctccgtttggctgccgacctggcagagcaaaagcaacggctggagcaaaaaatgcttatggatgcacctaaagtcgaattcgctgaacgcgttgctaccgccagcggggttctaatcggcaactatgccaaagtgctcggcctgggccaaaactatctcttcacctggttgcgtgataacggaattctgatcgcaaccggtgaacgcaggaacgtccccaaacaagaatacatatctcgtgggtatttcacccttaaagaaaccgtgatcgatacaagcaatggaagcaggatttctttcacgactcgtataaccggcaaaggtcagcagtggctgatgaagcgattgcttgatgctgacgtagtaagaaccaccagcattgtaatgctggctaaagtcactttcctgagctgtataacgatgagcgattttactttttctggctatgaattggcctgctttgtaacacactccggtctatcccgtagcgccgggcatatcctgtcgcaatgtgcaaatctcgcggcaacaaccagtgaatacttcattcacaagcctcaccgcctgatcgcggcagaaactggttatagccaatcaaccgtcgttcgtgcattccgtgaagctgtaaacaaaggaattctgtctgtagagattgttatcggcgatcaccgtgaacgtcgcgctaacctgtaccggttaacaccatcctttttggccttcgcacaacaagccaaaaatgcgctgatagaaagcaaattaaagatctcttcagcggcaaccaaggttaaagctgttctcgctaagacattggctttatttaattttttatccacacccccatgtcaaaatgataccccctccccctgtcaggatgacgtggcaataaagaataagaagtcacaagttaaaaaaacaaaaagatcagtttccggcggtgccggaacaaccagcctcaaaaaattgacttcatggatcgctaaggcaaaagcaaaggctgacaatctgcggttatccaaaaaacgcactcaaaaacatgagttcaagcagaaagtagaggcggctgcgcggaaatatgcttacctgaagaacaagcgttcgcctgatattggcgggatatcaaacttcgataacctaccgcattgcatgacggtaaacgaagctcttaatgcggttttagccaaaaataaagataacgaacaatggggtgcggttgctggcgcctatatcgccgacatcaccgatggggaagatcgggctcgccacttcgggctcatgagcgcttgtttcggcgtgggtatggtggcaggccccgtggccgggggactgttgggcgccatctccttgcatgcaccattccttgcggcggcggtgctcaacggcctcaacctactactgggctgcttcctaatgcaggagtcgcataagggagagcgtcgaggagaacttctacggtggctgcagaacagcggtggctgtagtacagtggatactggtgaacggaaaatgctgctgcctgatcgttctggaagttttgtctcagaggagtacccggccgagctagatctcaccaaaatcaaatatggtaatgctggcactgagtacaccatggagtccactggtgtcttcaccaccatggagaaggctggggctcactttcagggaaaactgtggatagctccttcaggaaactggcataatggacatggggttctccagaacatcatcactacatctgctgtcactgccaagcctaagggcaaagtcatccctcagctgaacaggaagctcaatggcatggccttccgtgtccccaccactaatgtgttggtcatgaatctgacctgccatcagaaaatacctgccaaatatgatgacatcaagaaggtggtgaagcagaattggaaggctccctcaagggcatcctgggctacaatgagcaccaggttgtctcctccaactttatcagcatcatgcacttttccaccttcgatgctgggactggcattgccctcaatgaccactttatcaagctcatttcctggtatgacaatgaatttgactacaacaacagggtggtga

SEQ ID NO: 27740 - DNA, 334 bp, Homo sapiens
  SIMILAR (155)..(81): 881254mologous to Homo sapiens gamma subunit of sodium potassium ATPase like,accession number X86400,Smith-Waterman Score= 110.
ggcacgagacgggctgctgcgggcaggctgcggagagagacagctgctgggagagaccacccatcccgctcctcttgccctctctttccggagactatgagaccgttcgcaatgggggcctgatcttcgctggactggccttcatcgtggggctccatcctcctcagcagacgattccgctgcgggggcactaagaagcgcaggcgaatcaatgaagatgagccgtaacagcagactcggcggtgccacccactgcactggggccagctgggaagccaagcatggccctgcctctggcgcctccccttcttgcctgggctttagacctttgtcc

SEQ ID NO: 27741 - DNA, 561 bp, Homo sapiens
  SIMILAR (327)..(58): 811254mologous to Homo sapiens gamma subunit of sodium potassium ATPase like,accession number X86400,Smith-Waterman Score= 352.
  misc_feature (1)...(561): n = a,t,c or g
gatctcccgtgtcgacccacgcgtccgcccacgcgtncggtggaggcagcccattcacctggttaaatgactgggttgtcgatggacggtggcggcagccccaagggggacgtggacccgttctactatgactatgagaccgttcgcaatgggggcctgatcttcgctggactggccttcatcgtggggctcctcatcctcctcagcagaagattccgctgtgggggcaataagaagcgcaggcaaatcaatgaagatgagccgtaacagcaggtatgctaggagggcctggggaaggtgcggggagggcagggcaggcttgggagcaacagggaagaattctggctcctggactcggtaaataagaattttagggtcgtccacacatcagccaggtggtctgtcacccatcgtgtgtttaaaatgatggccaagggcctggcgtggagtgtgtgccgcaggagatcacagaggagccctggagaaaagtgagatggacaagggggaagtaaaaccccaacctctgctgcctcccacccaaccccatcctgcctttgtctt

SEQ ID NO: 27742 - DNA, 853 bp, Homo sapiens
  SIMILAR (437)..(511): 1001254mologous to Homo sapiens Na+,K+-ATPase gamma-subunit isoform 2,accession number AF241235,Smith-Waterman Score=122.
atgggcaagctgtcagatgcagcagagccaaccacagcccccgccctggccctctccctcgaggggctccacactgcagccagcccagggtgcccgaaaagggcctttggaaagacacaggcttatggtagagctcaagctcaacctgtcaacccagtgatcatggcgattaaaaactatctggtcacagcaagacctgggcggcagccccaagggggacgtggacccgttctactatggtaagcctgggcccctgcgcacccttcctgagccctcaggaccccttccaccaagcagcggcctctcccagccccaggtccatgctctgtgccccttatctcccctggttaccacgggctgctgcgggcaggctgcggggagagacagctgctgggagagaccacccatcccgctcctcttgccctctctttccggagactatgagaccgttcgcaatgggggcctgatcttcgctggactggccttcatcgtggggctcctcatcctcctcaggatctgccaagttcgctccaggaagactattgccagcctggctgtgcctcatcagctgttccccatgatgctgaaaagcaaagctaggaaaattctccatatgttggggcccacggagggggagacagccacaaacagctgtgagaccttcatcgttcctaaaacaggaattttagtgccggggaagcttgttcttttacacagtaaaaatgcaaatgcaggcaacacagatgctggcacgctggatggaacaacggagagcgcctcgccggggttcatccggctgcctaaacctggatttgttttggcaataataaggcagttattggagactcgataa

SEQ ID NO: 27743 - DNA, 674 bp, Homo sapiens
  SIMILAR (206)..(57): 541254mologous to Homo sapiens gamma subunit of sodium potassium ATPase like,accession number X86400,Smith-Waterman Score= 125.
  misc_feature (1)...(674): n = a,t,c or g
ggcgagcatttaagagcagagacagcaggaataggggagtggaggcagccgattcacctggggaaatgactgggttgtcgatggacggtggcggcagccccaagggggacgtggacccgttctagtatggcttctacnggcgggcggcggatagagacgggcggctgggagagaccacccatcccgctcctcttgccctctctttccggagactatgagaccgttcgcaaatgggggcctggatcttcgctggactggccttcatcgtgggggctcctcattcttcttaggcagaagattccgctgtgggggcaataagaagcgcaggcaaatcaatgaagatgagccgtaacagcagcctcggcggtgccacccactgcactggggccagctgggaagccaaagcatggccctgcctctggcgcctcccctttttccctgggctttagacctttgtccccgtcactggccagcgcttgggctgaaggaagctccagactcaatgtgacccccaggtggcatcgccaacgcctgcctcgtgccacctcatgcttataataaagccggcgtcagagaccgctgcttccctcacctgcctgcctgtctccctcctctgtcaccaccagcctctccaagctcaagtacaaatacagccgggcccggaattcttttgc

SEQ ID NO: 27744 - DNA, 431 bp, Homo sapiens
  SIMILAR (86)..(403): 241254mologous to Helicobacter pylori 26695 endonuclease III (nth),accession number AE000572,Smith-Waterman Score=77.
tgtgatttatgaagcatatcagcagtgtagtgactatgacttggaatttggaactgagtgtttgcaattggccctaaaatactgttgcactaaagccaaacttgtagaaggatcacctgacctctggaaggtgacctacaaacgagatctctatgcggctgaatcgattattaaggagagaatttcccaagagatttgtgtagttatggatacagaagaagataacaaacatgtaggtcatcttcttgaagaagtgctgaaaagtgaattaaatcatgtaaaagtcacatctgaggctctgggtcatgctggcagacatcttcagcaaatcatcttagatcaatgctacaattttgtttgtgtgaatgttacaacctctgattttcaagaaacccagaagttactgagcatgcttgaagagagtagtcttt

SEQ ID NO: 27745 - DNA, 361 bp, Homo sapiens
  SIMILAR (236)..(361): 801254mologous to Homo sapiens Human secreted protein, SEQ ID NO: 7217,accession number G03136,Smith-Waterman Score=174.
ttttggctgtccctctaatgtgcagagcagagtggccagagaggaaagaggttggatgacctaaaagcaggcactttcctagagaattagagcctcctacacattcttgaagcaacctgcttccacatacatggtggcttctaagcttggtgaaggtcggaatggcatgagaccctgttagggcaacggagcagtttctgcttccagattttctagcaacaggccccagtctgtgatgttcccctccctgtgtccatgtgtcctcattgttcaactcccacttatgagtgagaacctgtagtgtttgattttctgtccttgtgatattttgctgagaatgatggtttccagcttcatccat

SEQ ID NO: 27746 - DNA, 594 bp, Homo sapiens
  SIMILAR (330)..(199): 791254mologous to Homo sapiens Human secreted protein, SEQ ID NO: 7217,accession number G03136,Smith-Waterman Score=168.
atggggattacaattcaagatgagattttgggtggggacacagccaaaccatatcagagggcaatctgctttactcagtctatcaatttagtgaagttcatcctaaaataccctcagagaaacaccaagaataatgtttggctaaatatctgggcatcccatgacccagtcgagttgacacgtaaaattaaccatcacagggacatcgataaagctggaaaccatcattctcagcaaactagcacaggaactgaaaaccaaacatcgcatgttctcactcataagtgggaactgaacaatgagaacacatggacacagggagaggaacatcacacactggggcctgtcgggaggcactggatagaggacctgcttgggaaaagctttgaacaggagcctgctaattactggctgaatggacttagcctttctgagatttgtttttccctcaactatgcagagggaagagggaagaatagaaatggccaacacttctccgtttttgagaggatggattgtgttaatgaaaaggaacttgctcataaattgtcaaactgtagtgtaggaccaaagctgaacgggacagtttcgtag

SEQ ID NO: 27747 - DNA, 663 bp, Homo sapiens
  SIMILAR (52)..(390): 921254mologous to Cloning vector pSacBII SacB,accession number U09128,Smith-Waterman Score=551.
atggcagaagtgaaactgtctgacaaggaggaggagaaggaggaggaggacctttctggaggaggagcgactcaagccttcgcgaaagaaaataaccaaaaagcatacaaagaaacgtacggcgtctctcatattacacgccatgatatgctgcagatccctaaacagcagcaaaacgaaaaataccaagtgcctcaattcgatcaatcaacgattaaaaatattgagtctgcaaaaggacttgatgtgtgggacagctggccgctgcaaaacgctgacggaacagtagctgaatacaacggctatcacgttgtgtttgctcttgcgggaagcccgaaagacgctgatgacacatcaatctacatggacatggatgaagctggaaaccatcattctcagcaaactaacacaggaacagaaaaccaaacaacgcatgttctcactcataagtgggagttgaacaatgagaacacgtggacacagggaggggaacatcacacacaggggcctgttgggggactcctggacccggaagatgctctcgtacactcaccaacagaccagtgcgcttcccaacaaggccgcagaccactccacggcccagccgccctcctgggacagccaccatcttcctctcccttttccatcttgaatggcaattag

SEQ ID NO: 27748 - DNA, 1048 bp, Homo sapiens
  SIMILAR (1046)..(963): 711254mologous to Homo sapiens PRO1546,accession number AF116638,Smith-Waterman Score=110.
atggatctacataaaggaaaaacttcagttgaggaggcagtgaagtgtagtgactatgacttggaatttggaactgagtgtttgcaattggccctaaaatactgttgcactaaagccaaacttgtagaaggatcacctgacctctggaaggtgacctacaaacgagatctctatgcggctgaatcgattattaagggtatgtttggccttatgactgtcagttcctgtgtttcaaaaataggacagtatactttctatataccaagagatccaatgttcaaggaaaagagaatttcccaagagatttgtgtagttatggatacagaagaagataacaaacatgtaggtcatcttcttgaagaagtgctgaaaagtgaattaaatggtggtgaatgtggaggatttactgacgagtggaagtggctttcagtgggatgcggtgctggaaaggggatggagtggaaaggtggtcttcccctggagtttggctatcccctgctgacctcttctctgtggtcctaccgtcaagccgtccttctggaagtcccaccttcaagctgtccctctgaagtcaaactgcttctctttgacagctgctgcttctcttctggcccctgctgttccactctgctgcccctctgccatcactctgctagtggagcttggggttttttatgggtacaagatgggaggcagggagagccaaaaagcagcatttgagtgggaaaacaggaatgcatgttctcactttgggccacagtacccaggcctaaggcatgtaaaagtcacatctgaggctctgggtcatgctggcagacatcttcagcaaatcatcttagatcaatgctacaattttgtttgtgtgaatgttacaacctctgattttcaagaaacccagaagttactgagcatgcttgaagagagtagtctttgcattttatatcctgttgttgttgtttcaccccccactccccaacaagccccagtgtgtgatgttcccctccttgtgtccatgtgttctcattgttcagctaccacttatgagtga

SEQ ID NO: 27749 - DNA, 844 bp, Homo sapiens
  SIMILAR (777)..(721): 361254mologous to Homo sapiens Human secreted protein, SEQ ID NO: 6619,accession number G02538,Smith-Waterman Score=39.
tttttttttttgaaggacaggcacatttattgatcagaaatattgaaatgggctgggcacagtggcaaatgcctgtaatcccagtaagttgggaggccaagatgggaggatcacttgagcccaggagtttgagaccaaccagggaaacacagggagagcccatctctataattttttttttaatttgccagatatgatgacacgtgcctgtagtcttaggctgcttggggaggctgaagtggggaggatctcttgaggcccaggggggttgagactacagtgaggccgtgatttcaccacttgcactctgggcctggggaacagaggggagataacctctttttcactcttctggggtgctccagcaggcacagcccccacaccaaccttcatctgggattgtctcaagaccttctggaatcttctcccaaacatacctccttacacaggtccattattgttggggtaaaatgtcgtatatgactgaagcgttccagggaagacccctttccccttcactggtgatcttcattatagattaactccctctttcctctctgacagagacttcatgaccatcacattgtctgggatagaatgttaaacacattcttaaattggaaaggaaatgaaaacaagctgtagagaaaaaaaaacaaggtggaggcaggggaacaacctataattaattataggttgtaactcataaaccagccttgcatagaaaatgttaaacaagaaagttaaaacaagaaaagttatacaagaaaatgttctacaaggttactaaatgtctttgctttctgcctatgtaagcaagactttaacttttaacttcagggcc

SEQ ID NO: 27750 - DNA, 387 bp, Homo sapiens
  SIMILAR (99)..(158): 521254mologous to Vicia faba late nodulin,accession number AJ243466,Smith-Waterman Score=59.
cggaaggaatcagatgggcgtcttgcagctccgatcctgatgaagaattgtagctgctgtgcctcaagacagataagcacaggtcgtcccagaggggatgccaccttggggactgtgaacctccgctgaggccaggccatgccctgccctgtgtctgtatctggaactgcgggatttctctgatctgccagggaaaggcctgccacctcgtggccacttcaggaactgctccaaaggcagtctgctcttgggaacctacctggtcaggtagctccttgaggtctggaactgcaccacagtgcaagttatcttcacggtgaggtgaagctgcctgtatggaagactcttggatcagtcgtctgagcacatgtccagcaatgggcatgg

SEQ ID NO: 27751 - DNA, 477 bp, Homo sapiens
  SIMILAR (439)..(308): 341254mologous to Homo sapiens Fragment of human secreted protein encoded by gene 62,accession number Y36708,Smith-Waterman Score=60.
cgacccacgtggaatacttgagtaaaaagactttggtcaagtaattggtgggtttggattggaattaattgccaggaaagtgaccaccaagtcagcatcatttctgtctctagaatggtagttttgtggaaagatgctcaactagggaaaggcaggagaactgactggtagtcatagctctcagagtaactaggctttctgagactcagtttccctctgcagaacgagatggccccgggtgtgggtcctgttgcacattcctggccacactttgtgttggctgtgcttcggaaaggggtctgtgaagagctgacctgcataaaggctggtggctgtcacacccccaggcagaacaactggagaggaaggtgggcttcacaacagtacactcagtttttatttaaattcttagctttttaaattcacaaggagtaaaatataaaatggtcattgctctccaccccatggccagactgg

SEQ ID NO: 27752 - DNA, 966 bp, Homo sapiens
  SIMILAR (391)..(561): 961254mologous to Homo sapiens GrpE-like protein cochaperone,accession number AF298592,Smith-Waterman Score=279.
atgttcctctctcaaggacagaacctagcacacgatgttgctagcgtaaggcaccgagtcttgcccaacgtctgcactccgcaaacgcctgtgaaggcgtccctgaaggttttaccaataaaatttaaaacaacagcagataagcacgtctacgcccatcatcccactcaccccgtgcgcttcccacggaggaggagtgttgttaccgcctacggttttcagataaggaaagtaaacctgagggtgtcagacctttcggagaccccactgtccctggccactgcccccagcctgttccagtgggcagccctgcaagcctcagttctaggtctctctcaactcagagacctcagtgacttagagttgtcattggccctcaaggtgactgacaccttcaggccatctccccggttgttgtgcacagccacgaaacaaaagaacagtggccagaacctggaagaggacatgggtcagagtgaacagaaggcagatcctcctgctacagagaagaccctcctggaagagaaggtcaagttggaggaacagctgaaggagactgtggtaagctggatcctcctcggtgcctgcagcctgggtggtcggtggtaccaggtgtggggccagcccagcccggccgtccacagctgtgcatcctctggccacagctctgcttcaccccctcatctagaaaacccttgcagggacccagtgaaagaggcccactgtggatgtcagcgtgctctgatgacacgaaggacaggaaacgttttccacttgcactttgctcccgaggacttcctcaagctgagtttggtgcacacggccagtgctcctggcagctgtccagtcatctgcgtggccaagtgctacacacagcaggaaaatgtcaccagagacacgaatcccagcgtgacaaaacaagacacgatcaccatcaggcctgagcccactctacagatggagtaa

SEQ ID NO: 27753 - DNA, 2295 bp, Homo sapiens
  SIMILAR (1510)..(1962): 661254mologous to Mus musculus VPS10 domain receptor protein SorCS2,accession number AY004316,Smith-Waterman Score=462.
atggtggtgaccgacgccactgacggtggtaagcatccggaaaaagtgcgacaacaccacgagtgtactggcccgctgtaccaacgaagagaccagaattcagagaggctcccttcacctctgcccaccggcagaccacaaggtcagagctgtcacctcatgatacctttggctccagttgtggctttgcgatcaatccaagggcaacgtcaagggaaggtagggcaccacgtgctgtacagtcggctcttccggcacccccagtccctggctagcccacccatgcccattgctggacatgtgctcagacgactgatccaagagtcttccatacaggcagcttcacctccacgtgaagataacttgcactgtggtgcagttccagacctcaaggagctacctgaccaggttaggacattttacccaccagccgttactgctccctaccaaaagtatcgatactcccagttttcatctaatacccagctttatattccaatttcccccacctatctctcaaatgccccgtttaagctagtttattctatcatgatccaagtaaggggcacttggtctccctgggtggaggtggcagcgcgacctcccgctccgatgggggcctttcccggccccggggcctccttcccggcctcggccccggagctgggcatctccgggctcgcggttccccgccgcgggacgcggaccgccccgctggggcctgctctgctgccaggctgccagctcagggcttgggaagcgtggagcgggcgggcgccgtgtcaggaggagaggaccgcagcgcggggggcgtttggctcggaaggtacggtggcccacgtgcgcgtgtggtccagggcctgcggcgacgcctcgcgcgcattcacggtctcggcgctcacgggcgcagaggcagccgcaacttgtgcggttgaagaagcgaccaaagaagctcgagctttgtccaaggtcacgcagcgaggccgagccgggccgggtgtgccctgggcaggagctgtggttactcatttccgtgccgcagctcgaggccggggccacagcggtgctcgggaaacttcgtgtcgcaagaacgagatggccccgggtgtgggtcctgttgcacattcctggccacactttgtgttggctgtgcttcggaaaggggtctgtgaagagctgacctgcagaaaggctggtggctgtcacacccccaggcagaacaactggagaggaaggccatctccccggttgttgtgcacagccacgaaacaaaagaacagtggccagaacctggaagaggacatgggtcagagtgaacagaaggcagatcctcctgctacagagaagaccctcctggaagagaaggtcaagttggaggaacagctgaaggagactgtggaaaaatataaacgagctttggcagacactgagaacttacggcagaggagccagaaattggtggaggaggcaaaattatacggttgtgaagtctccaacagcaggcaccagaagggccccggccccaccgcccgagccccgagccccggggctccgccgccaccgcgctcgccgcgctcgcggccgctcctgctgctgctgctgctgctgggcgcctgcggggcggcggggcgctcccctgagcccgggcgcctgggtcctcacgcccaactgacccgggtgccgcggagccctcccgcggggcgcgcggagcccggtggcggcgaggaccggcaggcgcgcggcacggagccaggcgccccgggtccgagtcccggtcccgctcctggtcccggcgaggacggcgcccccgccgcgggctaccggcgctgggagcgggcggcgccgctggccggagtggcttcgcgggcgcaggtctcgctcatcagcacgtcgttcgtgctcaagggggacgcgacgcacaaccaggcgatggtgcactggacgggcgagaacagcagcgtaagtgacctccacgcgctcgccgcggcccctacccgggacaccgcgggacacccgggcgggaccgccacggcccccaccccagatccccactatggtcatcaggggcgggttcttggcgacttgggcacttgggtcacctcggccgcgcccctactggcctctggtcactggttacttggggagaggtcctcagattcatacgcttgtctcaccgcaggggacattcccgcagatttcgggatcctgggccacctccgatactcccccactggcctccaggtcttgggttacggaggaggaccccagaaccttcggaagcctgcaggtccttga

SEQ ID NO: 27754 - DNA, 778 bp, Homo sapiens
  SIMILAR (251)..(676): 651254mologous to Homo sapiens Human mitochondrial chaperone protein (Hmt-GrpE),accession number W80748,Smith-Waterman Score= 391.
tttcgtgctgcctgcactcacgcttggtgcgtgcgcggcgactgcgacgggcagtggcagtcatggcggctcagtgcgtgaggttggcgcggcgcagtcttcctgctttggcgttgtctgtcaggcccatcttccccggtttgttgtgcacggccacgaaaccaaaggaccagtgccaagaacctgaaaggggacatgggtcagagtgaacagagggcagatcctcctgctacagagaagaccctcctgggaagagaaggtcaagttgggaggaacagctgaaggagactgtgggaaaaatataaacgagctttggcaggacactgaagaacttaccggcagagggagccagaatttgttgagggaggcaaaattattacggcatttcaagcctttctgcaaggacttgttggaggtggcagacgtttttggaaaaggcaacacagtgtgttcccaaaagaagaaattaaagacgataaccctcacctgaagaaccctctatggagggggctgggtcatgactgaagtccagatccagaaggtgttcacaaagcatggcttgctcaagttgaaccctgtcggagccaagttcgacccttatgaacatgaggccttgttccacacaccggttgaggggaaggagccaggcacagtggccctagttagcaaagtgggggtacaagctgcatggggcgcactctgagacccgccctggtgggggtggtgaaggaagcttagctgctgttgatggggtgggtgtttttaaactcacttgatg

SEQ ID NO: 27755 - DNA, 492 bp, Homo sapiens
  SIMILAR (1)..(162): 961254mologous to Homo sapiens HSPC166,accession number AF161515,Smith-Waterman Score=257.
gtccccacctgcctgctccagatgaagatccaagaagatcccagcctatgcggagacaaaccctccatctcagctgtcaccgtggagctgagcaaagaaacactggacaccatgttagatggcctgggccgcatccgagaccaactctctgccgtggccactggagagcagaagcccccatctttgaaaagctcctgagtgcaacttaattaccaccatggcaggaacacatggagggaatcggacaggtgatgccagcagttcctgctcctctgtcagggaagccaggcagagcccacagagcatggtccatccagagtgttccctgagccccctccaccatactggaacccctcttcagtgtaggaagtctgaaatgggtgctaattcccttcttcatgaaaccagggccctcttccttcatctaatgcagccactcctaggtgaagaagtgggaataattggaaataaacaacagttctaaaacttcaa

SEQ ID NO: 27756 - DNA, 1443 bp, Homo sapiens
  SIMILAR (1122)..(793): 531254mologous to Homo sapiens HSPC166,accession number AF161515,Smith-Waterman Score=190.
ttttttttttttttttgaagttttagaactgttgtttatttccaattattcccacttcttcacctaggagtggctgcattagatgaaggaagagggccctggtttcatgaagaagggaattagcacccatttcagacttcctacactgaagaggggttccagtatggtggagggggctcaaggaaacactctggatggaccatgctctgtgggcctctgcctgggcttccctgacagaagaaccaggaacctgctgggcatcaacctggtccgatccctccatgtgttctgggattgggaaatgaactaattaggagctaatgtrrggaaataaacttacttattgggatagggctgcatgatttggggcctgaaatttctcaaacagctatgcaggagggcagctgactgatgcaaattttccctcacccctgccaatggtggtaattaaagttggcactcaggagcttttcaaaagatggggggcttctgctctccagcttcagaaagagaaagaagatgagtgagaacagcggggtatctggctggcttcttcgcaatccaactgtaccttgtggatgcgcagtagccccctgctgtccccaccatcctgcctgttgtcagctgcagctgcaagggcagcctgcatatggggagacatttatcactcatgagcagctgggtcatggcagtggccctggcagctggctggatcatttactggccacggcagagagttggtctcggatgcggcccaggccatctaacatggtgtccagtgtttctttgcctcagctccacggtgacagctgagatggagggtttgtctccgcataggctgggatcttccttggatcttcatctggagcaggcaggtggggacggccatgcggcctgaatgctgtctgaagaaggttttgaatatcccactctccagtcccagatcgaacccaggcgtggacagagagatctgcatttgcctggggctttcggtttctcccaagtagacacatgttccctaggatgatctttgtccagcaaggtttttgaaggttttggtggaaaattttctggaaaagagagcccagaattgcctcggccagaggacaggtcacggaatgcccaccagcctagtgaggcggtgcagagccctggagcagctgcaagataaacggaaccacctgtagttcctctgcctcctcctgggtcacagacaagctggaacatgtaacatccaagagttttttcaagccaagggctgaactggaaaagctttcttgacacagctgtctgacaacatctttcgaggaggctttttaaaagctcagaaagacgcaacgatttgcctgggatcacacagagaacaagcagcagagttgtggctccaaaccagggtcaatttgttcccaattcctgctccgtctaaagtctcggagacaaagg

SEQ ID NO: 27757 - DNA, 429 bp, Homo sapiens
  SIMILAR (211)..(342): 501254mologous to Arabidopsis thaliana contains similarity to HepA-related protein Harp~gene_id:MXM12.5,accession number AB005249,Smith-Waterman Score=145.
atgattagaagattaaagactgaagttttaacccagctaccccctaaagtcagacagcgtattccatttgatcttccatcagcagctgccaaggaattgaataccagctttgaagagtgggaaaaaataatgagaactccaaattcaggtgccatggagacagtcatggggttgataactcgcatgtttaaacaaactgctattgccaagctaaatgaaatgataagaaacccaggggaaggacatttctggcaggtggatcacatcaagccagtgtatgggggaggaggacagtgttccctggacaacctgcagactctctgcacagtctgtcacaaagaggagatatctaaagcctctcttaatatgatgttagcagctgtgaatgttcagtacattattaagcctttggacattgcagaatggtga

SEQ ID NO: 27758 - DNA, 481 bp, Homo sapiens
  SIMILAR (204)..(410): 631254mologous to Homo sapiens Fragment of human secreted protein encoded by gene 14,accession number Y14480,Smith-Waterman Score=194.
ccattttcccaacagcatgtgctcagttcgtgtctgtcacattttgataattctcacaatgtttcaagctttttcattattacatcacagtgagctttgatgtgacgatcgtcattgttctggggcatcacaaatgcgctcatagaaggtggtgaacttaactgaaaaatgctgtgtgtgttctgactgctccatccgtcagctataccctcatctctctccctctcgtcagaccgccctattccctgagacataacactgttaaaattaggccaaataataaccctacagtggcctccaaatgttcaaatgcaaggaaaacatgcacatctctcactttaaatcaaaagctagaaattattatgcttagtgaggaaggtatgtcaaaagccaaaataagccaaaagctataggtgcctcttgcaccaaacagccaacttgtgaatgcaaaggaaaagttcttgaaaaaaaaaaaaaaaaa

SEQ ID NO: 27759 - DNA, 1404 bp, Homo sapiens
  SIMILAR (607)..(807): 461254mologous to Homo sapiens Human secreted protein, SEQ ID NO: 6720,accession number G02639,Smith-Waterman Score=161.
atgctgaatgcagccgtggatacccctgagtgtgatgctgaatgcagtcgtgtgctgcaggatattgcatgtctttgtagaatccagaaaccagagcctcagtggggctgggagcaagactcagctggggataatcatgagtggattaagcaaagggcaggtggcagtgggtggggccaggagagaagacttggctcagccactcctagtgcaccctcaggggaagcttttgtggctcctcctcctcctgtgtccctaaaatgtgagactgtggtcctcttctcccaccatacacactgttggagttttcggctgtgcccatgggctcctccaccaccaccaccatccccgcccccaccacccccttcacaactttccctggaacctgactctaattctctaagcacctgggttctggcaacaaccagatcatttcagactctatctatcacaaccactttcaatcgtcaagtacttaaacatatctactctgtgttctggactctggggacacagcagtggggaaaaccacattctaaaggggagacagacagacacatgaatgaaaatctaatgtcagctggtgatgagtgcaatggagatacggcactatccacaacagccaagatagggaatcaacccacgtgcccatcagcagatgaacagatgaagaaaatgtggtacatatatacaatggaatatgatttagccatgaaaaagactgagatcctgtcatttgcagcaacatggatggaactgaaggtcaatatggggcagagcaagaagacaagcttctacaggacagttggcgtttggatgaatattgaaagatgtgtggaatttcagaaaatagtaaagaaaaatgagcagaaccaggatgggtcatggagaaacgaggcagaggtgagtctgagtatggtggtccggggctacggggcggcactggggcgcggctgtatgaagaagagcatcaaaagttgtgtggaggagcatgtacccaacacagacaatgacaaggaacttgcatgtgtttctatgagtgttatgtctcagggaatagggcggtctgacgagagggagagagatgagggtatagctgacggatggagcagtcagaacacacacagcatttttcagttaagttcaccaccttctatgagcgcatttgtgatgccccagaacaatgacgatcgtcacatcaaagctcactgtgatgtaataatgaaaaagcttgaaacattgtgggttcgtgccatgcttccattccaaacaccaggcccaaggatggactgtgtccacatcctgctcagggactgtgaaggagggcagttgggagttggtcaccccaggcaagatgctgacttagcagagaatcaaacacctggagagccatctggacactag

SEQ ID NO: 27760 - DNA, 477 bp, Homo sapiens
  SIMILAR (471)..(268): 661254mologous to Mus musculus putative E1-E2 ATPase,accession number AF011337,Smith-Waterman Score=264.
tcagctctctgatcctccagacaacctttcctgagccggatgtggcctggcgatccttagttggaatccacgctggctactgctgagagatttctgattccatcttatccctccagcactggcaattgacttgtctgcttctgtaccacatgagggcaggagtgctattctgtgaccaggtttctcccttggatatggatctcctggttgtctgtatgcgtgatcttccctcattccctgctggcgttggggtactccgaggctctgctgtgagaagcccttcacgacacatttttgcttgaggtttgtctctccatccaagctggcagtttccagatggcatatcccattggggtcagaggaaaaaaggaggagtatgtctgctgggacaatctcattgcatttcatttggatgaagtctcccacgcgcacatccttccagcacttctgcacataggtctgctcttttctgggcat

SEQ ID NO: 27761 - DNA, 570 bp, Homo sapiens
  SIMILAR (1)..(213): 971254mologous to Homo sapiens ribosomal protein L21,accession number X89401,Smith-Waterman Score=356.
atgccccacaagtgttaccatggcaaaactggaagagtctacaatgttacccagcatgctgttggcattgttgtaaacaaacaagttaagggcaagattcctgccaagagaattaatgtgcgtattgagcacattaagcactctaagagccgacacagcttcctgaaacgtgtgaaggaaaatgatcagaaaaagaaagaagccaaagagaaagaagttcccatggagcccaccgtgtacatgtctgaaaaggggaggacactttttcctggggagcctgccaatcacataaagaacaaaaggcttctgtgctggaccctgcctgcttatctgtgcagtttgatctcagactgctgtgctagcaatcagcgagactccgtgggcgtaggaccctccgagccatgtgcgggatataatctcctgatcaatcccccgattaaaaataaagagtccgcaaaagaaccgcaagtgtggcacagccgcacgctgcaaaacgcagacggaacagtagctgaatacaacggcaatcacgatgtgttcgctcgagcaaggaagcccgaaaaacgctaa

SEQ ID NO: 27762 - DNA, 741 bp, Homo sapiens
  SIMILAR (327)..(398): 831254mologous to Homo sapiens Human secreted protein, SEQ ID NO: 4473,accession number G00392,Smith-Waterman Score=106.
tcatgcgtcatgtagttctcgtaccatgcttttcagctccatgaggtcatttaagttcttctctatgctgtttattctagttagccatttgtctaatcttttttcaaggtttttagcttctttgtgatgggttcgaacatcctcctttagctctttggtctttgatgatggtgacgtacacatggggttttggtgtgggtgtcctttctgtttgttagttttccttctaacagtcaggaccatcagctgcaggtctgttggagtttgctggaggtccactccagaccctgtttgcctgggtatcaccagcagaggctgcagcacagcaaatattgcagaacgacaaatgttgctgcctgatccttcctctggaagcttcatctcagaggggcacccagctttcagttcaatctcagactgctgtgctagcagtgaccgaggctccgtgggcgtgggaccctctgagctagatgcgggatataatctcctggtgtgccatttgctaagacttctgaagcctacttctatcaattcgtcaaaatcattctccatccagttttgtttccttgctgttgaggagttgtgatcctttggaggagaagaggtgctctggtttttggaattttcagcctttttgtgctggtttttcctcatcttcgtggctttatctacctttggtctttgatgttggtgaccttcggataaggtttctgtgtggatgccctttttgttgatgttcat

SEQ ID NO: 27763 - DNA, 1055 bp, Homo sapiens
  SIMILAR (501)..(1052): 831254mologous to Homo sapiens p40,accession number U93566,Smith-Waterman Score=743.
gtaagatgcctgcttcccctttgccttctgccatgaatggaagcttactgaggcctccccagaagcagaagctgctacacttcctgtacagcctgcagaaaggtatatctcctaatgctatccctccccactccccccaccccacaacagctccagtctacagctcccagtgtgagcgacgcagaagacaggtgatttctgcatttccaactgaggtaccaggttcatctcaccggggagtgtcggaaagtaggtgcaggggcagactgacacctcacacggccgggtactcttctgagacaaaacttccagaggaacgatcaggcagcaacacttgctgttcaccaatatccgctgttatgcagcaaccgctgctgatacccaggcaaacagggtctggagtggacctccagcaaactccaacagacctgcagctgagggtcctgactgttagaaggaaaactaacaaacagaaaggacatctacaccaaaaccccatctgtacgtcaccatcatcaaagaccaaagagaagtccttaaaggacctgatggagctgaaaaccaaggcacaagaactacgtgacgaatccacaagcctcagtagccgattcgatcaactggaagaaagggtatcagtgatggaagatcaaatgaatgaaatgaagctagaagagaagtttagagaaaaaagaataaaaagaaataaacaaagtctccaagaaatatgggactatgtgaaaagaccatatctacgtctgattggtgtacctgaaagtgacggggagaatggaaccaagttggaaaacactctgcaggatattatccaggagaacttccccaacctagcaaggcaggccaacattcaaattcaggaaatacacagaattccaccaagatactcctcgagaagagcaactccaagaaacgtaattgtcagattcaccaaagttgaaatgaaggaaaaaatgttaagggcagccagagagaaaggttgggttaccaacaaagggaagcccatcagactaacagctgagctcttggcagaaactctataa

SEQ ID NO: 27764 - DNA, 1272 bp, Homo sapiens
  SIMILAR (97)..(1038): 901254mologous to Homo sapiens putative p150,accession number U93565,Smith-Waterman Score=1427.
atgcagaaatcacccatcttctgtgttgctcacgctgggagctgtagactggagctgttcctatttggccatcttggtggccatcatcctgataccaaaccgggcagagacacaaccagaaaagataactttagaccaatatccttgatgaacattgatgcaaaaatcctcaataaaatactggcaaaccgaatccagcagcacatcaaaaagcttatccaccgtgatcaagtgggtttcatctctggggtgcaaggctggttcaatatacgcaaatcaataaatgtaatccagcatataaacagaaccaaagacaaaaaccacatgattatctcaatagatgcagaaaaggcctttgacaaaattcaacaaggcttcatgctaaaaattctcaataaattaggtattgatgggatgtatctcaaaataataagagctatctatgacaaacccacagccaaaatcatactgaatgggcaaaaactggaagtattccctttgaaaactggcacaagacagagatgccctctctcaccactcctattcaacatagagttggaagttctggccagggcaatcaggcaggagaaggaaataaagggtattcaattaggaaaagaggaagtcaaattgtccctgtttgcacatgacatgattgtatatttagaaaaccccattgtctcaccccaaaatctccttaagctgataagcaacttcagcaaagtctcaggatacaaaatcaatgtacaaaattcacaagcattcttatactccaataacagacaaacagagagccaaatcatgagtgaactaccacacacaattgcttcaaagggaataaaatacctaggaatccaacttacaagggatgtgaaggacctcttcaaggagaactacaaaccactgctcaatgaaataaaagaggatacaaacaaatggaagaacattccatgctcatgggtaggaagaatcaatatcgtgaaaatggccatactgcccaagctctgcatggcaaggagaatgtcccctgcagagctcctatcaggtgacttgttgctgaagtcagcaatggggcaggtatcggactttggagaagaagtgggagaaatggaagggcttatcaaatggcacaacaggagattatatcccgcacctggcttggagggtcctatgcccacggagcctcactcattgctagcacagcagtctgagatcaaactgcaaggtggcagcgaggctgggggaggggcacctgctattgctcaggtttga

SEQ ID NO: 27765 - DNA, 1062 bp, Homo sapiens
  SIMILAR (690)..(794): 741254mologous to Homo sapiens Human secreted protein, SEQ ID NO: 6908,accession number G02827,Smith-Waterman Score=144.
atggagcatcaaggagttgtggatccacctgaaggcactggaaaaggaaaatggggcacagaaagaagattcccctcactttcctccaccctctgcagagccttttctgtgcaaccaaaagtgatcactccttcctctgtggcaccatcacctccattcctgctctaccaagtaattatttgctcctcagttgccctgctgttcctgctcagccccctaaatttcaacatgggaactcctttaaggttggttgaatgctcatataaaagagtcaagggatggagaaaagaagaaaaagaggagatggaagcaaattcagggaatcatgggcagccgtgtgaaaataacatttgccagtttggaaagcttgtctttgcttctgtgttgtatattttgggctttcaccgcaagccacttgttattctcgtcaccttttatgggctgtgccacttctcctgtgccccagttgcttcctctcaactatgccttctgatcaattatgtcaattgttcacatagatgtatccttgctgacagtgtgaatttaacttctgaaatggatcaaaagtcatttggcatcaagtgtgaggaagaaagaaaattgatctcagactgctgtgctagcaatgagcgaggctccgtgggcatgggaccctccgagccaggtgcgggatataatctcctggtgtgccatttgctcagttggaaatgcagacatcacccgtcttctgcgttgctcacgctgggagctgtaggctggagctgttcctatttggtcatcttggaaccgcccctggcaagcctcggagtaccccaacgccagcagggaatgagggaagatcacgcatacagacaaccaggagatccatatccaagggagaaacctggtcacagaatagcactcctgccctcaggtggtacagaagcagacaagtcaattgccagtgctggagggataagatggaatcagaaatctctcagcagtagccagcgtggattccaactaaggatcgccaggccacatccggctcaggaaaggttgtctggaggatcagagagctga

SEQ ID NO: 27766 - DNA, 915 bp, Homo sapiens
  SIMILAR (637)..(912): 731254mologous to Homo sapiens PRO2221,accession number AF116695,Smith-Waterman Score=356.
ctgtcaaaacagggacatttaaatctgcagaggtttcctgctgccttttggttggctaatgtctgcccctaagaggtggagtctaacagaggcaggcaagacctccttgagctgcggtgggcttcacccagtttgagcttccctggcagctttgtttacctactcaagccttagcaaatggcgggcacccctcccccagcctcgctgccaccttgcagtttgatctcagactgctgtgctagcaatgagcgaggctccgtgggcatgggaccctccgaacccaggtgcgggaataataatctcgttgtgtgcccgttttttaagcctgtcagaaaagcgcagtagtattagggtgggagtgacccgattttcccaggtgccatctgtcacagctttgcttggctacgaaagggaattccctgaccccttgcacttcccaggtgaggcgatgcctcaccctgcttcagctcacgctcggtgcgatgcagccactgtcctgtggactgcccacactgtccgacaagccccagtgagatgaacccggtacctcagttggaaatgcagaaatcacccatcttctgcgtcgttcacgctggaagctgtagactggagctgttcctattctgccatctttcacagaacagaaaaactgagaattctaaaaatcagagcacctctcttcctccaaaggaacacaactcctcaccagcaatggaacaaagctggacggagaatgactttgagatgagagaagaaggcttcagacgatcaaacttctccaagctaaagcaggaagttcaaacccattgcaaagaagtaaaaaaccttgaaaaaagattagatgaatggctaactagaataactaatgcagagaagtccttaaaggacctgatggagctgaaaaccttggcatga

SEQ ID NO: 27767 - DNA, 426 bp, Homo sapiens
  SIMILAR (99)..(218): 751254mologous to Homo sapiens HTRM clone 2284580 protein sequence,accession number Y73384,Smith-Waterman Score=135.
gtatgttaaagaatagatgcccgttttgtgcctcatgggagctgggagcccgacgtttccaggagcaccgcgtggagttagtgtcggccgcttttggcatggcagctttttctggcctggctgagatctcactgcttaacccgcaggaagatgtccagtttcaaaaggaggtggcgcaggtttgcaagcacataacccagcaaaaaaaacaagaacaaccctacttaacgaaacccagatcttttcatatttctcccagtttggcactgtgacacagttcagactgtccagaagtaaaatgactggaaatggcaaaggctatgcatttgtggagtttgagtctgaggatgttgccaagatagttgctgaaacaatgaacaactacctgtttggtgaaagactcttggagtgtcacggacgcgtggg

SEQ ID NO: 27768 - DNA, 921 bp, Homo sapiens
  SIMILAR (676)..(918): 811254mologous to Homo sapiens HTRM clone 2284580 protein sequence,accession number Y73384,Smith-Waterman Score=332.
atggagttggatgaatgggagagaactggcagagattttaaaaaggcgtataaagagggagcaaaaattccagtttccgtttggtcaatgtgggcactaataaaggcagcccttgagccctttcaaacagatgatgagggagattcagatgaggaagaggaggacgagtgtaaaaaactaacttcagattctgaatgcaaggagcaaaaaagagaagagttgctaagtataggggaaaacacagcaaaacacaggggacctggggcctgtgattttaaggaggcaagcaggaaagtcctcccagagaaggtgatgtttgaaaaggaggtgaaagagaatagatgcccgttttctgcctcatgggagctgggagcccgacgtttccaggagcaccgcgtggagttagtgtcggccgcttttggcatggcagctttttctggcctggctgagatctcactgcttaacccgcaggaagatgtccagtttcaaaaggaggtggcgcagtttggcactgtgacacagttcagactgtccagaagtaaaatgactggaaatggcaaaggctatgcatttgtggagtttgagtctgaggatgttgccaagatagttgctgaaacaatgaacaactacctgtttggtgaaagactcttggagtgtcattttatgccacctggaaaaaaaacagaaagtatttcaaaaactaattgtcagacgtctacaaaaggccatcttttacataagaagaagaaaaaggttttaggcactcttgacactcctgagaagactgtggatatccagggcctcacaccagtttgtacaccaacatttttggagagacgaaaatctgaaatggctgaaatgaatgacgatgatgaagctaatgaaatagttttcaaacagcccatatcctatgtaaaataa

SEQ ID NO: 27769 - DNA, 526 bp, Homo sapiens
  SIMILAR (196)..(62): 331254mologous to Lycopersicon esculentum extensin,accession number Z46674,Smith-Waterman Score=67.
tttttttgtgtgagcaataaagctttttaatcacctgggtgcaggcaggctgaatccgaaaagagtcagataagggagataggggtggggctgttttataggattttggtaggtagtggaaaattacagtcaaagggggttgttctctggctggctggggtgggggtcacaaggtgctcagtgggggagcttttgagtcaggatgagccaggagaaggaatttcacaaggtaatgtcaccagttaaggcaggaactggccattttcacttcttttgtgattctttacttgcttcaggccatctggatgtatatatgcaggcttgggctcagagatctgacattcctgtcttcttatattgataagaaaaataaaataaaatagtgttgaagtgttgggggcaaccaataactttttggggggtggtatggagatataatgggccgatgtttctcagggctgcttcaagcgggattaggggaggcgtgggaacctagagtgggagagattaagctgaaggaagattt

SEQ ID NO: 27770 - DNA, 539 bp, Homo sapiens
  SIMILAR (3)..(26): 1001254mologous to Homo sapiens PRO1488,accession number AF116636,Smith-Waterman Score=43.
  misc_feature (1)...(539): n = a,t,c or g
tttgtgtgagcaataaagctgtttatttcacctgggtgcaggtgggctgagtccgaaaagagtcagcgaagggagataggggtggggctgttttatagtatttgggaaggtaatggaaaattacagtcaaagggcgggcaggagtggggggtcgcaaggtgctcagtgggggtgcttctgagccaggagaagaaaatttgcagggttaatcactcagttaaggtggggcaggaacaaatcacaatggtggaatgtcatcagttaaggcggggcagggcttttcacttttgtgattcttcagttacttcaggccatctgggtgtatatgtgcaaggccaggggatgcgatggcttggcttgggctcagaggctgacagtggcacacgccctgtaatcccacctacctggaagcccnaggcaggagaattacctgaaacccnggaagttcaaggttgcanttaagccccagattcgccccattggaanttccagcctgggaaanagagacttccattntccaaaaaaacccaaaaaaaaag

SEQ ID NO: 27771 - DNA, 577 bp, Homo sapiens
  SIMILAR (552)..(457): 621254mologous to Homo sapiens Human secreted protein, SEQ ID NO: 7340,accession number G03259,Smith-Waterman Score=91.
atttatgttttaatgttgctcttaattcctgtctgatgttgcccttataaacatctcttattctttcttcatactacccccaaaaatttctgctgcctcaagacttcaacactattttgttttatttttcttattaatataataattcagtaatgtcatgcctctgagcccaagccaagccatctgcatcccctgtgacttgcatgtatacatccatgatggcctgaatgtaactgaagatccacaaaagaagtgaaaaagccctgccccgccttaactgatgacattgcaccattgtgatttgttcctgccccaccttaactgagggattaaccctgtgaatttccttctcctggctcagaagctcccccactgagcacctttgtgtcccccacccctgcccaccagagaacaaccccctttgactgtaattttcctttaccttcccaaatcctataaaagggccccacccgtatctcccttcgctgactctcttttcggactcagctcacctgcacccaggtgaaataagcagctttattgctcacacaaaaaaaaaaaaaaaaaaagtcgacgc

SEQ ID NO: 27772 - DNA, 1215 bp, Homo sapiens
  SIMILAR (922)..(1212): 801254mologous to Homo sapiens NAG13,accession number AF194537,Smith-Waterman Score=396.
cgtcgaacaattgtaaatacgcctcaactatagggcaaaaatttttttacacactatatatatctttttgtatttatttttttgtgagcaacaaggctatttatttcacctgggtgcaggcgggctgaatccgaaaagagagtcagcgaagggagataggggtggggccattttataggatttggttaggtagtggaaaattacagtcaaagggggggtttttctctggtgggcaggggtggggtgtcacaaggtgctcagtgggggtgctttctgagccaggatgagccaggaaaaggactttcacaaggtaatgtcatcagttaacggcaggaacaaggccattttcacttcttttgtggtggaatgtcatcatttaaggcaggaaccagccatctggatgtgtacatgcaggtcacagaagggcgggaagactacaatcccagcatgcacctggctaagagacagttcctgtcactggaggaagaggcggaagactacaatcccagccagcaccgggctcagggaaattggctgcaggactacaatgccagcatgcagcgggttcatggacagtgtgtatcactggaggaagacgtggagctgtgcgtgcctcgctgggcttgcagggagatgcagtctcataactaccccagtcgtttggtcgcagggctgcagcagtacaatttcagcatatctctggctcagggagagtgcactagtcactggaggaagaggggtattatgacatactcttctattcattgcctaggcgatgtgactctccactcttacctgggcccttccaaaacagaggattgtgacatatcagtgaccctaccaccaaggctggagaggagaatcacattacctaagcactggatcaagaaatacttcacaatctttctcatgggcaaagcccagattaacaaaatagatagaccactagtaagacaaataaaggagaaaagagagaagaatcaaagagacgcaataaaaaacgacaaaggggatatcaccacgaaacccacagaaatacaaactaccatcagagaatactataaacacctctacggaaataaagtggaaaacctagaagaaattgataaattcctggaaacatccacacctccaagactaaacgaggaagaagttgaatctctgagtagaccaatagcaggttctgaaattgaggcaataattaatagcttatga

SEQ ID NO: 27773 - DNA, 448 bp, Homo sapiens
  SIMILAR (347)..(427): 961254mologous to Homo sapiens super cysteine rich protein; SCRP,accession number U63332,Smith-Waterman Score=232.
  misc_feature (1)...(448): n = a,t,c or g
ccaaggaagtataagaggagttcaaacaaatggccttgcggttcccccttggcttggaatggggtcttgggaagtcccagcaaggcttgccggggcaaccaagttcaacattccgtgctttcttgcggatgacagccatggcaagcagccgatccttctcacgcagttctntgcgcagcttggcctcagtgagacgcaggtggcgaatgctgcctttcatctctttcatcttcacttccatcagagccaggatgtggcctgaagggtgagaagcacggccgcggaagcagataccaggttcggctgcagctgggcagtctgggcagtggaggcagagggtgaggactgctgctgctgctgctgctgctgctgctgttgctgctgctgctgctgttgctgctgttgctgctgctgctgctgttgctgcntgctcncngngggcggncgc

SEQ ID NO: 27774 - DNA, 1539 bp, Homo sapiens
  SIMILAR (1485)..(238): 1001254mologous to Homo sapiens E2F-4=transcription factor,accession number S75174,Smith-Waterman Score=2122.
ccgacctgggctggcgaaggcgcagaaaccctctgcggagcacagaagtgccagcacagaagtgccagcacaggagcgggagcgtgtggccagaactgtgcggtccaggggaggccggagaagccaggcgtctgtggctctcaagctctgtaggggtcgggtagggagaggtccccaggcaacccccaggtcaagacagtctgggtcccagccacacaggcatgtccctgtcagtcagaggttgagaacaggcacatcaaagaggtcacagacaccttcactctcgtccaggttgtagatataatcgtggtctcccgggggtggagaaagacgaagcagaggggcaaacacttctgaggacatcaactcctccagcagctccgagctcatgcactctcgtgtgggatcaaagatttctgacagctctttggggagttccaaaacacctgtggggtctgccttgatgggctcaaaggaggtagaagggttgggtccggacgaactgctgctgttactgttgctgctgctgctgctgctgctgctgctgctgctgctgctgctgctgctgtccagcagggcagaagactgcagtggccgggtgtccagtgttgttgggcccagtgggagtgaactgagctcaccactgtccttgctatcagtcccagggccgccactcactgtgatctcagctgctgggccagccattccctggacttctgcactgccagggacagcagtgggagtgagctgaggactatttggacgtgaggcttcctgggactgggctagggcaggcttgggcagaggtggaggtgtagaaacagcagatgggctctggagcaaatcttcaggtggtggcacaggcacagccacagggggtgagctccatgcctccttgttcaccagcagaacctcaatgggaccactcacactcttcaggtgaatctggtacttcttctgcccattgagaccctctgggatgggcacctccaggctggtgcctgatggggcccggatggccaagagggtatctccagcaaagcatctgcagatgtcctcatgagtgacgtaggccaaacagctgttctgcacgtcctctgtgacgttccggatgctctgctgcacccacaccttgtgctggtctagttcttgctcccgctgctgcagctcctcgatctctgccttgagctcaatcagtttgtcagcaatctcccgggtattgcagccaggccccacacccttccactggatgctgttcttggactttttctcgattagcccgataccttccaaaacattggtaatgtcgtaaatccgccgcttctggcgtacagctagggtgtcagctgccagcttgaggtcaagcacgccgtccttggcctcctgcagaagggacacgaacttggtggtgagcagtcccaggctcttttcgtgccggcttggagtgcccgggggcggcggcgcctgtggcccggcctccgccatgcgcccgcccgccgcctcccctcagccaggccaggccaggcgcgccgccgccac

SEQ ID NO: 27775 - DNA, 10348 bp, Homo sapiens
  SIMILAR (10033)..(602): 881254mologous to Sus scrofa huntingtin,accession number AB016793,Smith-Waterman Score=14321.
acgttaaaattaatctctttactgatataattaaattttaaatcctgagaagaaaagagagaagggagaatggtgccgggtgtctagcacccccagccactggcccagcacaggccatggcatctgtgcatccagacacggggcgtggcatgcacaccccaccagggagacccaggccagtgttcccaaagcctgctcacggcaccttctactgcaggacagcagaggggccaacagccagcctgcaggagggaggacttctggcccagatgcaagagcagctgcaacctggcaacaaccagcaggtgactatcaggagaaaggacctggtcacccacatggggtgcagcacagctgctcctgctttctggaaggcctcaggctcagccccaccaggactgcagacactccctgcctggccactgccacaaagagcacttctgccacatggcagagacacgcacgttgcctggccgcccgcggcatgtgcggaagcccatagggaccaagctggctcggtggaggcagggcacaagggcacagacttccaaaggctccggccccagctgccgcctcacagtctctcccaccatggcgctcagcaggtggtgaccttgtggacatttcgtaaacaagtcagcagccggtgatatgggcttcctggggctgcaaccacctcaagcacagactggaaggccctgcggtcgagctcctcctctatctggtgtctgtagaagtctgtggcgaccaggcagaaaaggttcacgtccacctgctccagcttgcccatcctgctgatgacatgtgggaggatcgccgcgacccacgggctggtggacgcgctgacaaagaagcaggagaggctccacgtggccatggcgaccggggccctctgcgtgaagttggagagggacagcatgacccagtcccggaccatggacgactgcccggtgctgtgcagagtctgaaacaccttatacaccacggtggccatgaactgggggtatggctgctggttggacagaaactctccgatgactttgttcatgatgtcctggggtgggaagaagtcgtctagaaactggggcaggatcctggccaccactctggcttcacaaggaaagcctttcctgatcctatcaaaaagaacagatacccgctccatagcaacaatcactgactcgctgtcgggggctgcaggattagggtctgaagttctacccggactgactttctcctttcctgtgtacatgcaggtgagcatcaggcccagagccgccatggcccggtgcgggctgtgcacgttcactctgtccacactcagcttgaccagcgattctgcatccaggcgggagagctgctcagagagcaggaggcgctccaggcctctgagggcacagtggtaaatgatggagggggtggactcctcacttccagacagcatcaccccacacatctgtattattgatgctgaaaattccggccctacgtccagaggatagttctcaatgaggtaaaacgcagtggcacacatgaccagtacgtgctgctggctgtgaatgttcacgcagtgggcgatccctttcaggttggagaggagatagtcgctgatgaccgggatgagctgcttggcagtgtcgtccagcaggtcgcactccagcacatagaggacgccgtgcagggctccaaccctgctgggcaggtggctgctcctgagcgtgctctccagcaggcggctgacaggctccgccacggccttgtccatcccaaggacggcagctgccttgcaggtggcaggcaccaggtactgagcgaggatctcgtcttctgaagggtgcacccttcgcagttctgtcagcgtcacatacatcagctcaaactggttgcgctcggtgaacaagtctgagaccactagaagggatctgaccacctcactgatcaggatggccggggtcctcctggctgagctggacggcaggatccagcggctgtacaactcaagcaaaaactgcgaacaggagtggatgtcaactccagcccggtgtttcctggagttgactggagacgtgggtggtgacgaaggtgcaggggcgtcggcctcctcctcctcttcctcgtcccattcctcctccctcaggggtgtgatgctgttccccagccacacggagtgtatggacacctggccgagtttgtagctcatgctccccagctcccgctcggggttgatctgtagcagcagcttctcgtggctgatgagggcacctgtagtagccggagacagagaagggacaggatcccatgcctgatataaatgatgggtggcaatattctctctctttgaaaccattgcttgaatctcttgctccacaatccctctgataatgctcagcttcctcccaaacctggtgtcgagagctttcagaggcttgttccggggctgctgctccaagcagcttacagctgggttgccggccacaggcacagtcattgcactgagcaccagtgaggtgatggcctgcacggccaggacgttgatctgggtcctctctgtgtcttcttctggtgggctctcctcctgctccatcacgaggggctgcgtcaccaggacaccaaggagggtggcccaagtttcttcaaactgagtacgactggtccagcctagtgtgttgatgcggtagatgaactccttaaagacttccttttcctggaggaactccacggggatctcagggaatgctgtgccaaaatcccctcccggtttgggtgaccatccaagcttccacaccagtgggggcacacgtgtgtagctgttgacaaggggcaggcgggccaggctgatgatgatgttcctgagcaatggcgtgagaaacgccggcacgccgctattccttttatgacccaaggccaacaccgactgcagagactccaccatttctgccaccatctcacaggctgcagtgatatacttaggattctgtgtgtttggatctacttcctcctcctcctcgctgatggcttttggggtatttgtccttctttctggactaagaagctgctctccaggctgcactgcaacggcctccaggatgaagtgcacacagtagatgagggagcaggcgtgggtcacaaactctgtggaggagaccacgctccagaggccaggcagctgcagggccaggcagcagcagtccagccctgcctggagatccagactcagcgggatctgctcatggatcaaatgccaggacagggcctcaagggttgccaccacgaatttcacaatgtccttctctttctcaggaggaaggtgcaaatgactgggcagtttggagaccaccaccaggtactgtgccagggcccgggccagagtgggcagggactgatacagtgcagcatccccaaacagatcattcaacttgctccagtaggccgccggctctgcaggcagctcgggctggaagacatgatggacagcagggagctgctgcacggtgccgctcacacgggccagagtcacctcacgggctgcttcaaaaagggcactcttctggccaccagaaatttcactcatccctaggcttaagcatggagctagcaggcttaggttgaactccgagttcatcatgaaggcattcatatcttcagcaggaatccgattcaccagctctgcaccttccagcagtgcagaatctgacctggtccaacactgggatttgacaagatgaacgtaccagtctttgtccggactcactgtttccagtgacacgtgcccatccccgtccagcgggtgggaagagactggaggagagggactaagtgagtcttgcatggtggagagacgaaacctgtccagcagggaatagagcctttggtgtctctgagcgagcccgctgctctgaaggtattcctggattctgttgagttcttccattggcaactgggccatgctgctctgtaaatttgcagccagaagcatttctacccggcgacaagcaaggatgtcgaccatgcgagccagcacacggaaaggggtgcacagaagcctgtccacatacagcgtgagcacagctcccgactggctgagatggatcccctccaagcactgaagagttttcttcagcatggttggagttgaaaggttttcacaacgagactgaattgcctggatgaacaggccgctggcagcagagttccgatgaacggcactgatgaagtcctgtactggaggctcgtgggaaaggctgatcagatcttgaatgtgatttacaatgagccacgttaagtgctcggagtcatggaggttctgacagacataatcacagaagagaatgagagcccctcttcgtactatttctctattgcacattccaagtttggctgccaagtcagaatcctcctcttctccagacatctggggactaagtaactttgtgctggacagactgtgtcttttcggggtctgctgcacttctgcccaccagcggtagtcggtgtggttgacaagcagcagtatctgacaccagagcagcaccagggccgggtgggtggtgatcatggaacgagcccgcaagttcaagctgtccagggtgtagaaactgccgccacagccatcactgcggaacagcctagtggcagctgctgtgattctccggaacattccagacttgaagatgtggatcagacacattagcagtgtgcctagttcctggcaatagaaagtatgttgctgctcactcatttccaccttcagctgttttgtaacaatgtcttctaaaagaataccaaccagttgtaatagaaaccttgaaaatgtttcttctggcaaattctttatttgtttcccttcactgtgttcttctagcgttgaagtactgtccccatctcttaacctattaattactgtacaggagattaaatacggagagaaggagagctcctgaatacgagaaagaacaatatcttcagttgactgggaaatcagaaccctcaaaatggccagaattcccgatatccacagttgaacagtgctcacggacgccattgtgtttggagtgacgaacatactccgtaaaagcatgtctaccggacggagggaggaaggggccaaaatctcaaataatgtatttaacactccaagggcttcatgagagtcaatgtgcatctgctgtttggctaacattgggaggatgatgtcagctatctgtcgagacagtcgcttccacttgtcttcattctccttgtggcactgctgcaggacaagaatgaacatctccaacacctgatggtactggatgagtctcagtaacattgacaccaccacctctttttgggtttcaagctcttttcctgcatcagctttatttgttcctcttaatacaaagaggtcgtggactatgggctgcagagccggtatggcatgtgtcacagccttccttccactggccatgatgccatcacagagctgaatgattttaggaattccaatgatctgttttgaatgatagcgttcataagatagtaataccaagaagaaaaagatgtttggaatgattgcctctgattccctgaactggcccacttcaatgtattcaaactgtttcaatacaaagccaataaacacctgatctgaatccagaagacagtaattaacccgtaactgaaccagctgcgccagcaaatctaaaacctgcttctgtaactgcacacatgttgtagtcgtgtactgttttaaagcttttataacaagaggttcaaacaaacgaatgtgattatgaatagcattcttatctgcacggttctttgtgacactcgtgaggtttgtcttcaactgggtagacactttctggaggacatcaaaccatcccgaggtgtcgttctcctgctccgcctgcaccatgttcctcaggctggcgtcagcgagggcctgggtgaagtgggtgtacggggccatgaagcagtagtggtacaagcctggcctcacactggaggagccaaggcgctgtgctcggccttgtgacttgctggggttggaagataagccatcaaactgggaggccaagtttgtgccaaagagagtcttcaacaattgttgaacacaaacagttgccatcattggttctcgactaaagcaggatttcaggtatcctaggatctcttcaacacacttcccaatgtcctgcagtgtggccagctctagtatctgagaaagaacatccaaggctgagcggagaaaccctccaaacttttccgtgctgttctgaagatccagcgtgaccttgtagttagcgtgtgtagctttcaggacatcatgcagtttgaggtatgaaggaagatgatagaaactccccagtgatgaggatttacttgttgtaacaggacctgaggtatcagattgtctagaagctgcactggcctcactgcctttcttgggactcaacggtacagatgcttgttctcctggttctttctccttcccctttcgtcggatgggacttagagaaggggggtttgttagagaaggcaaggctgcctttattgcgggtccaggagccacgtcatccaggacgtgggcacaaatgttaatcaccttcagcaggtgagagaagagctgctccaccatgggcaccagggcccggtcccccagggctggccagacctcctcttgcttggtggctgctgggttggcttcttcttcagaggcccatgaacttctcagagatttgggagcactggctgcaagcaagtttccggccaaaatcaaagcatcttgatgggctgagagatccaatgggaaccaagctgacgagagcagggtcagaatcattgtggccatcccaacggtacagctcttcctagactcatctgaggcactcagtggaggcactccacagtgccaacctaaactccaaatgcaaactgggaaggcagtggaaagaagacacaaagcttcacagcatccaaatgtgagtgctctggtggttgatgtgattagttcatgagaaactgctgcaataactcttgaaaggttattttccatagtgacgtctgttatgcttggtagtaggttatagcctctatatattctggttattgtgctgacggagaaatgagatggaggctgcgtctcatgcatgagaagtttcaggtaaacactgctttgatctcttgccacggccactactggatcagcttgtccttggtcacatttataaaacagctttgggacaagcctaattagtgatgctgcggcaacatgtcgcaccctggggtcttcatctccaagcaaatggatgacaacattattgagcactcgttcttgcagttttaaaagccctgtataatgatgagcccctctgtgtaagttttctgcttttgcctccaaaaagctcaccagcctgaagtcaatctctgcaagggtttccagaagctctgtcctcaccagccaataggaactgttcctcagagtcagcacatcgatgatcagctgcagtcctaactcactgtagctgctgctgcagagactcatgacacagttcctcacagctgtacaagctaacttgcaagtaacagaagactcatccttcagtgttttccgcagcaaaggaatgcaatccgccaaagaaaatgtatttcctgtgagggttctaatggtgcccatccaatctcccacgtggaagcgggacctgctgaggatggagcagatgagggtcccacagagaatggcagtggctcctcgaacctgtgggtctccatgatcgatgtagttcaagatgtctgagacatactgttcctcagggtattccgtggtgtcaagaggaactttatagagtttgctgaagaaagattccgggtggagggccacagctgctcccacacagctgagggccagggccttcacgctgaccctcacatccctgtccggaaccagcacattttttccccctgttagcaaaaacgaagcagataaaaggcggacacaatggacaagaggtgcagagtcatcatcagtggactgtccaatgtcacctttgatgcggcaaggcttgttttcttgatcacccggttcagtagcttcatctctcaacacaaatttatcaacactgctgtcagaaggctgcctgcagtgactcatgtttttcaataaatgtgcctgttgaagggccatggaagagttcctgaaggcctccgaggcttcatcaggaagaatacctgtggcttcctcatcttcatcctggggctgtccaatctgcaggcccaaatactggttgtcggtaccgtctaacacaatttcagaactgtctgaaggggtaacagctgaatcaggcccttcggtggtggtctgggagctgtcgctgatgggcgacgaggcctgggtcccatcattcaggtccatggcagggtcagatgggacggcgctgacctggctggagctgtggctcaagatatcctcctcatccccatcagtggcagagcttgtcaagtcacagctggccagatccactgagtccgcctgcagtgtgtgctgtgaccgtggctgttctgtgatgatgtcatgacctgctgaccctggagtggaaacccctgaagaagcagccagctctccactgatctcatccttcactgaggctgttaaggcagagctgctgacatccgatctcgattcagagtcatcctccaaggcttcttcttctcctaagagcactttgcctttttgttttcttgaaaggacagggctgcatgaggaaccccctccagctataagttccacaatactcccactacggcttcggccaccagactcctccttagcagcggtgagctgcccaatgcccccgactgcggtcagggtttgcagaagctcgggtggaggcgttctgaagagctgctgcaacagctccagggctccggtcacaacattgtggtcttggtgctgtgtatgatgtaacgtcagttcataaacctggacaagctgctctgcagaaggagagacttccatttctttccttgtcactccgaagctgcctttcaggcttgtgtccttgacctgctgctgcagcaagggcaccaaatacctcagggtgagcagcacgccaagaatcagcagagtggagtgttcatcctcgacaggaacgagtaagcctaagagcacatttagtagccaactatagaaatattgtgtccttcttgagtgctggcagatgctcactgctgatccagccgctgtccgccgaatggtgggggagcttgacttcaggttcgctatgaaggcctttaacaaaaccttaatttcattgtcatttgcaaaattgccaaaagaagccataattttgggaacagctgcagccaaggtctcctggactgattcttcgggtctcttgcttgttcgagtcaggcacggcagaaggttcaccaggtaaggcctgcatttctgaggccgaaccaggtgagccagctcagcaaacctccacagggcagcacgcaaactccgaggggcaccattctttttaatttccttatagagctcgagctgtaaccttggaagattagaatccatcaaagctttgataactttgttgaggcattcgtcagccaccatcctgacatctgactctgcgtcatcactgcacagcagaaaaagttccatagcgatgcccagaagtttctgaaattctggagaatttctgacagactgtgccactatgttttcacatattgtcagacaatgattcacacggtctttcttggtagctgaaagttctttctttggtcggtgcagcggctcctcagccacagccgggccgggtggcggcgggggcggcggcgggggcggctgcggctgaggcagcagcggctgtgcctgcggcggcggctgaggaagctgaggaggcggcggcggcggcggcggcggtggcggctgttgctgctgctgctgctgctgctgctgctgctgctgctgctgctgctgctgctgctgctgctgctggaaggacttgagggactcgaaggccttcatcagcttttccagggtcgccatggcggtctcccgcccggcacggcagtccccggaggcctcgggccgactcgcggcgccgctcagcaccggggcaatgaatggggctctgggccgcaggtaaaagcagaacctgagcggccgtccatcttggacccgtcccggcagcccccacggcgccttgcgtcccagacgtgcgccggcggaggcggggccgcgccggcggaggcggggccacgccggccagcatgattgacagccctagcctgcggactctgccaatggctggccagggaaccagcccgcccctgcccccgcaggttctgcctcacacagcaa

SEQ ID NO: 27776 - DNA, 370 bp, Homo sapiens; identical to SEQ ID NO: 23589
  SIMILAR (363)..(31): 801254mologous to Homo sapiens Spinocerebellar ataxia type 2 (SCA2) disease associated protein,accession number W60213,Smith- Waterman Score=426.

SEQ ID NO: 27777 - DNA, 1998 bp, Homo sapiens
  SIMILAR (620)..(892): 341254mologous to Homo sapiens dJ808O4.1 (androgen receptor (dihydrotestosterone receptor)),accession number AL049564,Smith- Waterman Score=109.
ttatggaatacctactgtgtacaccactgttaagttatgtgctgtggatatcttatatccaaagagaatctttgcagatatatccaacctttgccctgaagaggagaaattgcccaaattcctgttgaggttctcagactttgaggacaggaggaaaggaagagtggagggcttgggagctttatctctgaaggtggcccgtgcaataggatttctgtttgggacctcgagtaccaggaggtagtgagaatttggggcggttgggggagttgaagaatcctgctgagctctcccaggggcaatctgagtgttcgcgcaggtaggagccgctagataccccagaacacagagtgactctgccctgggccgaaaggcgacatttcgcatgtccccgtaaggtccggagtagctatccatccaggggcccatttcgcttttgacacaagtgggactgggatagggcactctgctcaccatgccgccagggtaccacacatcaggtgcggtgaagtcgctttcctggcccgccagcccctgagggggccgagtgtagccgtagggggctacagctcccgcctcgccgccgccgccgccgccgccgccgccgccgccgccgccgccgccgccgccaccacccccaccaccaccacacggtccatacaactggccttcttcggctgtgaagagagtgtgccaggatgaggaagcggcggctgagggtgacccagaaccgggtcccgctgcacccgcgccatgcaggctcgccaggtccccatagcggcactgcgccgccgcagccgcccaggcgctgccgtagtccagcgggttctccagcttgatgcgagcgtggggatggggaggcggcggagggggcggcggtccggccagagccagtggaaagttgtagtagtcgcgactctggtacgcagctgcctcgtccagtgctccggacttgtagagagacagggtagacggcagttcaagtgtcccggagctccctgctgcagcgctgccagagcagcctaggctctcgccttctagccctttggtgtaacctcccttgaaaggggaatactcagcagtatcttcagtgctcttgcctgcgctgtcgtctagcagagaacctttgcattcggccaatggggcacaaggagtgggacgcacagcgggtggaactcccaaaagtggggcgtacatgcaatccccccgaagctgttcccctggactcagatgctccaacgcctccacacccaggcccatggacaccgacactgccttacacaactccttggcgttgtcagaaatggtcgaagtgccccctaagtaattgtccttggaggaagtgggagcccccgaggcctccctcgctctcccgctgctgctgccttcggatactgcttcctgctgctgttgctgaaggagttgcatggtgctggcctcgctcaggatgtctttaaggtcagcggagcagctgcttaagccggggaaagtggggcccagcagggacaacgtggatggggcagctgagtcatcctcgtccggaggtgctggcagctgctgcggcagccccttgctggcggccacggcggctccaggctctgggacgcaacctctctcggggtggcactccagggccgactgcggctgtgaaggttgctgttcctcatccaggaccaggtagcctgtggggcctctacgatgggcttggggagaaccatcctcaccctgctgctgctgctgctgcctggggctagtctcttgctgctgctgctgctgctgctgctgctgctgctgctgctgctgctgctgctgctgctgctgctgctgcagcagcagcaaactggcgccgggaggtgctgcgctcgcggcctctgggtgcctggggcccgggttctggatcacttcgcgcacgctctggaacagattctggaaagctcctcggtaggtcttggacggcggccgagggtagacccttcccagccctaactgcacttccat

SEQ ID NO: 27778 - DNA, 1732 bp, Homo sapiens
  SIMILAR (965)..(702): 1001254mologous to Homo sapiens HRIHFB2206,accession number AB015338,Smith-Waterman Score=436.
gaattccaaaaccttactttttgtttaatttgttttgccaaacaaacacagtgaaaactttagtctgactaattgtacagaaaatagaatttgtaaccagtagcaaacaaaacaggataaacctaagtccctggcaagctggatctccatcagcaggtcatccagatccccttgtaaatggcctcctgggaaaataagtcctaggaggcagaggcacagatttcgtccccatcagaatcacaggctgcacctgggaaggaaaagcatgaaaaggaggagaactgatgttacttgaatctcttatcactacacacattagagttgtctgactgctgaccaaccttaaggtatggttttcccaaacctatagtccctggacatcccacctgcatccctagagggtaagtttcaagttcagtggttctgaagcctctgcttaaccagaatctgcaacaataactggggaggaagggtagacaaagtcataattgctggtgtcaccagggcagagtctaaggccccagcttccacttcaggaggaaacaattgaggatgccaggtcaccagcaagagagtccagctgccttaagcctcagtactgtcaaccagtgcccaggagtatagaggagttcaacaatggcctgcggtcccctggctggatggggtctgggagtccagcaggctgccggggcaccagttcacattccgtgcttcttgcggatgacagccatggcaagcagccgatccttctcacgcagttcttcgcgcagcttggcctcagtgagacgcaggtggcgaatgctgcctttcatctctttcatcttcacttccatcagagccaggatgtcccgctgctcattcagcttgcgcaggagctcctcctccgtggtgcctgacgacaaggagtacgaatggtcggagccagtatcagggaagccctcttcccctaccaccaccaactgggggcccatagggcactcggcagcctccagccctgcggtagcagcctgtaactccgacgcggcggccgcagcggctgcgccctctgcggctgcaaactccacttgcactgtgagatcgatgggcttcacgtcttctccagtgggagtgatgggcgccggctgtacggatcccggagcctgactgctgtctacagtggcctgaagggtgagaaagcacggccgcggaagcagataccaggttcggctgcagctgggcagtctgggcagtggaggcagagggtgaggactgctgctgctgctgctgctgcctgctgttgctgttgctgctgctgctgctgttgctgctgttgctgctgctgctgctgttgctgcttgcctccttcggcgggcggccgcggccccagcgggtctgcgcgctactttgcgctcattgacgccgcgcagcgggaagatggtggggacgcgtaccgtgtaggtcttgcggccgccctggaagtgaacgctgcagagacggtggcctgtggtgggctggaaggtggagaagcacccactgacgccggcacgcgatacgttcttgagccagaggcgccgcaactcagcgtcctttggaaacgtgtagaagtgcagcgccttgtcccggtgcgagttgttgtagcagcctggcacgcagcacgtaaagccagggcatggctgcgccgcgcggcccggcccggcccaccggcctcctgcgctcttcgacggcccagtggctacgccgccgcccggaattc

SEQ ID NO: 27779 - DNA, 542 bp, Homo sapiens
  SIMILAR (314)..(373): 951254mologous to Homo sapiens super cysteine rich protein; SCRP,accession number U63332,Smith-Waterman Score=174.
agggtttttctaaacattttacacacattaactcatttattcccctcaataacttcatggggtaggtaccgatatcgtgctcatttcctagatatgctaagtggtactgggaagggtaactaacctgccaagggtagagagtaagtcgtggagccacgaagccaacccaaagggtctgacccagggtcagcacttttaacagcacgtcactggagagcctctgagatgcttctaaaaggacgaatccatctgcttctgtctctggtactgagggctttttagattccggaggctttctgaagaagtgaaacattgctgctgctgctgctgctgctgctgctgctgctgctgctgctgctgctgctgctactgctacattacaattgtccactaagcaatcagagaaaattgctaaaagcttctttactgcttccattccatcagcagaacctttttttttctttctttcttttaaagaccagaatgaatgtttagagtactaaatcttattagtggtcaattgaagtattggagagccacat

SEQ ID NO: 27780 - DNA, 622 bp, Homo sapiens
  SIMILAR (348)..(455): 751254mologous to Homo sapiens super cysteine rich protein; SCRP,accession number U63332,Smith-Waterman Score=227.
ttttttactttgcacactactcttcgttttatttattgtttttggaaatggaaaatagaaaataggagacccagttgtctctttaaagttttaagctaatgatgctttggattggtaggacctgttccttacatcttacctcctagttacatcttttcctaggattcttaaaactagtatggatatgctgagcatacattctttagaaccttttggactgttttggtaaatttcgtagtcgtaggatcagcacaaagcggaacttgacacacttgtggagttttacggctgtacttggtccttctccatccctttgcttccttttcaaataaaatccaaaccgccttccaagtggggctctttcatgctgctgctgctgctgctgctgctgctgctgctgctgctgctgctgctgctgctgctgctgctgctgctgctgctgctcctcctcctcctcctccttctcctcctcctcctcctcttctagaccttcttttggagaaatggctttcggaagttttgccaggaaacgtagccaagtgccacgagctgcagttgaagagaagataataaagttcagagcctcaagtaccaggcgagtatcagggcagatgttagtcat

SEQ ID NO: 27781 - DNA, 1852 bp, Homo sapiens
  SIMILAR (446)..(1132): 641254mologous to Homo sapiens L7a protein,accession number X52138,Smith-Waterman Score=697.
agtaatataaatgtattgtaaaacaaccaaaattccaccaaaccaaaccaaaacacaggaagcaaagctccatgatcaagagccagcagaaacaacagactatagcaccaaatctgtaaatatttcacatattgggattatcagatatggatcctattctatcctgctctattctattacattcttacttaaaacatttaaagaaattaaaacttctagaaataaaaaaatgaaattaaaaattcaacttcatactgcaaaagagaaattggaagctggagctgaaaaaattaagcagggggcagcaattaaagacaggaatacggaaaatacgaaagagatgcagaatggctacaatcagaaaaactgtcaatcaactgttgacaaggatgtggaggaactggacctctcaaatactgctggtgaaattgcaaaatggtacaaccactttggaatcagtttgacagtttcttataaagttgaactatgctactatttgtcccagcagtctcactctcagataggacttcttgtttcccacctggcatataagaagcttagaagttaccacgctggccttacaataagtaaaaagctgaacaaactgaaaaatcgagaactcttcttagatctgtcagagactggcccagagacaaagcaagagaagcagcagaggctgttggccctggctgagaagaaagctctgggcaaagggggcatccccactaagagaccaccggtccttcgagcaggagttaacaccgtcaccaccttggtggagaacaagaaggctcagcccgtggtgactgcacaggatgtcgagcccatcaagctggttgtcttcctgcctgccctgtgccataaaatggaggtcccttactgcgttatcaaaaggaaggcaaggctgggatgtctagtccacaggaagacctgcaccaatgctgctttcacacaggttaactcggaaaacaaaggggctttggctaagctggtggaagctatcaggaccaattacaatgacagatctgatgagatctgccgtcactggggaggcaaggccctgggtcccaagtctgtggctcacattgcccatatggaaaaggcaaaggctaaagaacttgccaccaaaatcatggatattaataaagagaaagtagctcgaagagatattggtatttggacaacaaataagactacatcaagaattcacaaaataatagcgcctgcaaatatggagcgtcttataagtttaactcctccaccaccgacaccaccagataatgttctcatgtttgatgactttccacctccaccatcacccactccagtggattatgaagacgaggaggctgcaatagttcagtataatgtttcatatgcagataaggatactgcaaggtccccaaagaattatattgagaacatcattgcagtgtatgattatacaaaagacaaggatgatgagctgtcatttatggagggtgcagtcatttatgttataaagaatgttaatggcttatatgaaggagtcttcaatcaggtgactgctggcacatatgttaagatttgtcagtacggggagctggagttgggagccagagttaccttgcagaaggactgggttttcctccctggttccagtgtgccatcttggcaaggctcctatggccagacatttctcaaacaccctgacctgtcagttggttttgtagcaggatgtctctgggattacattaactggttcctttgccctctgacttccggtcagcttcaggcaatacctctccccagcaggagattggagggaggagggcgagatcagagtgtcagtcccctggttctttccttatga

SEQ ID NO: 27782 - DNA, 1110 bp, Homo sapiens
  SIMILAR (957)..(1013): 1001254mologous to Homo sapiens PR-domain zinc finger protein 7 isoform A; PR-domain family protein 4 isoform A; PRDM7A; PFM4A,accession number AF274347,Smith-Waterman Score=109.
atgaacaatggaagtcaacaaaaagcagagcttatcgatgataagcggtcaaacatgagaattcgcggccgcataatacgactcactatagggatctctggagtgctgcagactcctggcctgtacccttgggtcaaagatgccttcaaagacatttccatatacttcaccaaggaagaatgggcagaaatgggagactgggagaaaactcgctataggaatgtgaaaatgaactataatgcactgattactgtaggtctcagagccactcgaccagctttcatgtgtcaccgaaggcaggccatcaaactccaggtggatgacacagaagagtccgatgaagaatggacacttaggcagcaagaactcaggaggaaggagactgaaggaaagatgtatagcctgcgagaaagaaagggtcatgcatacaaagagatcagcgagccacaggatgatgactacctctattgtgagatgtgtcagaacttcttcattgacagctgtgctgctcatgggccccctacatttgtaaaggacagtgcagtggacaaggggcatcccaaccgttcagccctcagtctgcccccggggctgagaattgggccatcaggcatccctcaggctgggcttggagtatggaacgaggcatctgatctgccactgggtctgcactttggcccctatgagggccgaattacagaagacgaagaggcagccaacagtggatattcctggctaatcaccaaggggagaaactgctatgagtatgtggatggaaaagataaatcctcggccaactggatgaggtatgtgaactgtgcccgggatgatgaagagcagaacctggtggccttccagtaccacaggcagatcttctatagaacctgccgagtcattaggccaggctgtgaactgctggtctggtctggggatgagtatggccaggaactgggcatcagatcttctatagaacctgccgagtcattaggccaggctgtgaactgctggtctgggctaaacagcaatcagccctttggggagactccaccactgacatcaaccaagtgccagactatggcccttccatttttgcggtttcaacacaactaa

SEQ ID NO: 27783 - DNA, 1375 bp, Homo sapiens
  SIMILAR (616)..(1347): 541254mologous to Homo sapiens serine protease DESC1,accession number AF064819,Smith-Waterman Score=744.
attaataaactcaggctccagtatgtgatgccaggccatataacttgtgagtgccgaggaattctgtctgaaacagtccaggctttttctaccatacatgcaacctctattcggagagttggtgaggctgctgtgaccaaactcttaaaaggcctgaagttttactattaccagacctccttccagatccccagtattgaatataatcctgatttttcagtagaacactcaaaacttagcaccgacctgaaacaaaaagtcagtaacgagatatttcagagatccaatttaaaccatcattacataaagtgtcaagttgtcaactttagtccagaggaagatggtgtgaaagtagatgtcattatggtgttccagttcccctctactgaacaaagggcagtaagagagaagaaaatccaaagcatcttaaatcagaagataaggaatttaagagccttgccaataaatgcctcatcagttcaagttaatgtggccatggtcaagaatggcaatgtggggccaggttccggagcaggagaggctccaggcctgggagcgggtcctgcctggtcaccaatgagctcatcaacaggggagttaactgtccaagcaagttgtggtaaacgagttgttccattaaacgtcaacagaatagcatctggagtcattgcacccaaggcggcctggccttggcaagcttcccttcagtatgataacatccatcagtgtggggccaccttgattagtaacacatggcttgtcactgcagcacactgcttccagaagtataaaaatccacatcaatggactgttagttttggaacaaaaatcaaccctcccttaatgaaaagaaatgtcagaagatttattatccatgagaagtaccgctctgcagcaagagagtacgacattgctgttgtgcaggtctcttccagagtcaccttttcggatgacatacgccggatttgtttgccagaagcctctgcatccttccaaccaaatttgactgtccacatcacaggatttggagcactttactatggtggggaatcccaaaatgatctccgagaagccagagtgaaaatcataagtgatgatgtctgcaagcaaccacaggtgtatggcaatgatataaaacctggaatgttctgtgccggatatatggaaggaatttatgatgcctgcaggggtgattctgggggacctttagtcacaagggatctgaaagatacgtggtatctcattggaattgtaagctggggagataactgtggtcaaaaggacaagcctggagtctacacacaagtgacttattaccgaaactggattgcttcaaaaacaggcatctaattcacaataaaagttaaacaaaaaa

SEQ ID NO: 27784 - DNA, 435 bp, Homo sapiens
  SIMILAR (381)..(410): 701254mologous to Rhizobium leguminosarum bv. viciae putative helicase,accession number AF228577,Smith-Waterman Score=45.
ttaagctccaaaatgagctccttttactccatgtctcacatccaggtcatgctgatgcaaaaggtgggttcccatggccttaggcagctccacccctgtggctttgcagggtacagccttccttctggctgctttcatgggctggcattgagggtctgtggcttttccacacacacgatacaagttgtcagtggatctaccattctggggttgctctagcagatgttctccatgagagccctgccctgcagcaaacttctgtctggacatccaggagtttccatacatcctctgaaatccaggcagaggttcccaaacctcagttattgacttctgtgcatgcacaggctcaatactccatggaagctcccaaggcttggggcttgtaccctctgaagccatggcctgaactgtaccttggtcctttttagtcat

SEQ ID NO: 27785 - DNA, 1140 bp, Homo sapiens
  SIMILAR (459)..(235): 451254mologous to Homo sapiens alpha 1-chimaerin {N- terminal},accession number S75654,Smith-Waterman Score=139.
tcaaggagcataaggagagaaatctaaatgttgtagtggtgttccataggaaactctgaaatcatacaactgccataattttcccatttgagttagactgtgagagggaaatgcagaaatgatagtttttctcactgtggtacctggtaccatgaggtagagttcacactcagagagcaggggatgctctactttcccatcaactgtgatcatgagtatcacctgctgggggaccttgaaattgtgaatcttttcatattttggaatttgctcgttttctttcagagttgctcttctaacaagtgatgtcaacagttccccagccagcatgacaaaccataaggccaggcagggtgaggttgagagggccaccgtgctgaggggcagtgcacaggttctgtggtcctcctcaccagcagcattggcagaagtggaaagcagagcagtggctgtcatttttggcttctgcagcatcagatatgtacttgcccttcccgtgtaatgggaccaaggaagaagcacagacctactgcccggggctcccgccctccacagcccctcccctccgggtttcccagcgcgggagctatggggcaagtgcactgcctcgccgctccacactcgcttgaacgcgtaagaaatcctcgtcagactcagctccgggctgggagggactccaacccgagcaaatctagcgctcctgccaacaccgcccgccgcaacagcaacgaattcatccatcccagattcgccaccagggtccgacggttctgtccccgcgggccttaccacttggcttgcggtgttgacgctggactgtccgaaggcttttggcaaagttgcttcccaagcatgtttactgtggaagggtgaacagccaccaaagacaccacctgtcactccatccagggtctccctcttagcctctgagcccaacacaataaggctcaagaatgtatttccaagggttttcccagcgtgcacctggaaaagccacagacactcaacgccagcccatgaaagcagccagaaggggctgtaccctgcaaagccacaggggtggagctgcccaagactatgggaacccacctcttgcatcagtgtgacctggatgtgagacatggagtcaaaggacatcat

SEQ ID NO: 27786 - DNA, 399 bp, Homo sapiens
  SIMILAR (212)..(168): 601254mologous to Homo sapiens PRO0806,accession number AF113013,Smith-Waterman Score=40.
caatggagacactgcaataggtcacttcttcctgtccaaggaaaaagcggcgctttggaggggataggccctcctcgagtttttctcccccgagtaaagagcttttggcggtcaaagggctccgccggacattcctaccgccctcccctcgacaccccactaaagacagaagaaccgcggctcgatcgggtccgcggcggaagcgcggccaaacgaatgagtaggcagcctgtgcgttgtcactccacacttttattcttgctcggggtcgactttcttttttcttctcccctggatccggagatctgcggacggcgattttgggacgaaaagggtcggatgggccgtgggagagagaaggtgtgggaaacagcatcaagtagttccgcaaaactttga

SEQ ID NO: 27787 - DNA, 879 bp, Homo sapiens
  SIMILAR (522)..(4): 441254mologous to Homo sapiens p40,accession number U93570,Smith-Waterman Score=344.
ttacaacttggttccattcttctggtcactttcaggtacaccaatcaaacgtaggtttggtcttttcacatagtcccatatttcttggaggctttgctcattcctcatcattcttttttctctaatcttgtcttcatgctttattttatcaagttgatcttcaatctctgatatcctttcttccgtttgatcgatttggctattgatacttgtgtatgcttcacaaagctctcgtgctgtgtttttcagctccatcaggtcatttatattcttctctaaactgcttattctttggtctttgctgttggtgacttttggatggagattttgtgtggtcatcctttttgttaatgttgacactattgctttctgtttgttggttttccttctaacagtcatgtccttcttctgcaggtcttctggagtttgctgggggatccagaccctgtttgcactcatggtggaagatgaagggaaagcaggcatcttacatggcttctcctgggtccctcccacaacacgtgggaatctttctagacacaaggaggggacaggtattggataaacacagctgttccaaatgggagaaattatccgaaacaaaggggttacagggcctatgcaagtccaaaatccagcagggcagtcaaattttaaagctccaaaatgatctcctttgactccagatctcacatccaggtcacgctgatgcaagcggtgggttcccatggccttgggcagctccacccctgtggctttgcagggtacagtctccctcctagctgctttcacagcctggcgttgagtgtccacagcttttccaggcacacagtgcaagtagacatctaaattcaatgcgtccacagatgaattcatcat

SEQ ID NO: 27788 - DNA, 1485 bp, Homo sapiens
  SIMILAR (1091)..(1264): 941254mologous to Homo sapiens Human secreted protein, SEQ ID NO: 7284,accession number G03203,Smith-Waterman Score=296.
atgggttttgaattgcgagaagaaaaaattgggcctgaatctccgtgctttactttccgaccatgtgactttgggtttatcctcaaatttctctgtgccccagcttctttgtatgcattcagttttataagggaagcagagcataaaaatttggaaaatttgcagcctgactatgcaatagaaaagaaaaacccattttctggggagaaactcaagcctattgcagaaatttgcctaagtagcaaggagcctaatgttaatccccaagaccatcggggaaatgtctacaggccatgtcagggaacttcatggctgcccctcccatcacaagcctgcaggcccaggagtaaaaagtggtttcatgggccaggcccagggttcctgtgccgtgtgcagcacagggacttggtgccctgtgtcccagctgctccagctatggctgaaaggggccaaggtagaggttgggctgtggcttcagagggtgcaagacccaagccttggcagcttccacgtgatgttgagcctgtgggtgcacagaagtcaagaactgaggtttgggaacctctgcctagatttcagaagatgtatggaaacgcctggatgcccaggcaaaagtttgctgcaggtgtgggaccctcatggagaacctctgctagggcagtgcagaaggaaaatgtggggtcagagccccccacacagagtccctactggggcaccacctagtggagctgtgagaagggggccactgtcctccagaccccagaatggtagatctacccaacagcttgcactgtgcacctggaaaagccacagaaactcaatgccagaccgtgaaagcaactaggagagggtgctgtaccctgcaaagccacaggggtggagctgcccaaggccatgggagcccacgtcttgcatcagcatgacctggatgttagacatggagtcaaaggagatcattttggggctttaaaatttgactgccctactggatttcagacttgcgtgggccctgtaaccactttgttttggccaatatctcccagttggaatggctgtatttactcaatacctgtacctccactgcatctaggaaagaataaaatacctaggaatccaacttacaagggacgtgaaggacctcctcaaggagaactacaaaccactgctcaaggaaataaaagaggatacaaacaaatggaagaacattccatgctcatgggtaggaagaatcaatatcgtgaaaatggccatactgcccaagatttgaaagcctcagagaaggaccaaacagtgcctgagaagtttgaatttagaataaaaggagaaaaaaaaatgaatagttgtaagcaccaatttatgatcacatggtaccagttgagcatctgtaatccaaaaacccaaaatctgaaatggtctaaaatccaaagctttttgagcatcaacatgatgctacgagtggaaaattccacacctaatgttatgtga

SEQ ID NO: 27789 - DNA, 525 bp, Homo sapiens
  SIMILAR (70)..(246): 541254mologous to Homo sapiens HDCMB45P,accession number AF068294,Smith-Waterman Score=155.
atgacagtgcacagcgaagcagcaagtgctgacgtaggagctgcagcaagttatccagaagatctagctaagaccattgatgaagatgtagagttatttcttctggatgaacaaagaaagtggtttcctgagatggaatctactcctggtgaagatgctgtgaacattgtggaaatgacaacacaggacttagagtattccataaacttagttgaaattgctccagttaccctaaccttcagcaaccacaaccctgatcagtcagcagccaacgacatcaagctgaaaatgaaaacaattgaactcatggagacagagtcgaatgatggttaccagaggctagaaagggtagtgggtgaattaaaaattgtaaaaatgttggaaggagaccaaggagatgaaggacacgaaggagacgaaggagatgaagaagacaaagaagacgaagatgaagacgaagaaaaagaagaagaagaagaagaggaagaagaagaaagcatattgtgtctcattttaaactgctag

SEQ ID NO: 27790 - DNA, 396 bp, Homo sapiens; identical to SEQ ID NO: 16758
  SIMILAR (155)..(394): 861254mologous to Homo sapiens transcription initiation factor IA protein,accession number AJ272050,Smith-Waterman Score= 333.

SEQ ID NO: 27791 - DNA, 1501 bp, Homo sapiens
  SIMILAR (1130)..(1041): 331254mologous to Escherichia coli CG Site No. 589; similar to Erwinia chrysanthemi KdgT,accession number L19201,Smith-Waterman Score=41.
atgaagttccacaggaatgccgggtgtgctccggtgccccagcggaattggaagggccaattccgcagtgcaatcgccaccgccaatcatttttgtggcgatatccagcgcaataccggtcacgataattactgccacacccgacaggatccccagcaaaccagtgtgggctatcacagtcaaatcaatggtattgcccagcgcgaaggcaaagaatggaatcagcgtttgcaccgctttgctgaaaaattctcgcaattcagggtcaaggttcctcagggcaaagcccaccaggaacgcgccagcgttgaaagtccggcaaagaatccaacttcaacaccatgttccggaataatacgcgaggcaattgccgcaaccacccacgcgacggcaattttagttaccaccagcgtaccggatttacgcagtaccgatgccgtctcaattaattggggcatccatttattactcaaccgtaaccgattttgccaggttacgcggctgcaggcatgcaagctttggcgctatgtggtggaagaagatccgggcgttaaatcggtgcgcaatatctacgactactataagcaacaccactatgaaaccattgtgatgggcgcgagcttccgtcgcaccgaacaaatcctcgccttaaccggctgcgatcgactgactatcgcaccgaatttactgaaggagctgcaggaaaaagtttcgccagtggtacgtaaattaatcccaccttctcagacgttcccacgcccagctcccatgagcgaagcggagttccgttgggagcacaatcagtatggcacgtcggtagagccactgtctcaacgcgtgggtgccgagctcaggtcgtatcaatgctccggggatagtgtcttacatatccacgagcaaggactaagagtcagtgattctgtaaacccaagagcgcactatgctataaacagcctcgcattgggcgatgtgaaaggcattaaagcatatggcaatgcaggttatatccgcatgtatagcggtcacgcaccagaacgtcaggtcattgacaatgttcccgctcccctaagtgaagtggcgcaggccgatgatgttaacgccatcgaccaagcgattagaaacgtagacaaacaaactcaggatttcgccgctcgccgcatggaccagtcggttcgtcgtgcgttgaaaggccattccgtggacgaggatctctgccctgatggcgctgttctggaagctaatagcggtgaaaccattctcgacgcagctctgcgtaacggtatcgagattgaacacgcctgtgaaaaatcctgtgcttgcaccacctgccactgcatcgttcgtgaaggttttgactcactgccggaaagctcagagcaggaagacgacatgctggacaaagcctggggactggagccggaaagccgtttaagctgccaggcgcgcgttaccgacgaagatttagtagtcgaaatcccgcgttacactatcaaccatgcgc

SEQ ID NO: 27792 - DNA, 1222 bp, Homo sapiens
  SIMILAR (1222)..(611): 961254mologous to Escherichia coli Tyrosine aminotransferase (EC 2.6.1.5) (L-tyrosine:2-oxoglutarate aminotransferase) (TAT),accession number D90783,Smith-Waterman Score=1015.
agctcagggccagcaggccagcgtctgtgaccggggtctcgcacaggttcagcacctggagcatggtgaggtgttccgacaggagccgaaggccagcgtctccaaactgtagagcacagaaactctcagccctctcccggccactcctggggaagtgactctgagggcagggcatccatttattactcaaccgtaaccgattttgccaggttacgcggctgcaggcatgcaagctttggcgcgacggaactacagacgcgacactgacccgtgggtccaagccgcggaccatcgcgagcagcacacgggtcgcggtcacatcagacgactcgactagacgtaagactgataaggtgataaaactggaagactgagcaactcgcctctcggcacgaacccgagtggcgatgccatagacgtaccacaaatcagcgacgtaaaaacgaataggctcaatctttgaggtagttgagaaggccccctgaaccggcaaggccccagcaaggccccagcgtgtcaccgcccggcagacctcggggcatccgcacaatcttggactcctggaggcccatacatagcatccccccgcccagtccctcgggaccggtggaaggctactcatcactgcaacgtgaattttacggacatgttttccggcggcgacccaaccaatccgaaaaccaggcaccagacatttcgaaaacgaagagcaatgcaaaacgccatcgtggcgatcccacgctttcgcaggcagcggtttttcccgtccaaaataaagttcgctgtaaacgtcatcttcaatcagcgttacgttgtactgattgagcaacgccaccagttgtgcttttttttgcggcgttaaggtaaatccgagtggattctggctattagtcatcagccagcacgctttcaccggatactcctgcaacgccagttccagcgcctgaagatctatcccttctttaacatccgtcgccaccgataacgccttcagccgtagccgctccagcgcctgcaacgcaccgtagaaacaaggattctctactatcacccaatcgcccggttcagttaccgcttgcaaactgaggtttaatgcctctaacgccccggcagtaatgacaatttcatcaggagaaatggtgatgccctgtaaggcatagcgacgagcaatagcctgacgcagttctgcgtttcctggcggtaagttttcaatcacgctcat

SEQ ID NO: 27793 - DNA, 3678 bp, Homo sapiens
  SIMILAR (1060)..(1941): 941254mologous to Escherichia coli fixC protein homolog(PIR:S14072),accession number D10483,Smith-Waterman Score= 1387.
  misc_feature (1)...(3678): n = a,t,c or g
atgaagcatgccgccacgtctttccccgaaagggaagataagcccggacaagctattcctggtaaatcggctaagaatcaggaactaggatgtcgcgcactgaagcggagctttcccagggccgataacgcctcgttgtactacaatgagtccctgatcggccttttctgccaaccctactgtactgtgaagctcttgatctattctgtagatgtctctctcacaggagtgtcaggaagcaccaatggaatacgactgccaagcaatcgacaggccttttgtataacaggccatttcttcgctgcgacgatcgttgctctatccactcgcagtgaatgcaccgatggattgtctcatcggatatactcnaatgcagactgcgctacggaccacggtatctccacgagcctggataatgcaggagcacgtcgagccgcgaactgcatattcaatcgtgacgttagcatctacttcattagagcatctcccaaggcttacactactagtatgcatttccgtgcatccgatatgtttgtgctgggaatttcgctgacacaggatcaacacatctacactacaatggaccacagcttaatgcaaccattgatgtatcgaatctcgagtctcggctacccaccgtatacttactacgaagtttattactctatgtcgggtgcggagaaagaggtaatgaaatgtgccccgcttacgcagggcatccatttattactcaaccgtaaccgattttgccaggttacgcggctgcaggcatgcaagctttggcgctctatgtcgggtgcggagaaagaggtaatgaaatgtgccccgcttacgcagggcatccatttattactcaaccgtaaccgattttgccaggttacgcggctgcaggcatgcaagctttggcgccagatcctgactgaagagcagtatctgacgcgctggaagagttcggcagacgcgatgaaagaagcgggcatcaatgttgattacgttctggaattcgacgtaccggacgaactgatcggatggagcacgaacgctatgtcgggagctcttatgtccgaagatatctttgacgccatcatcgtcggtgcagggcttgccggttcggttgccgcactggtgctcgcccgcgaaggtgcgcaagtgttagttatcgagcgtggcaattccgcaggtgccaagaacgtcaccggcgggcgtctctatgcccacagtctggaacacattattcctggtttcgccgactccgcccccgtagaacgcctgatcacccatgaaaaactcgcgtttatgacggaaaagtcagcgatgactatggactactgcaatggtgacgaaacctcgccatcccagcgttcttactccgttttgcgcagtaaatttgatgcctggctgatggagcaggccgaagaagcgggcgcgcagttaattaccgggatccgcgtcgataacctcgtacagcgcgatggcaaagtcgtcggtgtagaagccgatggcgatgtgattgaagcgaaaacggtgatccttgctgatggggtgaactccatccttgccgaaaaattggggatggcaaaacgcgtcaaaccgacggatgtggcggttggcgtgaaggaactgatcgagttaccgaagtcggttattgaagaccgttttcagttgcagggtaatcagggggcggcttgcctgtttgcgggatcacccaccgatggcctgatgggcggcggcttcctttataccaatgaaaacaccctgtcgctggggctggtttgtggtttgcatcatctgcatgacgcgaaaaaatcggtgccgcaaatgctggaagatttcaaacagcatccggccgtttgcaccgctgatcgcgggcggcaagctggtggaatattccgctcactgccggaagcaggcatcaacatgctgccggagttggttggtgatctgcacgagcgcagccttatctttgttgccagcggtccggccgggaactcaaaggagactgccagtgataaactggaggaagccctaccaaccaaaaactgggaagtaccaggagccaattggaacacccctgggaatggaataccaagtgtaccagagaagttgaagggaatgttaagtgccccgaactaccgccggatggtcctgcctgcaccgctacaaatattgttactacaaaacgccaaaggcggagagttattaggtgccgcaggtgggcaaatagcgtttaacctcggtagcgccgtcggcgcatattgcggaggtatgatgctgacgctggggctggcatataattacgtggcgctgcctgccgccctgctttcgtttgctgcgatgtcgtcgttgctgctgtatggtcgctataagcgccagcaagcggcggatactccggtgctggcgaaaccactggggcagctcgacaatgcgcccttccggtgtgaaaacgtaaatctcatccgggaagagatcgccgatgctcaggcagagattgcagtaagcatgcagctgctgcctacttaccaatatgaatacgatgctcccgtacgggtaatccccctgaccagtgaaaccgtcagccacaccacctgccgttacgatgtacttgaccggctgatacaggaaaccggctttgacgtccgcacacagcgttatcaccacgacctgaccggcaaacttatccgcagcgaggatgagggtctggtcacccactggcactatgacgaagcagaccgcctcacgcaccgcaccgtgaagggtgaaaccgcagagcggtggcagtatgacgaacgtggctggctgacagacatcagccatatcagcgaagggcaccgggtggcggtgcattacaggtatgatgagaaaggccggctgaccggtgagcgtcagacggtgcatcacccgcagacggaagcactgctctggcagcatgagaccagacatgcgtacaacgcgcaggggctggcgaaccgctgtataccggacagcctgcccgccgtggaatggctgacctacggcagcggttacctggcaggcatgaaactcggcgacacaccgctggtggagtacacccgcgaccgcctgcaccgggaaacgctgcgcagcttcggccgttatgaactcaccaccgcttatacccctgccgggcagttacagagccagcacctgaacagcctgctgtctgaccgcgattacacctggaacgacaacggcgaactcatccgcatcagcagcccgcgccagacccggagttacagctacagcaccaccggcagactgaccggcgttcacaccaccggtactgagctcgagttattcttcgatattttgacgttttgcctgatgtggtgggtattccatgccaacacgccggaaacgcaaacgctgttccagtcgggatggtttgtggtgggcttactgtcgcaaacgctgattgtgcatatgatccgcacccgccgtgtgccgtttattcagagctgtgcatcgtggccgttaatgatcatgaccgtgatcgtgatgattgtcgggatcgcattgccgttttcaccgctggccagttatctgcaattacaggcgctgccgttaagctatttcccgtggctggttgcgattctggcagggtatatgacattaacccagttggtgaaagggttctatagccgtcgttacggctggcaataa

SEQ ID NO: 27794 - DNA, 492 bp, Homo sapiens
  SIMILAR (360)..(1): 991254mologous to Escherichia coli HisP-like nucleotide binding protein (phnK),accession number J05260,Smith-Waterman Score =601.
cagcagctgtgtatacggatgatgcgggtcgtcgagcacgcggtcggttaacccactctccaccacttgcccctgcttcatcaccagcaaacggtccgccagcaggcgggcgacgcctaaatcatgggtgacaatcaccaccgcgaggttcagctccaccaccaggccgcgcagcaggtcgagcaggcgggcctgcaccgacacatccagcccgccggtcggttcatccataaacaccagcttcggatgcgtcaccaggttgcgggcaatctgcaaacgctgctgcataccgccggaaaaggtggtcggcaggtcgtcgatccggttggcgggaatctccacctcttccagccacttccggggccgcccattggtcaagtcctcacctttggagtcgcgccaaagcttgcatgcctgcagccgcgtaacctggcaaaatcggttacggttgagtaataaatggatgccctgcgtaagcggggcacatttcat

SEQ ID NO: 27795 - DNA, 560 bp, Homo sapiens
  SIMILAR (3)..(239): 681254mologous to Homo sapiens transcription initiation factor IA protein,accession number AJ272050,Smith-Waterman Score= 251.
ccccaagaaaaactgttcagtttggtggaactgtgacagaagtcttgctgaagtacaaaacgggtgaaacaaatgactttgagttgttgaagaaccagctgttagatccagccataagggatgacccagatcatcaactggctgctagaattccgttcttctgtcatgtacttgaccaaaagactttgagccaacttatcagtattatattgagattgccttggttgaatagaagtcaaaacagtagtggaagagtatttggcttttcttggtaatcttgtatcagcatagactgttttcctcagaccgtgtctcagcatgattgcttccccattttgtgcctccccgagtgatcattaaggaaggcgatgtagatgtttcagattctgatgatgaagatgataatcttcctgcaaattttgacacatatcacagagccttgcaaataatagcaagatatgtaccatcatgagtatacttttccttattttgaatgtttaattctcaagaaaattgtaatcaattagtaaaaattataaaatgttaatagtattaaaaaa

SEQ ID NO: 27796 - DNA, 2991 bp, Homo sapiens; identical to SEQ ID NO: 9464
  SIMILAR (487)..(888): 761254mologous to Homo sapiens transcription initiation factor IA protein,accession number AJ272050,Smith-Waterman Score= 485.

SEQ ID NO: 27797 - DNA, 669 bp, Homo sapiens
  SIMILAR (361)..(420): 561254mologous to Homo sapiens acetylcholinesterase,accession number M76539,Smith-Waterman Score=65.
atggcggcgaccctctatacagattctgatagggctaaaattattgatggaggtgctttctacctaggagatcagcgttcacacctccagttgctggaaaccgaggccacacgaaaagaagccatgagagtgaccagctctggtgacagccggccaggtcagcctgagagcgacagccgaccccaccacctgccaggtgctgccactcacgcgggcctggagcccccatttgtctgtgtcaccggggctgaggctccctcctgcaaggccactactgtgactctgagcagcggttcttctcatgaatgtgatagctcggtcagctctaagactgcaacctgcagggacttcatggggcaaccctgggggcacgcaagcatcccacccactcccaaccccccacctccagccgtcgtgcccggcatcttttcccagcatgagaacccgttggcttttctcttttcccgccttgccatgaaggacctgctgccaggattcgagcctcagaccttggacaggtctcgggccagcctcagccacgttctgcgtgcccggccatcagggaggaaggatgttggagtgcggatccatgcggacaccctgtttggggacctgggtgtcggggcagcagcaggagtgactgggtgcacgtgtgcctttggtgtctga

SEQ ID NO: 27798 - DNA, 933 bp, Homo sapiens
  SIMILAR (298)..(474): 381254mologous to Homo sapiens envelope protein,accession number AF164612,Smith-Waterman Score=89.
gatgaatcttaaagcaacactccattggaggagctgctcccttccccgttcagtgctgtaattgtctgaatatttatttctcggcattcactgcagaacaagctgcaagtggtgactcggacgtgatcaagtggtgactcggacatgatcaagtggtgactccgacgtgattgccttgaagttatgcatggagtaggatgactcaccaatcttcggggaataccggactagagtggatccccataaaatgagtgaagccataatatgagttagagactactgaaaaagcccctcctgatgatgaaggacctgtcattggagaatcgaccaaaactgacagtgataacttggaaggcacctgacattacctggggacagctaaagaaactggaccaacagggaactatctggcttgcatctatgggagcccctgaaactgcagagaaccagtttcttatgtatctgatggtaattgggggagcttctgagaaggagtatctttactatcagcccaaaagggatgctaagcctgcaaacttgacttttatttctgctgttaccagtaatcttactgaggtttctaatgaaattatacaaatgcctgatcttctgatatgccatctgagaaaagactggcgacataagtttgaggctgtccagtggtccccatgcagacaacctgtgccgcatcaaggacctctgtttgataatggcaccttacttgactggggaccccatggatatctcatgtctgcaaatcagactattggatttgggactccatccaatagttccatcacctggcatctgcaaatggctctgtgctgccactcaaccaactatgaccagggaagaatgatagaagcttactttgcattggataatccgcatgttctaagaattaaagaagggggaaatgtgaggggtgtatga

SEQ ID NO: 27799 - DNA, 321 bp, Homo sapiens
  SIMILAR (7)..(207): 401254mologous to Homo sapiens bcl-3 protein,accession number M31731,Smith-Waterman Score=76.
  misc_feature (1)...(321): n = a,t,c or g
gcccttcccacaatggcagcagcggcgggggctatggcgccagtaagaagaaaaaagcgtccgcttccagctttgcgcaggccaactacacagacccccagagcaaactgcggttcagcaccattgaagagttttcctacattcggaggctgccctctgacgtcgtcaccggctacctggccctnaggaaggccacgagcatcgttccctgagccccagaaagggagatgaagtgggaaagctgtttcaaaaacagactttgggactcatgatttttgtttcacggaaacaaacttcgttctgctgttcaattttgaaaat

SEQ ID NO: 27800 - DNA, 422 bp, Homo sapiens
  SIMILAR (375)..(97): 341254mologous to Araneus diadematus fibroin-4,accession number U47856,Smith-Waterman Score=93.
gcagggtgctgtaaccccatgtgtccaaacgaagggaaagagtagtcattcactccgcggggcagcgtctttcaaccccaacggagaccgcacgcgcagcgccccacattacgcacgcgccctggctcggctccgccccgccaagtcccgtttcgcgacgcgcacgcgcagcctgggagcgcgactgcgtacctgcgcaaagctggaagcggacgcttttttcttcttactggcgccatagcccccgccgctgctgccattgtgggaagggctggccggcctcttcttgctgttccggactattccgggagtggaagtggtggccacaattggaatttgcgccgccatcgcactccgagtcttcccctggtccccccacctttttaacagcgcggaccttggaacttcctttccgcacgaaa

SEQ ID NO: 27801 - DNA, 451 bp, Homo sapiens
  SIMILAR (359)..(412): 381254mologous to Homo sapiens Human gene 71-encoded protein fragment, SEQ ID NO:432,accession number Y86517,Smith-Waterman Score=38.
gcctcgagatccctagcaagggagaggaagttccaaggcccgcgctgggaaaaaggtggggggaccaggggaagactcggagtgcgatggcggcgcaaattccaattgtggccaccacttccactcccggaatagtccggaacagcaagaagaggccggccagcccttcccacaatggcagcagcggcgggggctatggcgccagtaagaagaaaaaagcgtccgcttccagctttgcgcagggtatcagcatggaagccatgagtgagaataaaatggtgccctctgagtttagcacaggacctgtggaaaaagctgccaaacctttgccatttaaggatcccaactttgtgcactctggccacggtggcgcagtagctggcaagaagaacagaacctggaagaacctgaaacaaatcctcgcttctgaaagggcattgccgtggcaact

SEQ ID NO: 27802 - DNA, 1232 bp, Homo sapiens
  SIMILAR (196)..(384): 401254mologous to Saccharomyces cerevisiae Yel044wp,accession number U18779,Smith-Waterman Score=121.
aaaaaggtggggggaccaggggaagactcggagtgcgatggcggcgcaaattccaattgtggccaccacttccactcccggaatagtccggaacagcaagaagaggccggccagcccttcccacaatggcagcagcggcgggggctatggcgccagtaagaagaaaaaagcgtccgcttccagctttgcgcagacttcagtattgatgctcctccatcctttaagccagctaagaagtattctgatgtttcaggtctgcttgccaactacacagacccccagagcaaactgcggttcagcaccattgaagagttttcctacattcggaggctgccctctgacgtcgtcaccggctacctggccctgaggaaggccacgagcattcgttccctgagccccagaaagggagatgaagtggaaagctgtttcaaaaacaggacctctggactcatgattttgtttcacggaaacaaactcgttctgctgtcaatctgaaaatgccagttgctgtgccttggaaagaatgtttggctttaatccaagggtttttttttcagttaacaaagtctgctcagaagatggagcagacatatgactttagttcagctttccccatctatggggatgtatgtagaggaccctttgggaggcagaatagtggccacctcaaagatgcctattcccgagtccctggaacctgtggatatgtcatgttacatggcaaaagggactttgcagttgtgattaatttatgtagtatcaagtgcaatgaaaaaatccttggtgtagatgagtggaactctcgtttgctgctggtgggaagtcagggcatcaatatcccagagaaagccccagcagcctttgccaaaggaagtgtggcattggtgagggaaacaggagctgcaagtaccaggaaggaagctgaagaggaagtgcaagagagggcgcacactacggcagggtgttgttgtgacctggactggctcagcattgggtcacaccaggtcttggcaatcaggagtcaaaaaggacgctctatgctcaggttaaagagaaggaaagaaattcaaaagggggagccctttgaagagttgtcagtgactggagagggatgtggcctctcgctgctggggcacactgagaggtggaggagggaaagcaaagaggactgcccacactcctgcctccacgctgtgatgagtgccctgtgcagggaagatggaaagagttag

SEQ ID NO: 27803 - DNA, 2409 bp, Homo sapiens; identical to SEQ ID NO: 15935
  SIMILAR (607)..(1209): 1001254mologous to Escherichia coli K12 putative ligase,accession number AE000154,Smith-Waterman Score=1049.

SEQ ID NO: 27804 - DNA, 1070 bp, Homo sapiens
  SIMILAR (600)..(1067): 621254mologous to Escherichia coli K12 bacteriophage lambda lysozyme homolog,accession number AE000161,Smith-Waterman Score= 483.
taaaactagctgtgaatttagaagatgattcataagctctgtgcattccatggttatgactggtggaaggcagagattcttacatcagtcttctttacattttagcagcaaggaaaataacaggttagaggagtactttgtatctaccctcccttgcttccggcaaattaatgaaagccaaataaattgcaacactttgatatctgtgtctctgtaacgttaaagacagccctgggctgcgagagatgaacgtggtagagcacctccgggccagcttcccagtggagcaatggtattggagaggtggacaacatggggaggctgagggagctagatcttcgaaggcagagaacaacacgcgagaaagaagctccggaaactatcaatcaatacaaggctgccgttcggcggccttttttattcctagcaacagcactcgcacaaagcgaggtgagagtatgtatcgcatggacaaactaaccactggtgctgcctatggcgcttcagccgggagcatcctaaacggcatgttgaatgcctacagccccgagcagtggaacgctatcggcgtgctgacaaccgccgcagcaggagccgagatgaacccaacgttgaggaataagctggtgggtgccattgttggcggatcaggggcaatcactattgctgcagtaatgctgggcaatgcggatggactcgaaggtcggcgttattacgcctatcaggatgtggtcggcgtctggaccgtttgcgatgggcacactggtaccgacattcgccgcggtcaccgatataccgacaaagagtgtgacaacctgcttaaggcagatctgcgaaaggtggcaagcgccatcgacccgctgatcaaggttcgcatccctgagccaacccgcgccgcgctttactccttcacctataacgttggctctggtgcttttgccagctcgacgctgctgaagaagctgaactccggtgatgttccgggtgcgtgtaaagaactgcagcgctggacttatgctggcggcaaagcagtgaaggggctgatcacccggcgcgagattgagcgttga

SEQ ID NO: 27805 - DNA, 867 bp, Homo sapiens
  SIMILAR (504)..(478): 771254mologous to Arabidopsis thaliana F24O1.6,accession number AC003113,Smith-Waterman Score=43.
  misc_feature (1)...(867): n = a,t,c or g
attgttgatggtaaatggaaaaacttttgagtcagagcttgagctcttgggacaaaaaggggaaaagaagagggatgaaggggaaggggccccaattcctctttgacttgattnctaaagcttcatagggggattcccaacttcacagcttagcccttcttgtactaaggaacccaggacgaatcttgacctnccccagggaacctagaccttgggaaggcttgaacttgctatttgagggtcaagtctacttcccctgaaggtggagtgctggatattttgatggggacaaggagggaccaatagatcaaccttcagcaaaggctggtaaggcctgggcaaggtttccaccagggatggatcttccctaaggggtggggggggcttcccagttcctagaaaatggcggtgcggcgcagactgcctccctcctcttcattgtagcttgatcctgcgcagtgaccgttcacggaaagagtcaggcctgggaggggccggaccggggcacaaatgctggaggtttcagagactggctggcgctggcgaaggcaggtctgccagtgacgtatttgtcctgtgggtcctgggctctttcgtggcacgcagggcactctccttcctgggatgggagaatggaattcttctaggcgaggacgggcagcagcggccctgggaaggcttccgtggaaacttccaaaaccaccttgccaggtaagtgaaagtgcgctccgttctctagccacatcctaggccaagtaagttcttcttcattctttcagcagtcctgatcttcttggggagcacccctaaatcagcctgtcaagaaggaaggcaggctacgggtatcttctcaggaacagatgaagg

SEQ ID NO: 27806 - DNA, 741 bp, Homo sapiens
  SIMILAR (335)..(547): 331254mologous to Homo sapiens This CDS feature is included to show the translation of the corresponding V_region. Presently translation qualifiers on V_region features are illegal,accession number L40513,Smith-Waterman Score=78.
atgcctgaggaattccgagtgtccggtgaatttggcacacttggcccttcatcacgccagtgtggtatcattaactgtaatgatgccacgctgctccagcctccaccttgcagtgtggccacagacacagttggatggcagttggaagagtactggccctgggaagacccagctttgagcctcaggttgtgtctaatcatctctctgtccttgggccagtcaactcacctgttcgtgctgccacagagacagagtgcttggaatacagtaggcactcaatatgtgtattggttgaatgacaatgaatggatgactaagtgtatcctgaatgatctgtactggctcaaggaggggttgtgtgggagccatcaatcacgacctggccctccacctaggaatcataccttcatcccccatactcataaggtgtggagcttcccgaccggctggggagggaatgtcctgcgggagccgccgaggaccctctttagcctcttccctggcttggctgcagctgcagtctggtactcgcccattctgctcttcttcacctccgtattttctctctcacggaagaagaattccattctcccatcccaggaaggagagtgccctgcgtgccacgaaagagcccaggacccacaggacaaatacgtcactggcagacctgccttcgccagcgccagcccatctctgaaacctccagcatttgtgccccggtccggcccctcccaggcctga

SEQ ID NO: 27807 - DNA, 3943 bp, Homo sapiens
  SIMILAR (189)..(1502): 1001254mologous to Homo sapiens PACAP type-3/VIP type-2 receptor,accession number U18810,Smith-Waterman Score=2343.
gtgcattgagcgcgctccagctgccgggacggagggggcggcccccgcgctcggggcgctcggctacagctgcggggcccgaggtctccgcgcactcgctcccggcccatgctggaggcggcggaaccgcggggacctaggacggaggcggcgggcgctggggcggcccccggcacgctgagctcgggatgcggacgctgctgcctcccgcgctgctgacctgctggctgctcgcccccgtgaacagcattcacccagaatgccgatttcatctggaaatacaggaggaagaaacaaaatgtgcagagcttctgaggtctcaaacagaaaaacacaaagcctgcagtggcgtctgggacaacatcacgtgctggcggcctgctaatgtgggagagaccgtcacggtgccctgcccaaaagtcttcagcaatttttacagcaaagcaggaaacataagcaaaaactgtacgagtgatggatggtcagagacgttcccagatttcgtcgatgcctgtggctatagcgacccggaggatgagagcaagatcacgttttatattctggtgaaggccatttataccctgggctacagtgtctctctgatgtctcttgcaacaggaagcataattctgtgcctcttcaggaagctgcactgcaccaggaattacatccacctgaacctgttcctgtccttcatcctgagagccatctcagtgctggtcaaggacgacgttctctactccagctctggcacgttgcactgccctgaccagccatcctcctgggtgggctgcaagctgagcctggtcttcctgcagtactgcatcatggccaacttcttctggctgctggtggaggggctctacctccacaccctcctggtggccatgctcccccctagaaggtgcttcctggcctacctcctgatcggatggggcctccccaccgtctgcatcggtgcatggactgcggccaggctctacttagaagacaccggttgctgggatacaaacgaccacagtgtgccctggtgggtcatacgaataccgattttaatttccatcatcgtcaattttgtccttttcattagtattatacgaattttgctgcagaagttaacatccccagatgtcggcggcaacgaccagtctcagtacaagaggctggccaagtccacgctcctgcttatcccgctgttcggcgtccactacatggtgtttgccgtgtttcccatcagcatctcctccaaataccagatactgtttgagctgtgcctcgggtcgttccagggcctggtggtggccgtcctctactgtttcctgaacagtgaggtgcagtgcgagctgaagcgaaaatggcgaagccggtgcccgaccccgtccgcgagccgggattacagggtctgcggttcctccttctcccacaacggctcggagggcgccctgcagttccaccgcgcgtcccgagcccagtccttcctccaaacggagacctcggtcatctagccccacccctgcctgtcggacgcggcgggaggcccacggttcggggcttctgcggggctgagacgccggcttcctccttccagatgcccgagcaccgtgtcgggctggtcagcgcggtcctgactccgtcaagctggttgtccactaaaccccatacctggaattggagtcgtgttgtcattgactcaacttaaactccagcatttagataatcttgtgcaaaatgtgtttcagccgtatagtggatccacttttttttttttttttttttgagacggagtcttgctctgtcgcccaggctggagtgcagtggcctgatctctgctccctgcaagctccgcctcccgggttcacgccattctcctgcctcagcctcccatagctgggactacaggcgcccgccaacacgcctggctaattttttgtatttttagtagagacagggtttcaccatgttagccaggatggtctcgatctcctgacctcgtgatgggcccgcctcggcctcccaaagtgctgggattaaggcgtgagccactgcgcccggcccaagagaataggggagccaaggaggaaatgtggaaacgcagttgtgtggcccagcacgagcctgggcgaccaccgggtgacatccgtcccacatcagggcggcctcccaggtcccataagggtagccccctcatctgcaggacagagggaagccagtcagggcccccccggacgttaggaccaggagaaatcaacaggagggcagcccgtcctctctcttggggcgcccacccggcccggctgagccctgccccacccaactccacagggctgttttgcctccccacggaaggcgggctgaggagacaaccagatcaggagagcaaggtcatgaaggaggggacctctccacacaggtgttccgtgggaccctcagcagctctggctctgcctcaggaggtcacctgccgccctgtgggagccgcagagcctgacgctcagccccaggccagctgcggccaggcctgcgggcccctggtgatggggttacgtggggtgcgggatacagctgagtgggaaccggaaacctattctctttttaacaaaaataatcttaggataagaattattttaacaacatataaaactgtttcaagccctcctccccagagctggcgctcagcagccctagcggctgctccttcaggcgaagggtggtttgcagatgtggggagggtgtctggggacgttgctgagctggctgcagaagggtggggatatcagggcacagtctccatgtgtgtgccaagccctggcccccacagcgctcgatggacctcagcaagctgcccagccctggcccaggtgccccgactgtgggactcagttgttctgagcacatttgactccacttttcctttaaaaatgaatgtcttgttcctgtgcattggtggcatcacagaccccagctggggcgcgatgtcaaaggtcgggacagctgtgccgggaggcagccacagggaagctcacacatcctgtcagtgtcaccttggtttgcaaaacccatatccccggtaaaatgaggccggacagaggggctgttaggacagcaaagcagcagtgtccagagacccctcaatccccaaaggtccgcaccctgtcctgcacaccctgggccacgccggccacacccctctgctgcaacaagctcatccctggacttctgggagaatgaacccgaggttggtttggggagacaggtgaggcggttggatctacagaacaacccaccatttctgggggccgcagaggatccatcacagacggatactggggagtaaacggcccaggccaggtgcccaggaaaggacggctgagcatgtggagcgagagggaggcaggtggacgctgcagaccccaggttcagtgcggcccctcggctgttcctcccctgtagggtttggacagacccacccccagccttgcccagctttcaaaggacaaaagggagcatcccccacctactctcaggtttttgaggaaacaaagatttgtggtaactgaaggtgttgggtcagtggccaggtgccgacactgagctgtgacccagaggggacgctgaggaagtgggcgtgagtggacatgtcaggtggttaccaggcactggttgttgatggtcggtggttgggtgtgggcagtcatcagtcatcaggtgtgctcaggggacaatctcccctcaaccgcacatgtgccactgttcagcggagctgactggtttctcctggtagagggccggctgtatcctgacagatgcctggtgagcaggggaagcaggacccagtggtcaacaggtgtctttaactgtcattgtgtgtggaatgtcgcagactcctccacgtggcgggaatgagctgtgtaaatacttcaataaagcctgatctcacatctgc

SEQ ID NO: 27808 - DNA, 1776 bp, Homo sapiens
  SIMILAR (133)..(321): 611254mologous to Homo sapiens Human PACAP/VIP R-2B receptor amino acid sequence,accession number W80310,Smith-Waterman Score= 214.
atgagcctcctcctcacggtcaggatccggtcccaagtaggtcccctgttgccaggaggttgcagccagtgccacgtgtgcgaccggcactgtggcagcgcttccggctgcgccttcggctgcacttccggctgctacctcagcctcggcgccctgacgccctcgagtccgcttcctcacatcctgacagcgtctagctctgctccctcaccctgcagtggcgtctgggacaacatcacgtgctggcggcctgccaatgtgggagagaccgtcacggtgccctgcccaaaagtcttcagcaatttttacagcaaagcaggttgccacctcagtcatttcctgtccttccacatctgccccatgtgtctcaggagtgagaagtcagaaaggataaagaaccttggcaagggtgctggccaggaggagggagggtgctgtcgggaactggagcaggcgggacacctggtcactgtcgtgctgttgggaactggagcagtggggcatctggtcaccgtcagtggcgagggtgctggccgggaggagggagggtgctgcccagaactggagcaggcggggtacccggtcactgtcggtggaaacataagcaaaaactgtacgagtgacggatggtcagagacgttcccagatttcgtcgatgcctgtggctacagcgacccggaggatgagagcaagacctccatccttgccggcagccctggcagcaccgtgtgggtggcgggcaccatagcaacctgcagccagaggaacagtcggaaccgcctcatcggatcttctgagacccgttcactatcacaggaacagttggaaccgcctcgtcggatctcgaacagtcggaactgcctcgtcggatctcgtgagactcattcactaccacaggaacagtcggaaccacctcgtcggatctcgaacagtgggaaccgcctcgtcggatctcgaacagtcggaaccgcctcgtcggatctcgtgagactcattcactaccacaggaacagtcggaaccgcctcgtcggatctcgtgagacccgttcactaccacaggaacagtcgggggaacggcctcgtcggatctcgaacagtcggaaccgcctcgtcggatctcgtgagacccgttcactaccacaggaacggtcggaaccgcctcgtcggatctcgaacagtcgggggaaccgcctcatcggatctcgtgagacccgttcactatcacaggaacagtcgggggaacggcctcgtcggatctcgaacagtcggaaccgcctcgtcggatctcgtgagacccgttcactaccacaggaacagtcgggggaacggccttgtcggatctcgaacagtcggaaccgcctcatcggatctcgtgagacccgttcactaccacaggaacagtcgggggaacggccttgtcggatctcgaacagtcggaaccgcctcatcggatctcgcccagcaggtgccaagctcaatgccagccacgagggcattggctcatcgagtgatgggaacggggacagcaaggcggccacagagagggtggtctcagccatggacacagtacggcggaagcatcccgagtgcagtgttctcatcctgaatcttgaaacagcacctccgtttttagaagaagcttccatgggccatgatgcccttggaaaagattgcagtggcatcttggagaacatttcccacaaaaataggttatggtttctgacggtgtctaaaacatttgagaagcaaaaggaagctccagccttcgacttctaa

SEQ ID NO: 27809 - DNA, 524 bp, Homo sapiens
  SIMILAR (188)..(523): 651254mologous to Homo sapiens hT41,accession number AF069291,Smith-Waterman Score=386.
atccccacagggtaatgggtgtcccgatctcgcgggggactctgtgatccgtgttcccctgaccctcctagtgcacaacttggccgggctcactgggctcctgcaccactgcctgtcaggtccgctgccagccccaagccccccaccagccatgagctcctccagaaaggaccacctcggcgccagcagctcagagcccctcccggtcatcattgtgggtaacggcccctctggtatctgcctgtcctacctgctctccggctacacaccctacacgaagccagatgccatccacccacaccccctgctgcagaggaagctcaccgaggccccgggggtctccatcctggaccaggacctggactacctgtccgaaggcctcgaaggccgatcccaaagccccgtggccctgctctttgatgcccttctacgcccagacacagactttgggggaaacatgaagtcggtcctcacctggaagcaccggaaggagcacgccatcccccacgtggttctgggccgga

SEQ ID NO: 27810 - DNA, 1806 bp, Homo sapiens
  SIMILAR (814)..(1566): 941254mologous to Escherichia coli CitG homolog,accession number U82598,Smith-Waterman Score=1223.
atgggcaaggacttcatgtctaaaacaccaaaagcaatggcaacaaaagccaaaattgacaaatgggatctaattaaactaaagagcttctgcacagcaaaagaaactaccatcagagtgaacagggaacctacaaaatgggagaaaattttcacaacctactcatctgacaaagggctaatatccagaatctacaatgtactcaaacaaatttacaagaaaaaaacaaacaaccccatcaaaaagtgggtgaaggacatgaacagacacttctcaaaagaagacatttatgcagccaaaaaacacatgaaaaaatgctcaccatcactggccatcggggaaatgcaaatcaaaaccacaaaaaaactaatgctgtactacgatgtgattcgcatctgtcatgacagccataaagagcttgaacaaaaactggcggccttcctggggatggaagatgcgattctctactcttcctgctttgatgctaacggtggcctgtttgaaacgcttctgggtgcggaagacgccattatctccgacgcactgaaccacgcgtctattattgatggtgtgcgtctgtgcaaagctaaacgctatcgctatgccaacaacgatatgcaggagctggaggccgcatacagacgatcaaccaggcctttatcgacaaggttatttagcttcaggtcgcgtgtactcaccgagttccgcgtttgtccctgcctcgttcacaccacttggggtggtaacctcatgcggttatccgcgcggagcctgtggcagcgagccgcagtcaatatacccaagctggaaggcataatcgaggagtacccctgctggtcggcgcgccatgctgacgaagtcaatctgtcaccgaatccaggcctcgtggatcgcattaacttcggtgcgcacaaagatatggcgctggaagatttccaccgcagcgcgctggcgattcagggctggctaccccgtttcattgaatttggtgcctgtagtgcggaaatggcaccagaagcggtactccacggattacgcccaattggtatggcttgcgaaggtgatatgttccgcgccactgcgggcgtaaacacgcataaaggcagcattttttctttagggctgctatgtgcggcaattggccgtttgcttcaactcaaccaaccggtaacgccaacaaccgtttgttctacggcggcaagtttctgccgtggcctgaccgatcgcgaactgcgtaccaataattcacaactgacggcaggtcaacggttgtaccaacagcttggccttaccggcgcacgcggtgaagccgaagcgggttatccactggtgatcaatcacgccttgccgcattacctcactctgctggatcaggggttagatcctgaactggcattgctcgataccttgctcctactgatggcgatcaacggcgataccaacgttgcatcgcgcggtggcgaggggggcctgcgctggctacagcgcgaggcgcaaacattattgcaaaaagggggcattcgaacccccgccgatctcgattatctccggcagttcgacagggatacctcgcagggatcctctagagtcgactgtagcgtgtgggagttatgccgggcaggccgaacagccggggttatggctgttgctgccaaaacgaaaaacgccggaaaatggcataaccacataatccggcgtttcgacattaatcctggcgatcgtctttatgatcaaggcggtcgcgctcatcatcctttcgctggtactcaccatcaaaagtattaccgccaccggtcccggcgctaa

SEQ ID NO: 27811 - DNA, 1977 bp, Homo sapiens
  SIMILAR (391)..(840): 961254mologous to Escherichia coli CitG homolog,accession number U82598,Smith-Waterman Score=759.
atgcctatgacagtccatacacaagcggcagtcgtggcaagtggacacaaagtgtggcacctctatgcgctggacggacgctcggtcaagggctattaccaaaacagcgaaagaccacagcttggcgctgcagatgcgctacacgccgtgtacatcctcagtcagcaggacctggactacctgtccgaaggcctcgaaggccgatcccaaagccccgtggccctgctctttgatgcccttctacgcccagacacagactttgggggaaacatgaagtcggtcctcactctgtttccagccctttacatccgttacgccgtcaagacttatgcagactgcccttgtatcaaaaaatcggcgctatacgatgtctgtagtagttgcaggcagataatcgatgagtacgccttgctgggctggcgcgccatgctgactgaagtcaatctgtcaccgaaaccaggcctcgtggatcgcattaactgcggtgcgcacaaagatatggcgctggaagatttccaccgcagcgcgctggcgattcagggctggctaccccgtttcattgaatttggtgcctgtagtgcggaaatggttttaggagtggtactccacggattacgcccaattggtatggcttgcgaaggtgatatgttccgcgccactgcgggcgtaaacacgcataaaggcagcattttttctttagggctgctatgtgcggcaattggccgtttgcttcaactcaaccaaccggtaacgccaacaaccgtttgttctacggcggcaagtttctgccgtggcctgaccgatcgcgaactgcgtaccaataattcacaactgacggcagcgggacccgcaacagcgtttagccccgaattgggccccacttcaaatggcgcccccaggtgtcccgcgtcggccgctcagggcacgagcggggctcagcgctcgcaacccactggaagcagcgaccggcatggcgaatccgttgccgatttatttgtcctacttcggacggccgtgtttccgctcaagtgcccagccgtacgcctcccgtatcacacttaccgcatagcgctgactgaggcactggacaacaacgacaaacacacaacccgcagccagacgcaacaccgcaaacagcgcataagcggaggacatccgcacacagcgcagcaccagaacaccgccacacagacgcaccaccaagaaaacaacaacaaacggaccacaggagccaagaaccacaaagcgaaacgcgcgacaacaacgcaaagaccacacacggaaacacgcgcaacacaaaaagaccaccacagcgcaaacgacgccacgccgaaacccaacacccccacgacccagagcacaataagccaccacaacaaagcgcagaccaggacaggaaacaggactagcccggaaccacaccccgccgcaaccggactcagcaaaccccaaagccccggcacaggcgaaccaccagacccacgggcaacaggcaacgcgcgcaccgaacgggcggcacacagacaacaacacagacggaccccggccgacacaccgcacagaaaaccaccgacacgaaccacggaaccacgggacaaccccgaaccaccaccaccagcacgccgcaaccacgcgacccacaccccaccccagccaaccactagcacacccacgccccacaccacagacaccaaccacccccgggcacccacctcacacctcccacacccccacccgccccaccaacacccgcagcagcacaccaacacacgccacccaccccacgcccccccccgcccccccaccacccccctccacaccacccaccgcacacccaccaccaccacccacacccaccccaccccccaaccacaacgacccccaccgccagcccaccccgcacccagcaccaagcacgagagctccgaccaacacacattcaacgtagaatcaacatcaaataagatagtcaagtga

SEQ ID NO: 27812 - DNA, 508 bp, Homo sapiens
  SIMILAR (477)..(202): 881254mologous to Homo sapiens chromosome 9 open reading frame 6,accession number AF153417,Smith-Waterman Score=429.
ttaagggttaatgtgttcaatttatttttgcaaagtcaccagaaagactgaaaagatgagcatccacctccttttatgggatgggataggtgaggcagcagacagaagtgagggatgctgtgctcgtgaagattccttcctatagaaggaggattaagagtggggaagatgcagtcccaagcttagaggcatcattttcctcttgatgacgtcttctaccttttctagatagataattctccgcttaaatttcccagagaccttgttctgaagtctgctacagttggtactgatctgataggaaatgcttttaattgtttttccactttgaagaactggatgagattctgccaatgtgatgacacatattcggttagagtgctgtagtatacagtggtcctcacaaaattttcctttgacatccggtttgtaccagcgagtgaagtatcgatccacgagcgaaggcaccaccggctccgggcttcgggctcgggaaccacctcgtgcc

SEQ ID NO: 27813 - DNA, 1042 bp, Homo sapiens
  SIMILAR (72)..(551): 881254mologous to Homo sapiens chromosome 9 open reading frame 6,accession number AF153417,Smith-Waterman Score=731.
  misc_feature (1)...(1042): n = a,t,c or g
aataccgcgcccgactatccgggtcgacaatgtcctcccggagggcggcggtggcggcgccggatttcggcatggttaccgagcccgaagccgcggagccggtggtgccttcgctcgtggatcgatacttcactcgctggtacaaaccggatgtcaaaggaaaattttgtgaggaccactgtatactacagcactctaaccgaatatgtgtcatcacattggcagaatctcatccagttcttcaaagtggaaaaacaattaaaagcatttcctatcagatcagtaccaactgtagcagacttcagaacaaggtctctgggaaatttaagcggggggcacagtttctaacagagcttgcacctctctgtaagatttactgctcagatggtgaagaatatactgtgtctagttgtgttagaggacgtttgatggaagtgaatgaaaacatcctccataagccatctattcttcaagaaaagccatcttactgaaggctacattgcagttgtgtttacccaaatttgaagaaagtaaaagcataacagaagggttactgacacaaaaacaatatgaagaagtcatggtgaaacgcattaatgccacaacagctacgtcatgaggattgacatcggaacaaaaagcaaagtgggattcttgttacctggcctaaaccatcagggtactaaaggagaagaaccagtatatgtaaagcatacctaacagccagccatatgcaggggaggcctagtgcttcacttagttttccctctctgtcttcataatgagccttggttcccatttgtctacagcctgccagatctggcctgcccatgtactcacactgttctcttgcatctctctaacaactggcatgcaaggcatgttttttctgattaaaaacaaacaaagctctttgaagaagatttagaaaatacagaagagtttttaagtagccaagtaaaaataatttacccatcatcccataatccaggaagtaaatacatttggcccttggagcaacataggtttggactgcnagggg

SEQ ID NO: 27814 - DNA, 755 bp, Homo sapiens
  SIMILAR (319)..(101): 911254mologous to Homo sapiens Extended human secreted protein sequence, SEQ ID NO. 164,accession number Y35915,Smith- Waterman Score=375.
tcctgcacagctagagatcctttattaaaagcacactgttggtttctgctcagttctttattgattggtgtgccgttttctctggaagcctcttaagagaagaacacagtggcgcaggctgggtggagccgtccccccatggagcacaggcagacagaagtccccgccccagctgtgtggcctcaagccagccttccgctccttgaagctggtctccacacactgctggttccgtcaccccctcccagggaagcaggtctgagcagcttgtcctggctgtgtccatgtcagagcaacggcccaagtctgggtctgggggggaaggtgtcatggagccccctacgattcccagtcgtcctcgtcctcctctgcctgtggctgctgcggtggcggcagaggagggatggagtctgacacgcgggcaaaggctcctccgggcccctcaccagccccaggtcctttcccagagatgcctggagggaaaaggctgagtgagggtggttggtgggaaaccctggttcccccagcccccggagacttaaatacaggaagaaaaaggcaggacagaattacaaggtgctggcccagggcgggcagcggccctgcctcctacccttgcgcctcatgaccagcttgttgaagagatccgacatcaagtgcccaccttggctcgtggctctcactgcaacgggaaagccacagactggggtgaagagttcagtcacatgcgaccggtgactccctgtccgaattcc

SEQ ID NO: 27815 - DNA, 610 bp, Homo sapiens
  SIMILAR (24)..(497): 411254mologous to Homo sapiens ribosomal protein L23a,accession number U43701,Smith-Waterman Score=153.
cggacgcgtgggcttttcacaaaatggcgccgaaagcgaagaacgaagctcctgcccctcctaaagcttgaagccaaagcgaaaggcttttaaagggccaagaaaggcagtttttaaaaggtgtcccacagccaccaaaaagaagaagatcccgcacgttcaccccactttccgggcgggccgaagaccactgcggactccggagacagccccaaatatccctcgggaagagcgctcccctggagaaacaaggcttgaccacctatgcctatccatcaagtttcccgctgacccactgagtcctgcccatgaagaagatagaagacaaccaacacacttgtgttcattgtggatgttaaagccaacaagcaccagattaaacaggctgtgaagaagcttgtatgacatttgatgtggccaaggtcaacacccctggattcggcctgatggagagaagaatggcatatgttccgacttggctcctggattacgatgcctttggatgttgccaacaaaattgggattatctaaacttgagtccagcttgcctaatttctgaatatatatatatatatatatctttttcacccataaaaagaaaaatagaaaa

SEQ ID NO: 27816 - DNA, 407 bp, Homo sapiens
  SIMILAR (85)..(222): 481254mologous to Homo sapiens FLJ00047 protein,accession number AK024455,Smith-Waterman Score=84.
ttttctcattaataatttttattttgataagatgttgaagtgatattttggataatgctaacattttaggtgaaataaaactaatttcacctgtttctttgtaacctttttttttttttgagatggagtctccctctgtcgcccaggctgtgttttctctggtcttcaggtctcctcactgcggcgggatccaggcgcatctgttcaatctctagagagatttgttcaaaatctggacctgaccccggggtagcagttgaggactcagaggtggaatttttgtgggcacccacatggtagtcgatccgctgtcctccggaagacggtcaccctttgggacctggaaatttttttttcaggtggcactcccccctacaagctggctgtccttccgggggagcacacag

SEQ ID NO: 27817 - DNA, 469 bp, Homo sapiens
  SIMILAR (409)..(332): 621254mologous to Mink cell focus-forming virus MCF pol polyprotein,accession number K02727,Smith-Waterman Score=84.
  misc_feature (1)...(469): n = a,t,c or g
gtggaaccaaggctgagtgattaaaggaaagggagagtctaaaaacagggttagtaaaaaccaggttggccactacattccccacttgtgtttttggggaatcaaatcattgattcctcagttataacaagggggttatattgagtcttaagatacataagtttgacagaagctatgcattgttttacaaaattaagnnnnnnnnnnnnnnnnnnnnnnnnnnnnnnnnnnnnnnnnnnnnnnnnnnnnnnnnnnnnnnnnnnnnnnnnnnnnnnnnnnnnnnnnnnnnnnnnnnnnnnnnnnnnnnnnnnnnnnnnnnnnnnnnnnnnnngccatccaccttcagagccgttggcatcgtgatgacggtgtgaggtctcttccaagcaggagggagtccttctctctggaactgaccccggggtcagcagttgaggactcagactcgtgcggaattcctgcagagagg

SEQ ID NO: 27818 - DNA, 1642 bp, Homo sapiens
  SIMILAR (894)..(1034): 821254mologous to Homo sapiens Human secreted protein encoded by gene 78 clone HTEIY30,accession number W74806,Smith-Waterman Score=199.
atgcaccctagtcatacctccaaccagacctcacccgcgtggaatcattttagcaacgtacaaccaatatcaacacccacatgcccgatcatcgctgagttcctgattcgcactcctaatcctcgtgtccctggcgcgcgtacagttggaattgcactgaactgtagcacacccagttggtgtccgctgaagaactgtttagtgtgggagaaaaaaactccacacattggtggcctccaggtgcaaagtgggaagtgtgagtcctcagtcttgggctattcggccacgtgcctgccggacatgggacgctggagggtcagcagcgtggagtcctggccttttgcgtccacgggtgggaaattggccattgccacggcgggaactgggactcaggctgccccccggccgtttctcatccgtccaccggacttcgtcgggcgctcgcactggcgctgatgtagtttcctggacctctgacccgtattgtctccagattaaaggtacgacatttgggagggcccagcgagaaacgtcaccggggagaaacgttaccggtcgagagccggggcccgctgtgtgctcccccggaaggacagccagctttgtaggggggagtgccaccttgaaaaaaaaattttccagggtccccaaagggtgaccgtgcttccggaggacagcggattcgactaccatgtgggttgcccacaaaaattccacctctgagtccttcaacttgctgaccccggggtcagtttccagagagaaggactccctcctgcttggaagagacctcacaccgtcatcacgatgccaacggctctgaaggtggatggcattcctgcgtggattcatcactcccgcatcaaaaaggccaacagagcccaactagaaacatgggtccccagggctgggtcaggccccttaaaactgcacctaagttgggtgaagccattagattaattctttttcttaattttgtaaaacaatgcatagcttctgtcaaacttatgtatcttaagactcaatatagacccccttgttataactgaggaatcaatgatttgattcccccaaaaaacaccaagtgggaatgtagtgtccaacctggtttttactaaccctgtttttagactctcccttttaccttaatcacctagtcttgtttccacctgaatcgactctaccttagctaagagcgcccagatggactccatcttggctctttcaactggcagccgcttccttcaaggacttaacttgtgcaagctgactcccagcacatcccaagaatgcaattaactgataagatactgtggcaagctatatccgcagttcccaggaattcgtcccattaataacgcccgattaataacgcccaaagccccgcgtctatcaccttgtaatagtcttaaagccactgcacctggaactgtttactttcctgtaaccatttgtccttttaacattttttgttagcctactttatttctgtaaaattgttttaactagaccccccctctcctttttaaaccaaagtataaaagcaaatctagccccttccttgggcgcgagagaattttgagcattagccgtctcttggccaccagctaaataaacggattcttcatgtgtctcaaaaaaa

SEQ ID NO: 27819 - DNA, 824 bp, Homo sapiens; identical to SEQ ID NO: 16901
  SIMILAR (531)..(677): 891254mologous to Homo sapiens Similar to transmembrane 4 superfamily member 9,accession number BC002920,Smith-Waterman Score =256.

SEQ ID NO: 27820 - DNA, 2623 bp, Homo sapiens
  SIMILAR (67)..(876): 981254mologous to Homo sapiens Human secreted protein encoded by gene 10 fragment,accession number Y76266,Smith-Waterman Score= 1425.
  misc_feature (1)...(2623): n = a,t,c or g
cttcctcggccgagccgggccgcgccgtcgctgtcgccgccgcgcgcggattctgcttctcagaagatgcgctatgatagatactctaacgccaaggtcagctgctggtacaagtacctccttttcagctacaacatcatcttctggttggctggagttgtcttccttggagtcgggctgtgggcatggagcgaaaagggtgtgctgtccgacctcaccaaagtgacccggatgcatggaatcgaccctgtggtgctggtcctgatggtgggcgtggtgatgttcaccctggggttcgccggctgcgtgggggctctgcgggagaatatctgcttgctcaactttttctgtggcaccatcgtgctcatcttcttcctggagctggctgtggccgagctggccttcctgttccaggactgggtgagggaccggttccgggagttcttcgagagcaacatcaagtcctaccgggacgatatcgatctgcaaaacctcatcgactcccttcagaaagctaaccagtgctgtggcgcatatggccctgaagactgggacctcaacgtctacttcaattgcagcggtgccagctacagccgagagaagtgcggggtccccttctcctgctgcgtgccagatcctgcgcaaaaagttgtgaacacacagtgtggatatgatgtcaggattcagctgaagagcaagtgggatgagtccatcttcacgaaaggctgcatccaggcgctggaaagctggctcccgcggaacatttacattgtggctggcgtcttcatcgccatctcgctgttgcagatatttggcatcttcctggcaaggacgctgatctcagacatcgaggcagtgaaggccggccatcacttctgaggagcagagttgagggagccgagctgagccacgctgggaggccagagcctttctctgccatcagccctacgtccagagggagaggagccgacacccccagagccagtgccccatcttaagcatcagcgtggacgtgacctctctgtttcttgcttgctggtgctgaagaccaagggtcccccttgttacctgcccaaacttgtgactgcatccctctggagtctacccagagacagagaatgtgtctttatgtgggagtggtgactctgaaagacagagagggctcctgtgggttgccagggagggctttgacttcaggaccccctgcagcttaagcatgtctgcaagacaccctgggcccctctccactggcatccagacatctgctttgggtcatccacatctgtgggtgggccgtgggtagagggacccacaggtgtggacagggcatctctctccatcaagcaaagcagcatggggggccttgcccgtaaacgggaggcggacgtggccccgctgggcctctgagtgccagcgcagtctgctgggacatgcacatatcaggggttgtttgcaggatcctcagccatgttcaagtgaagtaagcctgagccagtgcgtggactggtgccacgggagtgccttgtccactagtacccctgtgtccacctagctattctcctggcgccggaactgcctctggtcttgatagcattaagccctgatggcgccggtggcgcggtgggcatggttcttcactgagagccggctctccttttcttaaagtgtgtaaatagtttatttataggggtaagaatgttctcaaaaccatttcacttcctcttcctctcctccagcattctcctctgagcagccttagatagtgttccatggctgggagccgaccctttgagtccccgggggtgtcttaagaaccagcccacaacagcctctctttctcctccacatactgcagcctccctccatgcatcccacatacaagcactcaccccactccccagcggggactgactgtcttctggtcttggagctactgaaattgtcacccagaatgtgaatcctgacccttcccactgcatacccagggagccccagcccaagatggccatcctgaaactgttggccagggctcctcttgtggccatgtacccagggctggctggcctgccattttgcctctccccggagaacagccgttcttctggcaaccacacccggtgcctgagccacaaccccaggctggcagctgcttcagaagctccagggcatttttgttttctggtgaccgcccctaatggggatattcggtgattcattgggtccacccttgctggcagggattttctgggggctgctcttggaaatgaagtcttaaagtactggataactcccctggggattagctggggcatttgtctagctgggctactaatctaacactttggccatagctcagaccacttctcatcgttcagggatggactgcaaccttaatttacttgccggagtgtacattctagtgtggtgtatactggtggctgttgatgatgannnnnnnnnnnnnnnnnacacaattttttgtaaactaggaaaaaaatgcttgtgtttttcggaagggggatgcttttttttgactgccaaactcttttagggaaaatatttttatattaaggctggtttggtcatttttggtgggggtcactattgaaatattgctaacccc

SEQ ID NO: 27821 - DNA, 1104 bp, Homo sapiens
  SIMILAR (577)..(702): 901254mologous to Rattus norvegicus neuritin,accession number U88958,Smith-Waterman Score=196.
ttaacctcggtcccttccccagtgcttcccgttccggattaaaaagcgcaaggcccgcctcgctcttcctgcagcaatttgcaaacgggtacgctctcggaagctgctacgggttcggtcaccttcctcttcggcgtctggcccggcgctgtccttccagtcccgcgcctcggggtttggccgtccagaggccgggggcttgggggcttggggcttggaccttcgtgcggcctgtgtttcctcctcctcctcctcctcccgccgctcagcttttatccctgcctgctctctgcagggagtcctgagctggggccaggagccccgggccgcggcgagctcactttcagcagcagggctggcaccgacaatttgcactagacgcagcgttagctgcaggtcgggcattcctgggtcacgtctttcattcacctttaacactggcgagccccgaggctgggcgctgggagaggccgcccgatgcgatgaggccgcgcggagccagggtctcgcaggaaagggcagtgggcggcagggcggggtcgtggcgctgctgaccggtgttccctcctccccgcagcgtatctggtgcaggccgtgagagcagcgggcaagtgcgatgcggtcttcaagggcttttcggactgtttgctcaagctgggcgacagcatggccaactacccgcagggccgcaagaggaggacagagggtggggagtcctcgaaggttggcagaggtgggcaccacgccttccccgcagttccggccttggaggctggcgctacatcctgaaagctgtggggaggaagccccatggggcccaagcccacggaaaagactggggagggagaaacaggagggacccaacgcgcaggcctgggacacttggattcgcaagagcagatgaaggctacgaggccggccccaggtgctcggccactaacactcaccgaccccggggagaagagaggcaggcaggagtctccaggccgaatctgagccgggaactgtggagagcaaggaggatccaggcaggttgtgggaagaaggaagaggaagtggggaacagaagagaggaaagcacgaaatcgtcgacccgggaattcc

SEQ ID NO: 27822 - DNA, 785 bp, Homo sapiens
  SIMILAR (183)..(422): 431254mologous to Homo sapiens Polypeptide fragment encoded by gene 192,accession number W89078,Smith-Waterman Score=139.
ctctctctctttctgtctcttcctcgctccctctctttctctcctccctctgccttcccagtgcataaagtctctgtcgctcccggaacttgttggcaatgcctattttttggctttcccccgcgttctctaaactaactatttaaaggtctgcggtcgcaaatggtttgactaaacgtaggatgggacttaagttgaacggcagatatatttcactgatcctcgcggtgcaaatagcgtatctgggtgcaggccgtgagagcagcgggcaagtgcgatgcgggtcttcaagggcttttccggactgttttgctcaagcttgggcgacacaatggcccaactacccgcagggcctggggacgacaagacgaacatcaagaccgtgttgcacatactggggagggatttcccacagctgcacgggtcacagcccttacggattgccaggaaggggcgaaaaatatgtgggataaactgagaaaagaatccaaaaacctcaacatccaaggcagcttattcgaactttgcggcaacggcaacggggcggcggggtccctgctcccggggttcccggtgctcctggtgtctctctcggcagctttaacgacctggctttccttttgagggtggggccagctccccccgcgcgcccacccacactcactccatgctcccggaaatcgagaggaagatccattagttctttggggacgttgtgattttctgtgatgctgaaaaccctcatataggattgtgggaaaaaaaaaaaaaaaaaaaaaaaaaaa

SEQ ID NO: 27823 - DNA, 579 bp, Homo sapiens
  SIMILAR (52)..(84): 631254mologous to Homo sapiens Human secreted protein sequence encoded by gene 33 SEQ ID NO:142,accession number B25753,Smith-Waterman Score=46.
ccgcagtcctgtaccatggatgacagtcttctgcctctggggtgcttgctagaagatcctgaagctccttggccagacagctggaaggaaggctggcctttgctctggaggaccactcggcttcactgatgtggtgcagtttccccctccttttcttgttcaagtggtgtcaagccccacagctgacagaagggggtcctccagaggtgtgagccagtctcctcctccttgcctttcttgcagaactggccagccttaaagcaggcctccagaaatccagggaatattcgtgctcctcctttatttcaagcctctcctctacagatgctcactgtgtcctgtcagaatacgccagacctctctctagcgcccggctccgaacggatcgtctcctcgttgccaggcttcagaggcccagagcccaggtcatcggcctccccctcctctcttcagctctcctctggctgctcttcagttggattcccaccgctttcccagcgatccgaatggcaaagacgagtcccgccccccacgcctctgcaccaaactgggcaggggctgcgcaggatgcggcaagaa

SEQ ID NO: 27824 - DNA, 1118 bp, Homo sapiens
  SIMILAR (247)..(564): 331254mologous to Mus musculus synapsin II,accession number L32026,Smith-Waterman Score=95.
atgctctctttctccaactgtcccctgaattgccccctcccccttctcaccaacctccagaggtgtgagccagtctcctcctccttgcctttcttgcagaactggccagccttaaagcaggcctatggacaaacagatgaaaaaatgctcactgtgtcctgtcagaatacgccagacctaccgcgcagacagactttgacatcaacctggagtctgtgggaagggacagcacccaggacacggggccccacaggcccctttccggaatcagggcccggagcagcgaacgcgacccacctcccacgggctaggcacagagctgggacgctggcccacgagggcccccccaggcgccccccaactgcctcccgggcgccccccaacacggctcccgtttggccatttctcccgcaggagcctcccccacagccgtctctcggtaccgaaaccgtcgagggctgcgcgcgggcgcctgcaaagctggctgggaagcggtcagcgcggttctcctccagacgatctgacggtgcctctggagccagcccctcagcccttgctctcctctggctgctcttcagttggattcccaccgctttcccagcgatccgaatggcaaagacgagtcccgccccccacgcctctgcaccaaactgggcaggggctgcgcaggatgcggcaagaaccgctctctccgcgagggtgtcgggaaggggggcggagggatacggcgcgaaagtgcaggacgccccccctcacagaaccaccatagttccgacccagagctgctccagctgtggctgaaaggggccaacatacagcttgggctgtggcttcagagggtggaagccgcaagccttggcagcttccacgtggtgttgagcatgcaggtgtacagaagtcaagaactgaggtttgggaacctctgcctatatttcagaagatgtaagaaacgcttggatgcccagactaactgtaaagctataggaatcaaagacagtatggtagcagtgaaaggaaggacaacagatagagagcaatgcaacagaacagagagcccagaaatagatccatataaatatggtcaactgatctttgacaaaggagcaaaggcaatataa

SEQ ID NO: 27825 - DNA, 389 bp, Homo sapiens
  SIMILAR (14)..(127): 1001254mologous to Homo sapiens RPS16,accession number M60854,Smith-Waterman Score=200.
  misc_feature (1)...(389): n = a,t,c or g
cggacgcgggggcaaagacatcctcatccagtatgaccggaccctgctggtagctgaccctcgtcgctgcgagtccaaaaagtttggaggccctggtgcccgcgctcgctaccagaaatcctaccgataagcccatcgtgactcaaaactcacttgtataataaacagtttttgagggnnnnnnnnnnnnnnnnnnnnnnnnnnnnnnnnnnnnnnnnnnnnnnnnnnnnnnnccttttaaaaaaatccctgggggggccaaaattaacgggggggggaaaaaaaannnnnnnnnncttttggggggggtaaaaaaaacccctggggggtttttgggaaaaaaccctttttttgggggggggaaatatggggcacaccccccccagaaa

SEQ ID NO: 27826 - DNA, 976 bp, Homo sapiens
  SIMILAR (67)..(291): 931254mologous to Homo sapiens Krueppel-related DNA-binding protein,accession number M61870,Smith-Waterman Score=378.
tcggaatctcccgggtcgacgatttcgtggcagatccacagctgagggacccccggaagtctagaaatgggaccattggaatttagagatgtggccatacaattctgtctggaggagtggcattgcctggacactgcacagaagaatttatatagggatgtgatgttagagaactacaaacacctggtcttacttggtattgttgtcactaagccagacctgatcacctgtctggagcaaggaaaaaaacccttcactgtgaagagacatgagatgattgccaaatccccagcgccgggcggtgaggttctctagtccacgctcgcaaccatgccgtccaagggcccgctgcaatcggtgcaagtcttcggacgccaagaagacagcgacagctgtgggcgcactgcaaacgcggcaaatggttctccatcaagttgaacgggcgggcccctggaaaatgattgaagccgcgcacgcctacagtacaaactgctggatgcccaagttctggcttcctcggcaatggagcgatttgctgggtgtagacatcccgtgtcccgtgtaaaagggtgggtggtccacgtggccccagatttattgctatcctgtcagtcccatctcccaaaagcccctggtgggcctattacccagaaatatgtgggatggagggtttcccaaggaagggagatccaaagacaatccttcatccagtatgaccggaccctgctgggtagctgaacccttcgttcgctgcgagttccaaaaagtttggaggctcctggtgccccgcgctcgctaccaggaaatcctaccgattaagcccatcgtgactcaaaactcacttggattataaaccagttttttgaggggttttaaagtttcaagaactgtgtgtggccttatgtgttggtattggatgtttaaccagacagaaatcagtaaacatcctggacctataaaaaaaaaataataaata

SEQ ID NO: 27827 - DNA, 151 bp, Homo sapiens
  SIMILAR (144)..(109): 411254mologous to Macroptilium golden mosaic geminivirus coat protein,accession number U75280,Smith-Waterman Score=33.
tgggttcaaggtgccagaaatttgatctaatgccgggttacgtcatgtgtgcagaacaagctgccagagtggccgagccaggagctgtcatgtcggattacacactccttgggtctcctaagtgccttggcatccctggggcatcagatgg

SEQ ID NO: 27828 - DNA, 1176 bp, Homo sapiens
  SIMILAR (499)..(1176): 1001254mologous to Homo sapiens 07-JUN-1995 Human AL-1 cDNA,accession number T18897_cd1,Smith-Waterman Score=1218.
tcagtctccctctcggaaggcgatcggagactgacatcggcccatccaggagttggagggatccatttgaaagtgattgtttcccctcccgctctccagccgaacagttgggttggcgtcgtcttgcaggtttaggaatcccagctctgccaggccggctggtcttaacctctgctcttcattcactgtggtgcacccacacccagccaaggaaagcacgcgcgagaaatccccgaggctcggccagcccccggggtgccctcttccgctaccgccgcgttccgactctgctgggggacctgccggaagacgcgaagagccaaacttttctttgaggttttcgaggcaagaccgcttcgaaagccggcgcagctgccgcttaaccagttccaggacaccgacaaggctgggttgcggctccggatccccacccttctcggcgcaccgcccggtaccgcagcacttacgactcctctgagatttctgggggtcgccccggtggagatgttgacgctggtgtttctggtgctctggatgtgtgtgttcagccaggacccgggctccaaggccgtcgccgaccgctacgctgtctactggaacagcagcaaccccagattccagaggggtgactaccatattgatgtctgtatcaatgactacctggatgttttctgccctcactatgaggactccgtcccagaagataagactgagcgctatgtcctctacatggtgaactttgatggctacagtgcctgcgaccacacttccaaagggttcaagagatgggaatgtaaccggcctcactctccaaatggaccgctgaagttctctgaaaaattccagctcttcactcccttttctctaggatttgaattcaggccaggccgagaatatttctacatctcctctgcaatcccagataatggaagaaggtcctgtctaaagctcaaagtctttgtgagaccaacaaatagctgtatgaaaactataggtgttcatgatcgtgttttcgatgttaacgacaaagtagaaaattcattagaaccagcagatgacaccgtacatgagtcagccgagccatcccgcggcgagaacgcggcacaaacaccaaggatacccagccgccttttggcaatcctactgttcctcctggcgatgcttttgacattatag

SEQ ID NO: 27829 - DNA, 2041 bp, Homo sapiens
  SIMILAR (495)..(617): 971254mologous to Homo sapiens LERK-7 precursor,accession number U26403,Smith-Waterman Score=217.
atgggatcagggacctgcttaatgaagcactctggctgcggttggtggaggaggtgcattgcactgggcggtggggagctcactcgtcgaaatgcctggattcttcagagccagcaaggggaaagcttaagtccactatctgcagccactgcagccctggctggggttgctgaaattcccaaagggggccctgcgtgcactgcttcctacagaggctctgtctcgtggttgacaaccttgattgattatacaagcactggggagcttttccaaatcctgattcccaggctataccccaatcgagtaaatcagattctctggggagaggaaccagacatcagtatatttagagtttccagacggacgttgtgcagactcaggcagctcactcggggctgggcagcagacagtgattatcgtcaccccctgctttcatccattacggcgggtgttagcagtggcgggtcgggggctccggcgctgggccaggcgtgatgttgcacgtggagatgttcacgctggtgtttctggtgctctggatgtgtgtgttcagccaggacccgggctccaaggccgtcgccgaccgttacgctgtctactggaacagcagcaaccccagtgggttcaaggtgccagaaagtttgatctaatgccgggttacgtcatgtgtgcagaacaagctgccagagttggccgagccaggaggtgggagcccttcgcccgcggcctggcgatgtgctgccggaggaacgcgcgcgattacctggaaccgatttgtaggcgtcccgaagcccgccgggtatgcgggagactagaggtgggcgccgggggcggtcatagtgcgcgtgctggacaccggccagtcgcagacgtcccgtgttttcggaccctggaagtggagtggggaggttatccagagtgcccggcggggtcctccgggtctggagcagttccgaacctttattgcttcccggcctgtgcacagaagtcggccccgctaggcccataccgcactgctttctctgggacagaggctagcttccagctgtgtgccggtctcggtgccctcctagcctcccctcagcatgcaggcaagagagggattccctgcttgaataatgtcagcgcagatgaagatgggaagatttccccacaagcagtccgccggttacagaaccaggagggagttccccctatcccgctagtccaagatagtcttactcaggtagccgcccaagtcctaaatgaaccgctgaacaggagtggagatattcctgaaagtttggttcaaaaaacaagagtctcctggagctgtcatgtcggattacacactctcttgggtctcctaagtgccttggcatccctggggcatcagatgggcaaaacaagctacttctcacataacgggttcctggttttcaatgtcaaaccaccacgaatgaaggaaatcttcccccagcggttcagcaggacacagagctggctgcctctggttgcaccaacatgcaacccattaactgcttttcagttggcagtatttgaatttgtagattttttcaccacttttcaatgtcttgcctgcaaggatggcgaacagaatttaatatttcatggagcccaaagcacaaagcatgttcaaattcaatacaagaaaatgctttatcacatcctttatagattaataatccaaaacggtgagaaacttcaggaagccatgacaagttttaaccaaatgacatgcctgaggggcgaatccttactgaaagtgaccagtaacaagaacacagaaaacaaacagagagatcattcagcttcaccagaggaatacatggaggcagccagccctgtcaatttggaagaggctaatgaaacattatctgcagcagtggccatgtggcacagggaatcttgcaagagggagagtgcagtgactgtattagaactcagtgctgccctggtcacagcagaaaggaacatgggcagagaatttgggccagccccaaccagaggcaaactgcccatcccagcagtcagaacctga

SEQ ID NO: 27830 - DNA, 1434 bp, Homo sapiens
  SIMILAR (675)..(22): 901254mologous to Escherichia coli K12 putative oxidoreductase,accession number AE000389,Smith-Waterman Score=984.
ttagaacatttgtccccgtgtgactcgatacgacacagcaggactcgcgccactgcggccataagatccaggtgttactcgaagtacgcccagtgaattcgggatcatcgcgtcaacggtgatggcgtcagcaggctgtacgccgccaaccagcaccgtacctgccagtaaaatgtaggagagcgttaacagcagcatcagcgttgaagtgacggaggtaattggccccaacattttcgccccgttggtggaaacccaggtggagaaggcgaacagcaccatactgataatggtggtggcaaccggcgtcataatatattcgtatccgaggaaggcatacgaagcataagcaataacgcgcggcaacagtgaggtgaaaaagaacaggtttacgaaccagtaggtataggcagtaataaatgcccaacgtccgcccagcgaactttttacccacgcgtagacaccggcttctgagtttttatttaacgaaacaaattctgcgatgatcagacagaagggaataaaataaaaaatcgtcgcgaggaaaaacatcggtgccgaggccagtccaagctcaatattattattgataacgttgttaaagctgtaaacggcggcaaaagtcagcgagagcaagccgaatttgccgattgtattacgtttggtatcagacataacacatctccgaaaatgagtagggtacgcggtggcggcaaactccttgggccgtgctggggatggccgaggcctcttcttcacttcaatccagttctcagaatccaggtcaggcaggctggcagacaggcccttgggtagtgtctttaggttgctgacctcctctgttttggttggcactggggtgactgcacgaggagagccaggtgccgactctgtctccttttggtagtgctgacggggaacaaattcagggcagttgagaagctgggagaaatcagtctgtgaataatccactattgggggaagaggccacttttctggttcctccctcctacgaactttctcatcaacgatctccaacaagccccagtaacggctgtccgcgctgttgtcgcggttgtcgcccatcatgaagtattgtcccggaggaacaatccaggttgccagttgttgccctggctgctggtaatacatccccacctgatcctgcgcaatcggcactgtcagaatgcggtgcgtcacatcacccagtgtctctttacgctcggaaagacgaattccattttctttggtttcgtttttcggcacttcaaagaatccgctggtcgcttccccaccattacggcgtgagaaggtctgaacgaaatcgctcggttccacgtttgagtaggtgaccggcagcgcgttttcacacgcctggccggaactgcatcccggttgaatcgtcagctcgcgcgcttgactgccgtaaaacat

SEQ ID NO: 27831 - DNA, 2268 bp, Homo sapiens; identical to SEQ ID NO: 25209

SEQ ID NO: 27832 - DNA, 639 bp, Homo sapiens
  SIMILAR (341)..(526): 351254mologous to Homo sapiens Human apolipoprotein E mutant protein fragment 12,accession number Y20299,Smith-Waterman Score= 83.
atggagagagacctaaacatcgttgtccacgtccagcattatgagaacatggacacgagaacccccataaataatcttccccccatgaccagagataacaaacagctgacccagaaggagacaattgatcacaatgctgcccaacagccaattagattcccctcaggaagctgtggctcagaggttaagacctttgtgggagatcacatggacagcaatgaccccaccagggctggatttagacgcccaactcctaaccccggcctcttcctccactctgtgtccgactccacttcagcagcccttgcaccaattacgacacgccgctttggctcaacaccggcaaagccccccggccgcaaggacgaccccttgcacgaccccaccaaggacaagaccaacctgatcgtctacatcatctgcggggtggtggccgtcatggtgctcgtgggcatcttcaccaagctggggctggagaaagcgcaccggccccaaagggagcacatgtccagcttgtcagcaaacagcttggtggtgtggctgcagaagcccacgtggacagttctggcctttgggtatcaccaggtcccaggcataattagtataaatcaaaatcctctagactatgacaggaaaatg

SEQ ID NO: 27833 - DNA, 2415 bp, Homo sapiens
  misc_feature (1)...(2415): n = a,t,c or g
ttactgatagtcatcagcaagtccgctactaaataacgtttctgcattttcagcggtagcaacagcatcctgcacatcctgccgtttcaaatctaacactcgtaatttaccctttacttcggcgacagattcgattcgcctgtaagcatcagaatgatgttcggcatatagcgcaagtccttccagtttgggcaaagcatcagccagatgtaggctatgtggatctaccangtccacaaccattttgccatcctgttcggcaaagaacaggaaatcgggacgaacaatcttgtactgttcagcttcaacataagcgattcccagtgacgactgccctgtgtactgtggattacgataccagaaagcaaatccttcacgtttggtttcgatctcaaaaaccttggtttcccaatggttcaacagagccggatagttcccgctttcgtcacacaacaaatggtgtttccagactggaaggtcagcttccttttcaccttcacgcaccctggtcatttcaaacttgttcgccggcctgaccagatccacatcctgcggttcggtactcatttcgacgatttgacgataggcctctttacgctcatctttcaacgacttgatttgcggtgtgtactcggccagccacgccttcgccagtctatcggcctcgccatcgaagtaatcctgcacctccatcaccagccccatgccagcaacggtaacacgagcctccatgattgcttccagatattcctctgcatcctcttctcgatccgcaggggatcctatagcagcccagcgatccggttcgataacgtgatagagccataatccttgtcgttgctccgggccaaaaggttcgcaaattcgcatatgacgcagaggaacgcctgcctgatacattaggttatacagtgggttgcagagactttgatgatttgcataccaggtccagatatcagccactttccagtcgtaaatggggtaaatgtaccagctatgaccgcctggtgcggccgtagtccagggtttatcgtcggcaaaacgttgtttatttaaactggcgatggcgacaaaacggttgtaggactcatccgcacggatgccgatcatcatcgccgccggacgtttttgtgaaaaccattcggcaaactcacgtacaaattgttcgaaggtcatgcctggctggtaaaagcagaaaaagtcagggtcggttatcgcatcttggggaggttgacgtacccattcgacatcaggttcccagcactgccattcgggttggtattgtgaaagggaattttgcgtcgtaagcgggagcgcatcccagtaaaactcttcgatgacatcggtgtacaactcgcgcagggactgaacatagttaatggtgcaagagaattgcgcttcccagtcgataaacaaaacgcagatttttttgcccatttgtcgggcaagttcggctgtcagatgcagcattaaaccagagtctttgccgccagaaaatgagacacaaacgcggggtagggtgttgagtgtccaggtaatacgctctcgtgcagcttccagaatattgagcggaagaggaattttataaatagacatatttttcagtgtctgctttgagaataaagctgatgggctctgaagggactgccctccatcactcagtccttccatcacccgctccgcaaatgacaaccttgcaccgaccggaatatcagcatgaacaggctcgggcggtactttgcgatatttatccagcagatggatctggatcctgcgcagcgtgtcaccattgaggcgatagaaacggaagtagagaatcagcgttaccatgaaaaacagagttggtagagcaatcataataaactgcatacctaatagggcttgcgtagactgttcaacattcggtacatagccaatcatccataacacaaccgcaatgaaaaaagccgcaaaggctgaaccgcccttcaccaccatagtctgcacggagtaagcgatactttcacagcgtacgtgcagtttatgattcaccgtaatcaacgatatctgtcccggaccgcgtgcacacgggtccaggatatccatggaaaactgtttactggatccgctattgccaaccgtttccaggacgctatggccataccgttcctgggaacgcaaggcaaacgtgttcctcgaaacggcatggccataccgtttcctgggaaccgcaatgtcatagcgggtgcgttcatcccgcaccgccaacacctcgggcaaattcaactcaatccagtccgccagtgcagcaaccttttcgctcacctgctcgcccagcggagtgaggctatattccacatgcggcggcaccaccggatacgcgatacggttaagaaaaccatcctgttctaacgcctgtaacgactgcgcaagcat

SEQ ID NO: 27834 - DNA, 1569 bp, Homo sapiens
  SIMILAR (547)..(1368): 991254mologous to Escherichia coli K12 putative isomerase,accession number AE000390,Smith-Waterman Score=1473.
atgccatccagcgcattgagcgccatacggataaaaagcacgatgggcaatagcaaaaagaggatgggttgtgccgccaacatcaacagcaatccgtggacgctggatacacagctgcgccagcaggccggaacagaccggagcagcaagcagagtgcagtggagcagagtgaagcaggaagagcagccacaaatgacagcataaccagcctgctgccccagcgccgttgggccgatgtcgatgtgaatggcaagctgggcacggacaagcccgggccgttaacgaaacatgctggtctgatgtggtctgtggtctgtgaatgtatcttcttctcggttaatgcctttgtgacgaggagtatggggcacaatatacacttttttctgcgggccgttggccacaacaaagactattatttcggtgcccgtgttttctcccctttccacgtgggggaaatcctgaaggggttcccactccgatctgcccgtgacaacggctttcgggtaaacgtacagaccgtccaccgtactggcctacaccggccgacctgcccgtgggatacctggaagcaggcgtttgcgatggcgcatttcaatccggacatcgccaaagagaatatccgcgcggtcttctcctggcagatccagcctggcgatagcgtgcgtccgcaggatgtgggctttgtccccgacctgatagcgtggaaccttagccccgagcgtggtggcgatggcggcaactggaacgaacgtaataccaaacccagccttgccgcctggtcggtgatggaagtgtataacgtcacccaagataaaacctgggtggcagagatgtacccgaaactggtggcctatcacgactggtggttacgtaaccgcgatcacaacggcaacggcgtgccggaatatggcgcgacccgcgacaaagcccacaacactgagagcggcgagatgctgtttacggtgaaaaaaggcgataaagaagagacgcagtctgggctgaacaactacgcccgcgtggtggagaaaggccagtacgacagtctggaaattccggcacaggttgctgcatcgtgggaatcggggcgtgatgatgccgccgtctttgggtttatcgacaaagaacagttggataaatatgtcgctaatggcggcaaacgtagcgactggacggtgaaattcgccgaaaaccgcagtcaggacggaacgttgctgggctactcgctattgcaggagtcggtggatcaggccagctatatgtacagcgataaccattatctggcggagatggcaaccatcctcggtaagccagaagaggccaaacgctatcgccagttggcacagcagctcgcggactacatcaacacctcacggcagtctctggctgggcttcggggagcccacatgtctgatcggcagggcttggctggccaggcggtgggcaccagcgtgatgtctggagacctggggtcgtccagctcaggaggccatctggagctgccgctgcagcctgcagagtgtaaggtggcgtttgttaccaagacctgtgggtgttctggggcttcctga

SEQ ID NO: 27835 - DNA, 1392 bp, Homo sapiens
  SIMILAR (495)..(4): 981254mologous to Escherichia coli YFHC-ECOLI protein,accession number D64044,Smith-Waterman Score=849.
ttaatccgtcgaggattgcgcttttttctgcgctttaatttcttggcggcgcatgcgaaagaagtcactgagcaacgccgcgcactcatccgccagtattcctccgtaaatttccactcggtgattcatacccggatgatgcagcacatccattaaagatcccgcagcgccagttttcgcgtcacgcgcaccaaagaccacgcgaccaatgcgactgtggatcatcgctccggcacacattacacatggttcaagcgtgacatacaacgtggcgtcgatcagacgataattttgcatcaccagaccaccctgccgcagggccatgatttctgcatgtgcggtgggatcatggcgaccaatcgggcggttccagccttcgccgattacccgattgttatgcactaataccgcgccgaccggcacttcccgctcatcccaggcacgtttcgccagcgtcagcgcgtgacgcatccagtattcgtggctaaattcgacgcgcggggttactcgccaacgatgctgacagaaataaagcagcggattgtcctgattactgtcgctatagccactgtacagccgcagcggagtgccgattttgcgctccagttgtgcgaccttttcatgtcccagacaacgcatcgtcaatacccaaccaccatagccacgctgaatttggctggcgataagattaacccgcggcagccagggcgtatcgaaataaaccgcttcaaccagcggctgcggagagccggtaatcaaccagatatcagcatcggaacttaacaggtaggtggttaatcgctcctgaaccagagccagtccaagctcaatattattattgataacgttgttaaagctgtaaacggcggcaaaagtcagcgagagcaagccgaatttgccgattgtattacgtttggtatcagacataacacatctccgaaaatgagtagggtagcggtggcgcaaactccttttgccgccgtagttgttatttgttatggaaatacacatcttcgatggtgactttgagaaccacttttttgaccgcgttattgcagataaaccgatacgcttcatggatatcgcaaataacgatttgcccttcgtggacctcaacggtttctccgcagcctgtaatgtctctttcggcgcatattcaattttttgctgcccttgcaggtagtaatgcacttcaaaatagcgtcgatgcccggtaaatagcgcatcggtcgcggagtctgtctccacgcggtaagtcaatgagtcaccgatggagtgggcgacgccaggctgaatgttgtcgatattttcaatcgcttcaacgcagcgttgccacttcttgccagaggcgtaaatctggcggaactgttctaagttatcgatgatcctcat

SEQ ID NO: 27836 - DNA, 3111 bp, Homo sapiens; identical to SEQ ID NO: 25212

SEQ ID NO: 27837 - DNA, 1896 bp, Homo sapiens
  SIMILAR (1286)..(1819): 831254mologous to Escherichia coli o588,accession number L10328,Smith-Waterman Score=729.
  misc_feature (1)...(1896): n = a,t,c or g
ctttttgactggctggtcagccagaacgaactcaaagctaacccggcgaaaggtgtttcggcaccgaaagcgccgcgtcatctgccgaaaaacatcgacgtcgacgatatgaatcggctgctggatattgatatcaatgatcccctcgctgtacgcgaccgtgcaatgctggaagtgatgtacggcgcgggtctgcgtctttctgagctggtggggctggatattaaacacctcgacctggagtctggtgaagtgtgggttatggggaaaggcagcaaagagcgccgcctgccgattggtcgcaacgctgtggcgtggattgagcactggcttgatttgcgcgacctgtttggtagcgaagacgacgcgctttttctgtcgaaactgggcaagcgtatctccgcgcgtaatgtgcagaaacgctttgccgaatggggcataaaacaagggctgaataatcacgttcatccgcataaattacgtcactcgttcgccacgcatatgctggagtcgagcggcgatcttcgtgcgagaggcgcttacctttgtgccaaattattatccggggctgcgcaggttccagaatggagatctgcattcgcctggtttgcccgctgtgccgaacaggcaaggcaaaaccagtacttacaggtcagctcttgcgtacccgccctggaaggctgcgatgttaacggtgccagttttacccttgaacagatgctcgcctggcgggaccatccgcaggttaccggccttgcagaaatgatggactaccctggcgtaattagcgggcagaatgcgctgctcgataaactggatgcatttcgccacctgacgctggacggtcactgcccgggtttgggtggtaaagaacttaacgcctatattactgcgggtattgaaaactgccacgaaagttatcagctggaagaaggacgccggaaattacaactcggcatgtcgttgatgatccgcgaagggtccgctgcccgcaatctcaacgcgctggcaccgttgatcaacgaatttaacagcccgcaatgcatgctctgtaccgatgaccgtaacccgtgggagatcggccatgaaggacacatcgatgccttaattcgccgcctgatcgaacaacacaatgtgccgctgcatgtggcatatcgcgtcgccagctggtcgacggcgcgccactttggtctgaatcacctcggcttactggcacccggcaagcaagccgatatcgttctgttgagcgatgcgcgtaaggtcacggtgcagcaagtactggtgaaagggcgagccgattgatgcgcaaaccttacctgccgaagagattgggagactggcacaattcgctccggcatatgggaacaccattggccggcagccactttccgccagcgactttgccctgcaatttacgcccggaaaacgctatcgggtcattgacgtcatccataacgaattgattacgcactcccactccagcgtctacagcgaaaatggttttgatcgcgatgatgtgagctttattgccgtacttgagcgttacgggcaacggctggctccggcttgtggtttgcttggcggctntggactgaatgaaggtgcgctggctgcgacggtcagccatgacagccataatattgtggtgatcggtcgcagtgccgaagagatggcgctggcggtcaatcaggtgattcaggatggcggcgggctgtgcgtggtacgtaacggccaggtgacttctgagggagcaaaggaaagaatgatgggaaaaaggtacaaggagacttcaggctctattgggctgaaggtcccagctccactgaacttaaatctaagtttacaacccagagagcagctcggtggtcagagcactgctgagccctactgcccctg

SEQ ID NO: 27838 - DNA, 3296 bp, Homo sapiens
  SIMILAR (862)..(1644): 921254mologous to Escherichia coli o588,accession number L10328,Smith-Waterman Score=1246.
atgtgcggcccgcggcggctcgcagctcccggcagcagcctcggcagcttcggccgcgcctcgagaggcggccgcagaggctccagcggcggccgagcggccgagcccgggctgggagacaccatgcgccgcgtccttcggctgctcctcggttgcttcctcaccgagctgtgcgcccgcgtgtgccgggcgcaggagcgagcgggacacgggcagctggcgcaactgggcggcgtgttgctgctggcggggggcaaccgctccggggccgcctccggagaggccagcgagggcgctgaggcatcggacgcgcccccgacccgggcgcccacgccggacttctgccggggctacttcgatgtcatgggccagtgggacccgccgttcaactgcagctcgggcgacttcatcttctgctgcgggacttgtggcttccggttctgctgcacgtttaagaagcggcgactgaaccaaagcacctgcaccaactacgacacgccgctctggctcaacaccggcaagccccccgcccgcaaggacgaccccttgcacgaccccaccaaggacaagaccaacctgatcgtctacatcatctgcggggtggtggccgtcatggtgctcgtgggcatcttcaccaagctggggctggagaaagcgcaccggccccaaagggagcacatgtccagcctctccgctgggggatgtcaccgggaagccaacttcggcttggaacacggagaaggggcgctgggctcagcacagggggtatccctctcccggtcccgcagccccgcttgttctccgctcttggccaatcccactgtttcggcccccgcctctgttgccactttcctcaccagcatggatcttgccctctcctttgtgtcactcactaaaggctcaaagtctggttcaagcaacgatttgatcaacgaatttaacagcccgcaatgcatgctctgtaccgatgaccgtaacccgtgggagatcgcccatgaaggacacatcgatgccttaattcgccgcctgatcgaacaacacaatgtgccgctgcatgtggcatatcgcgtcgccagctggtcgacggcgcgccactttggtctgaatcacctcggcttactggcacccggcaagcaggccgatatcgtcctgttgagcgatgcgcgtaaggtcacggtgcagcaggtactggtgaaaggcgagccgattgatgcgcaaaccttacaggcggaagagtcggcgagactggcacaatccgctccgccatatggcaacaccattgcccgccagccagtttccgccagcgactttgccctgcaatttacgcccggaaaacgctatcgggtcattgacgtcatccataacgaattgattacgcactcccactccagcgtctacagcgaaaatggttttgatcgcgatgatgtgagctttattgccgtacttgagcgttacgggcaacggctggctccggcttgtggtttgcttggcggctttggactgaatgaaggtgcgctggctgcgacggtcagccatgacagccataatattgtggtgatcggtcgcagtgccgaagagatggcgctggcggtcaatcaggtgattcaggatggcggcgggctgtgcgtggtacgtaacggccagaaattactcttcagaatccccagcttcagcatcatcagcggtttcgtttgcgaaatcatcgcgacgctcacggcgctcgtctttcgctttaaccatcggagatgcttcggtaacagcgtgcttggtacgcataaccatgctgcggataacggcatcgttgaagcggaaggtagtttccagctcatcgatcacttcctgcggagcttcaacattcatcagaacgtagtgtgctttgtgcagtttgttgatcgggtaagccagctgacggcggccccagtcttccagacggtggatcttgccttctgcaccagtgatggcagcagtgtagcgctcgatcatgcccggaacctgttcgctctgacagaagggaataaaataaaaaatcgtcgcgaggaaaaacatcggtgccgaggccagtccaagctcaatattattattgataacgttgttaaagctgtaaacggcggcaaaagtcagcgagagcaagccgaatttgccgattgtattacgtttggtatcagacataacacatctccgaaaatgagtaggttgttatttgttatggaaataaccatcttcgatggtgactttgagaaccacttttttgaccgcgttattgcagataaaccgatacgcttcatggatatcgcaaataacgatttgcccttcgtggacctcaacgaacagttggataaatatgtcgctaatggcggcaaacgtagcgactggacggtgaaattcgccgaaaaccgcagtcaggacggaacgttgctgggctactcgctattgcaggagtcggtggatcaggccagctatatgtacagcgataaccattatctggcggagatggcaaccatcctcggtaagccagaagaggccaaacgctatcgccagttggcacagcagctcgcggactacatcaacacctgtatgttcgacccgactacccagttctactatgacgtacgtattgaagataaaccactggcgaacggctgcgcgggcaaaccgattgttgagcgcggtaaagggccggaaggctggtcgccgctgtttaacggtgcggcaacgcaggccaatgccgacgcggtggtgaaggtgatgctcgatcctaaagagttcaacacctttgtcccgctgggaacggcggcgttaaccaatccggcttttggcgctgatatctactggcgtgggcgcgtatgggtggatcagttctggtttggtctgaaagggatggagcgttacggttatcgtgatgatgccctgaagctggcggatacgttcttccggcacgccaaagggttaaccgccgatggaccaattcaggaaaattacaacccgctgacaggcgcacagcaagcacaccagatgtcagtgcgcgagttgtacaccgatgtcatcgaagagttttactgggttgcgctcccgcttacgacgcaaaattccctttcacaataccaacccgaatggcagtgctgggaacctgatgtcgaatggccaggcatgaccttcgaacaatttgtacgtgagtttgccgaatggatcagcctatcgattcattactgttacccggagtatgcctcatatggtgtttcacatacagtacttgcttaataaaatgggcaacttcatctgacctagcaatcccatga

SEQ ID NO: 27839 - DNA, 2148 bp, Homo sapiens
  SIMILAR (1234)..(1380): 331254mologous to Homo sapiens cell surface protein,accession number L46352,Smith-Waterman Score=77.
atggggcagctggttcctggccgccaggctgcgtttcagcagctcacagcccactggctccgtgagacctgtaaaagcaaaggttttgtggcacagcaggccgagagggtgccgtgtgctaccctcctgcagacgtacatcagccacgaaactgctgtgactttaaagccggtcctcgccgcttcccgcacacctcgccgcttcccgcgcacctcgccgcttcccgcacaccaccaggcttgtgcttcccggagctgggtctgtgcacgtggcatccgtgcctctaaaggcgttgcaggccgggcacggacctcagagctggatctggttgtcatcccagatgaggaaacaggtcaggcggatgatgcagaaggagctgtgactccccggtggccactggggatgctcctggcccttgtgtgggtgaacgggtgccgtgatgtggccatgaggcgcacggacctctggactcaacgtggcctctccataggcttgagggaaaacaggaacggtcaggccctgagaaagtgccccaagaccgtgggcctgggagaaagggtcacggggcttgtgctggattttgggacttttctcttcagcctgtacacaaaggttacacacaaagaagacggcaaagggagcttccttgtggaatatgtagtctgtggtgcacacaccaggccccgggagacctgggatcccttatgcgagcgtgaggcaccccacgtcggaaattcggatacctgggatcccttacacgagcctgaggcaccccacgtcggaaatggaaattcggagacctgggatcccttacgcgagcctgaggcacccacgtcggaaattcggagacctgggatcccttacgcgagcctgaggcaccccatgtcggaaatttggagacctgggatcccttatggtgcgggccaccattcaggacaagcgttcctgtggacgacctgccagaggtggcagcctgcggacaggggccccactcacttcagctctggcttacagaaccttcatgggatcccgcggaagccgtcatttctgtcagaatattggcggctcatcttcattgcctggctggacgcagacccagccctttcatctgacagaggtgccgtgaatctcgcttcctggcggagacacgtgctgcacaccacctcctgtgtgtggggcttgcacactcctatgttcaaaaggcctgcgttccacacccatgacgtggaggggcctgcattccacacccacgatgtggaggggcctgcgttccacatccacgacgtggaggggcctgcgttccacaccgatgacgtggaggggcctgcgccgccccctcctccgtgcagggggagagctgctcccggaactatgctccatcaagtttaccatcatacaggatggatgggctccggccacgtcacacacttcctgaacgagtttacaatcatatgggatagatgggcaccggccacatctcgctcctggacaaattcaccgtcatacaggatggatgggcgccggccacgtcgcatacttcctggacgagtttaccatcatatgggatggatgggcaccggccacatctcgctcctggacaagttcaccatcatacaggatggatgggcgccccccacgtcacacacttcctggacgagtttaccatcatatgggatggatgggcaccagccacatctcgctcctggacgagttcaccgtcatacaggatggatgggcaccggccacatcacacacttcctggacgagtttacaatcatatgggatagatgggcaccggccacatctcgctcctggataagttcaccatcatacaggatggatgggcgctggccacgtcgcatacttcctgaacgagtttacgatcatatgggatggatgggcaccagccacatctcgctcctggacaagttcaccgtcatacaggatggatgggcaccggccacatcacacacttcctggacgagtttaccatcatacaggatggatgggcaccggccacatctcgctcctggacgagtttatcatcatacaggatggatgggcaccagccacatcacgcacctcctggagaatcccgccatctcatcacagttctttgaccagttggctattttctccattgagtaa

SEQ ID NO: 27840 - DNA, 464 bp, Homo sapiens
  SIMILAR (85)..(360): 1001254mologous to Homo sapiens Human secreted protein sequence encoded by gene 26 SEQ ID NO:87,accession number B24462,Smith-Waterman Score=476.
  misc_feature (1)...(464): n = a,t,c or g
agcttatttaaatttagcccaaaaatgtgtggatcagatgaagaaagaagcggggcgaataagcacggttgagctacagaaaatggtaatcattcctggggtatttatccagaatctatctctaccttaccagtggataatagtctactgtccaattctgtttactctgaattaccatcagctgaagggaaaatgaaggtaactgttacacaaataacagtggcactgagcagcttaaaaaatatttttactcctcttctttttcgaggacttctgtcttttctgacctggtggattgctgcttgcctcttttctacaagcctttttgggcttttctatcaccagtatctgactgtggcatgaatctcagttaacaaaaaagcatatccaaatcaccctttaaatctaaaatatctgtgaaattaaagcgctgatgaaaaccagaagaaaacntattcaatggg

SEQ ID NO: 27841 - DNA, 397 bp, Homo sapiens
  SIMILAR (1)..(354): 981254mologous to Homo sapiens Human PRO1313 protein sequence SEQ ID NO:216,accession number B24431,Smith-Waterman Score=594.
attgtaacagaaaattatctggaatttggacttgaaacagggtttacaaatttttcagacagtgcgatgcagtttcttgaaaagcaaggtttagaatctcagagtcctgtttcaaaacttactttcaaatttttcctggctattttctgttcattcattggggcttttttgacatttcctggattacgactggctcaaatgcatctggatgccctgaatttggcaacagaaaaaattacacaaactttacttcatatcaacttcttggcacctttatttatggttctgctctgggtaaaaccaatcaccaaagactacattatgaacccaccactgggcaaagaaagtatccctttaatgacagaagccacattcgatactctgcgactctggttaa

SEQ ID NO: 27842 - DNA, 405 bp, Homo sapiens
  SIMILAR (95)..(403): 1001254mologous to Homo sapiens Human PRO1313 protein sequence SEQ ID NO:216,accession number B24431,Smith-Waterman Score =545.
tttcgtctcggctcaaggaccgggaggtaagaggtttgggactgccccggcaactccagggtgtctggtccacgacctatcctaggcgccatgtttgaggtggtatcaacatcctacagaagaagaattaagaattcttgcagggaaacaacaaaaagggaaaaccaaaaaagataggaaatataatggtcacattgaaagtaagccattaaccattccaaaggatattgaccttcatctagaaacaaagtcagttacagaagtggatactttagcattgcattactttccagaataccagtggctggtggatttcacagtggctgctacagttgtgtatctagtaactgaagtctactacaattttatgaagcctacacaggaaatgaatatcagcttagtctg

SEQ ID NO: 27843 - DNA, 502 bp, Homo sapiens
  SIMILAR (276)..(452): 501254mologous to Homo sapiens Human secreted protein encoded by gene 25 clone HPIBO48,accession number Y41332,Smith-Waterman Score=159.
gagggtatatagagaaaaggatctcatgtattgctctacttttttcttctagatacctgttaacttcttacgctttcatgatacatttatctagttctgttattcaagttaaagtattatacagttaagtctatggcagagtcagattcttttatgtgtctaactgttgcgaagtatagacttcttatatcttatatggtgaccattaacatataacgagcatgctagcatattgttgtctttgagagcaccgtatcaactttttgatctgtagaatgacagaagccacattcgatactctgcgactctggttaataatcctgccgtgtgctttgcggttggccatgatgcgtagtcacctgcaagcttatttaaatttagcccaaaaatgtgtggatcagatgaagaaagaagcggggcgaataagcacggttgagctacagaaaatggtaagttttataccctagtcaaaatgaaaaatagcaaaaaccgcactgtaaaa

SEQ ID NO: 27844 - DNA, 2141 bp, Homo sapiens
  SIMILAR (931)..(1377): 931254mologous to Homo sapiens Human PRO1313 protein sequence SEQ ID NO:216,accession number B24431,Smith-Waterman Score=741.
aagaaccacagtgtcagaaatgaaagagtacaacttcacagaatgtgttgtctctgacaggttgatagccacttaccttctccatcttttcttcctcaaggatagcagctgcttcccacagatacaccaacaggcaattccagcccctctctaccacacttaccatttgcaggtgcctgtggcttgtctatttacaaccttgtccctacacagcagaagcggaacccttcaggaagttctggattcatcctcagcaggatctgtttcacaaactattctccagtcccaccttccctccagatgttcttccggcttcaattgccacctgtgaatagtgaagaaacttctcactatgagattccattgcccggaaggagggtagagctacggtacccactaaggcagggaacagaagcaacagacggacaggtctgtggaaatgaggatatgctaataagggaccgagtcaggaaaactagagggtcagcaccgcccccagcccacaacctggcacccacggaagttgctttagaggacgtcctgcgtatcttcacctctgcgtggcgtggggtcgacggcgctctggagaagggaggaacttcctgtcccgcgcgcgcacaacttccggcagagccggaagaccctctctttcgctgtttgagagtctctcggctcaaggaccgggaggtaagaggtttgggactgccccggcaactccagggtgtctggtccacgacctatcctaggcgccatgctatagcagagcatgcagggtcaccaaagccactcaggaagagggaaccagaaacctggcaagctaacaaaaagggtgtgataggtatacagctggttgttaccatggtgatggccagtgtcatgcagaagattatacctcactattctcttgctcgatggctactctgtaatggcaggaaatataatggtcacattgaaagtaagccattaaccattccaaaggatattgaccttcatctagaaacaaagtcagttacagaagtggatactttagcattgcattactttccagaataccagtggctggtggatttcacagtggctgctacagttgtgtatctagtaactgaagtctactacaattttatgaagcctacacaggaaatgaatatcagcttagtctgcaaagttctattttcattaactacacactattttaaagtagaagatggtggtgaaagatctgtttgtgtcacctttggattttttttctttgtcaaagcaatggcagtgttgattgtaacagaaaattatctggaatttggacttgaaacagggtttacaaatttttcagacagtgcgatgcagtttcttgaaaagcaaggtttagaatctcaaactttacttcatatcaacttcttggcacctttatttatggttctgctctgggtaaaaccaatcaccaaagactacattatgaacccaccactgggcaaagaaagtatccctttaatgacagaagccacattcgatactctgcgactctggttaataatcctgctgtgtgctttgcggttggccatgatgcgtagtcacctgcaagcttatttaaatttagcccaaaaatgtgtggatcagatgaagaaagaagcggggcgaataagcacggttgagctacagaaaatggtggctcgagtcttttattatctttgtgtcattgcactgcagtatgtggcgcctctggtaatgctgcttcacacaactctgcttttgaaaacactaggtaatcattcctgggggtatttatccagaatctatctctaccttaccagtggataatagtctactgtccaattctgtttactctgaattaccatcagctgaagggaaaatgaaggtaactgttacacaaataacagtggcactgagcagcttaaaaaatatttttactcctcttctttttcgaggacttctgtcttttctgacctggtggtattgctgcttgcctcttttctatcaagcctttttgggcttttctatcaccagtatctgactgtggcatgaatctcagttaacaaaaaagtcatatccaaatcaccctttaaattaaaatatctgtgcccttaaagggctgatgaaaaccagaagaaagcaaatacaatggg

SEQ ID NO: 27845 - DNA, 2850 bp, Homo sapiens
  SIMILAR (1287)..(2078): 291254mologous to Mus musculus type III collagen,accession number X52046,Smith-Waterman Score=136.
gtagagagttgcacagtggaagagggctgcatgtaagaaggcagttctgtctcagaggacaaaaggcctgggagcacccagacagacagtcactgcatggaggtcactccctcccagtggccactgtggagacatttcacagaaatgcttgctggaccattcaggttcagagttgggacaaaaccgagaactcatggggatattggacaggagttaggaaatgaccttctcacacaactggggcagtgggggagaaccctgggcttgagacttgcaatccaccacttgcccctgcccctgcccctgcagtgtggccgctgttaccttttcctgcaactctgccttcttgagtccaaatgtcttcgaaaggggcaaatgcttcaatgtctggggtcctatgttccaggaacctgtttactttcaaattttccctgtttcagttggactcaggagcatctggtgagccaggtcactctctgggtcttacccttggcttttcttattgcggaaactgccagacggcggtggtcagtgcccagcctgaggggatggcttcgaatggagagcttcctgagtggcagccgggaccatcgagtactgcggaaagggtggcccgaatctgacccctatttagcacttgctgtgggtggtgccaggacaatcacttgcatgctgggcatgacgagttatggattatcttcagggttcctagggcgctggcttgggaaagatttccatccagtggttttgttttgcacacctctggtgacagaacaggatggctgcggcccgagtggggccggggcttccaacgtctttgtccagatgaggacagaggtggggcctgtgaaggccgctcaggcgcagaccttggtcctaactcaggcccccctcgtctggcaggctccaggcgccctctgcggaggtgttgtgtgtccacctcccctactcctggcagctgctcctgtggtgcctgttatggctgcccaggtggttgggggcacccaggcctgtgagggaggctggagtgtctatgagaactttcgactctggcagcactacaagcccctggtccggaggcaccttccccagagtcctgacaccgaagcgctttcgtgcttcctcatgtcattctgtgtgcacgctgtctcagtcagctcaggctctgccgtaacgaatgccgtagactgggtgctttatcaagacacattcatgtctcccagttccagaggccagaagtcccagatcaaggtgacagcagattgggtgtctgttctccgatcgctggcccggcggaagcccaccatgaccctggaggagggactgtggcgggccatgcgggaatggcagcacacgagcaactttgaccggatgatcttctacgagatggcggaaaagttcctggagtttgaggctgaggaggagatgcagattcagaaatcgcaatggatgaaggggccccagtgcctgcctcctccagccacaccgaggcttgaacctcgaggacccccggcccctgaggtggtcaagcagccagtgtaccttcccagcaaggccggccccaaggccccgactgcctgcctgccaccacccaggccccagaggccagtgaccaaggcccgccggccaccaccccggccccaccggcgagcagagaccaaggcccgcctgccaccacccaggccccagagaccagcagagaccaaggtccctgaggagatccccccagaagtggtgcaggagtatgtggacatcatggaggagctgctggggccttccctcggggccacgggggagcccgagaaacaacgggaagagggcaaagtgaagcagccacaggaagaggactggacgcccccagacccgggcctcctgagctacattgacaagctgtgttcccagaaagacttcgtcaccaaggtggaggccgtcattcatccccaattcctggaagaattgctttccccagatccacagatggatttcttggccctaagccaggacctggagcaggaggaaggactcacccttgcccagctagtggagaagcgcctcccacccttgaaggagaaacagcatgcgagggcagcccctagtcgtggcacagcccggttggactcaagttcttctaagtttgcagctggccaaggagcagagagagacgtccctgacccccaacaaggggttggcatggaaacctgcccaccccagatgactgcccgggactctcagggacgaggcagagcacacactggcatggccagggagccccttcagatgctccagggactgacagatgctgaggaagccctgatccctcccactaccgactcacaaggccctgcctgctttagggaggcttcttggggccccccatcgtcatcagcatccctggaaaatcctgggattggagagagctggctggctcttgttctgctcgaacacagcagtcagcctgacagatgcccctctgccccgtcccttctgctcgatgtgggcagtgtcggaggcctgctgtcttctgtggcctttgggaaggagagtttatcttggcagggcttccccagctcagtgcacatcaggccctcggggaaaatgtggggagcgaagagtcactggtgggtgatgtgggcagctcccgtgactcctctacattcagggccatcctcaagagataagattaagggtacttactatcagcaaaagagtgaaagtctgacagaaaagaaaaagatggaaagaaatgtggggatgtgcaattccttatgttggttggttcagcagagctttgccgttgttcagatggagtttaggcaagcaaaagatgaccagccattgctgggtatttga

SEQ ID NO: 27846 - DNA, 2433 bp, Homo sapiens
  SIMILAR (2086)..(2430): 1001254mologous to Plasmid F Protein D,accession number M12987,Smith-Waterman Score=584.
atgaacgctcccgccttgagcacagccacaggcctgctctggtcacaatgtggggtcgccccgtggacactggtgaccagtgggagcatgaccaggagaatgtctggggtcctatgttccaggaacctgtttactttcaaattttccctgtttcagttggactcaggagcatctggtgagccaggtcactctctgggtcttacccttggcttttcttattgcggaaactgccagacggcggtggtcagtgcccagcctgaggggatggcttcgaatggagcatacccagtgctgggaccgggcgtgaccgcgaaccctggcacctccctgtctgtgttcacggctctgcccttcaccacacccgctcccggcccagcacacgggccgctccttgtgactgcaggggctcctccaggcggccctctggtgctgtctaccttccccagcacacctctggtgacagaacaggatggctgcggcccgagtggggccggggcttccaacgtctttgtccagatgaggacagaggtggggcctgtgaaggccgctcaggcgcagaccttggtcctaactcaggcccccctcgtctggcaggctccaggcgccctctgcggaggtgttgtgtgtccacctcccctactcctggcagctgctcctgtggtgcctgttatggctgcccaggtggttgggggcacccaggcctgtgagggaggctggtcccagggccttcctcttccaccaccaccaccaccggctgcccagctgccccccattgtgtcccaagggaatgctgggccatggccacaaggggctcatggagagagcagcctggcttcctcccaggccaaggccccgccagatgactcctgtaaccccaggagtgtctatgagaacttccgactctggcagcactacaagcccctggcccggaggcaccttccccagagtcctgacaccgaagcgctttcgtgcttcctcatcccagttctccgatcgctggcccggcggaagcccaccatgaccctggaggagggactgtggcgggccatgcgggaatggcagcacacgagcaactttgaccggatgatcttctacgagatggcggaaaagttcctggagtttgaggctgaggaggagatgcagattcagaaatcgcaatggatgaaggggccccagtgcctgcctcctccagccacaccgaggcttgaacctcgaggacccccggcccctgaggtggtcaagcagccagtgtaccttcccagcaaggccggccccaaggccccgactgcctgcctgccaccacccaggccccagaggccagtgaccaaggcccgccggccaccaccccggccccaccggcgagcagagaccaaggcccgcctgccaccacccaggccccagagaccagcagagaccaaggtccctgaggagatccccccagaagtggtgcaggagtatgtggacatcatggaggagctgctggggccttccctcggggccacgggggagcccgagaaacaacgggaagagggcaaagtgaagcagccacaggaagaggactggacgcccccagacccgggcctcctgagctacattgacaagctgtgttcccagaaagacttcgtcaccaaggtggaggccgtcattcatccccaattcctggaagaattgctttccccagatccacagatggatttcttggccctaagccaggacctggagcaggaggaaggactcacccttgcccagctagtggagaagcgcctcccacccttgaaggagaaacagcatgcgagggcagcccctagtcgtggcacagcccggttggactcaagttcttctaagtttgcagctggccaaggagcagagagagacgtccctgacccccaacaaggggttggcatggaaacctgcccaccccagatgactgcccgggactctcagggacgaggcagagcacacactggcatggccagttcctgtgctgaagccctaacccccaacgtgatggtatttggaaatggggcctttgggagttattcagggttagaagagaccatgagggtatttattcgcgataagctcatggagcggcgtaaccgtcgcacaggaaggacagagaaagcgcggatctgggaagtgacggacagaacggtcaggacctggattggggaggcggttgccgccgctgctgctgacggtgtgacgttctctgttccggtcacaccacatacgttccgccattcctatgcgatgcacatgctgtatgccggtataccgctgaaagttctgcaaagcctgatgggacataagtccatcagttcaacggaagtctacacgaaggtttttgcgctggatgtggctgcccggcaccgggtgcagtttgcgatgccggagtctgatgcggttgcgatgctgaaacaattatcctga

SEQ ID NO: 27847 - DNA, 2795 bp, Homo sapiens
  SIMILAR (1105)..(2658): 971254mologous to Homo sapiens bA119F19.2 (hypothetical 66.8 KD protein),accession number AL132656,Smith-Waterman Score=2706.
atgcttgctggaccattcaggttcagagttgggacaaaaccgagaactcatggggatattggacaggagttaggaaatgaccttctcacacaactggggcagtgggggagaaccctgggcttgagacttgcaatccaccacttgcccctgcccctgcccctgcagtgtggccgctgttacattttcctgcaactctgccttcttgagtccaagtgtcttcgaaagggcaaatgcttcttggactcaggagcatctggtgagccaggtcactctctgggtcttacccttggcttttcttattgcggaaactgccagacggcggtggtcagtgcccagcctgaggggatggcttcgaatggagcacacgggccgctccttgtgactgcaggggctcctccaggcggccctctggtgctgtctaccttccccagcacacctctggtgacagaacaggatggctgcagcccgagtggggccggggcttccaacgtctttgtccagatgaggacagaggtggggcctgtgaaggccgctcaggcgcagaccttggtcctaactcaggcccccctcgtctggcaggctccaggcgccctctgcggaggtgttgtgtgtccacctcccctactcctggcagctgctcctgtggtgcctgttatggctgcccaggtggttgggggcacccaggcctgtgagggaggctggtcccagggccttcctcttccaccaccaccaccaccggctgcccagctgccccccattgtgtcccaagggaatgctgggccatggccacaaggggctcatggagagagcagcctggcttcctcccaggccaaggccccgccagatgactcctgtaaccccaggagtgtctatgagaacttccgactctggcagcactacaagcccctggcccggaggcaccttccccagagtcctgacaccgaagcgctttcgtgcttcctcatgtcattctgtgtgcacgctgtctcagtcagctcaggctctgccgtaacgaatgccgtagactgggtgctttatcaagacacattcatgtctcccagttccagaggccagaagtcccagatcaaggtgacagcagattgggtgtctgttctccgatcgctggcccggcggaagcccaccatgaccctggaggagggactgtggcgggccatgcgggaatggcagcacacgagcaactttgaccggatgatcttctacgagatggcggaaaagttcctggagtttgaggctgaggaggagatgcagattcagaaatcgcaatggatgaaggggccccagtgcctgcctcctccagccacaccgaggcttgaacctcgaggacccccggcccctgaggtggtcaagcagccagtgtaccttcccagcaaggccggccccaaggcccagactgcctgcctgccaccacccagaccccagaggccagtgaccaaggcccgccggccaccaccccagccccaccggcgagcagagaccaaggcccgcctgccaccacccaggccccagagaccagcagagaccaaggtccctgaggagatccccccagaagtggtgcaggagtatgtggacatcatggaggagctgctggggccttccctcggggccacgggggagcccgagaaacaacgggaagagggcaaagtgaagcagccacaggaagaggactggacgcccccagacccgggcctcctgagctacattgacaagctgtgttcccagaaagacttcgtcaccaaggtggaggccgtcattcatccccaattcctggaagaattgctttccccagatccacagatggatttcttggccctaagccaggacctggagcaggaggaaggactcacccttgcccagctagtggagaagcgcctcccacccttgaaggagaaacagcattcgagggcagcccctagtcgtggcacagcccggttggactcaagttcttctaagtttgcagctggccaaggagcagagagagacgtccctgacccccaagaaggggttggcatggaaacctgcccaccccagacgactgcccgggactctcagggacgaggcagagcacacactggcatggccaggtccgaagactctgttgtgcttttgggatgtcaggattcccctgggctgagggctgcccggccaacctctcctccccaggaccacagacccacctgccctggcgtgggtaccaaggatgccttggatctccctggagggtctcctgtcagggagtcacatgggctggctcaggggtcaagtgaggaggaggaactccccagcctggccttcctcttgggttcccagcacaagcttctgccctggtggctaccccagagccctgtccctgcctcgggccttctcagcccagaaaagtggggaccccagggaactcatcagtccccatctgctgagagaagaggcctcaacctagcaccttctcctgccaacaaggccaagaagcaacctctctttggaagcctgtcccctgctgaaaagacaccccaccgagggcctgggctcagggtctctggggagcaatccctgacttgggggctgggtggcccctcacagtctcaaaagagaaagggtgaccccttggtctccaggaaggagaagaagcagcattgtagccagtaggggcttctgagcaggctctctggggctgatccccaaggatggggctctggcatccgatgccccaaagcggtcaaaagctatattctccctcagtgctgatcttgctgggccttagcacgaaatcgtcgacccgg

SEQ ID NO: 27848 - DNA, 534 bp, Homo sapiens
  SIMILAR (316)..(501): 371254mologous to Homo sapiens Human bcl2 proto-oncogene mutant protein fragment 14,accession number Y21166,Smith-Waterman Score=81.
cggagagaaaacttaaaatgtttccacattatcaagcccccttcagaagtactgtggtctcggcccctcctttgaacagatgtccgctcgccacagtccaatcaggtttaaagcaagagtatttgtactgaaaacaagcttaaagtgggaagacacacacaaagcaggcctgtatcattcctttggtttcagttttcacgatgcacccttgaggctaggcacgctgattcaacacacttggagagcttcaccgaaacacactaaacacacagtgatgaactgtgccctggcagagatgacctggcaaaattctcaacttcttccctgaggcagtgcacccgcagttctcggcggcgaagtctttgggtaccgcggcgccagaggccgaggcccagccgcgcctgccttcctctttctcccgcccactgccaacctccagtcgcccgcagaacctccgctgcctcggcgcgaccccatcgccaccccggggctgccgctcgggaccggcaagcagggtagccgcgaggcggccgc

SEQ ID NO: 27849 - DNA, 1074 bp, Homo sapiens
  SIMILAR (226)..(1029): 961254mologous to Escherichia coli ATH1 protein,accession number D90769,Smith-Waterman Score=1362.
  misc_feature (1)...(1074): n = a,t,c or g
atgatccgctctcggcgaccgcaagtcccggctcgcccggcgcctgcgcggcaacgggggtgggatctgcggacgcccatagagcaccagtggagggagcgttaccttagccttggcaagggagccctgcaaggaccttacaaggacacagaggaggctggagatgcctcaagcacgggggacttttcggtggggattttgggcgccgaccagacgcggcattttcggaaaatagcgccctgtgcagctgaagcgctttcgcacgatcagcaagcgttagattatgcgctttatcatttgcgcatcatgacgctggcccacgacgagcgcagcagcattgcggcaaaaggcttaacgggcgaaggctacaaaggccacgttttctgggatacagaagtatttttgttaccgtttcatctgtttagcgatccgacggttgcccgaagtttactgcgttatcgctggcacaacttgccaggcgcgcaggagaaagcgcgacgcaacggctggcagggcgcgctatttccgtgggaaagcgcgcgcagcggcgaagaagagacgccggaatttgccgccattaacattcgcaccgggctgcggcaaaaagtggcctcggcgcaggcggaacatcatctggtggccgatatcgcctgggcggttattcaatactggcagaccacgggggatgaaagtttcattgcgcatgaaggcatggcgctacttctggagacggcaaagttctggattagccgcgcggtgagagttaacgatcgtctggaaattcatgatgttattgggccagacgaatataccgaacatgtcaataataatgcatacaccagctatatggcccgctacaacgttcaacaggcgctgaatattgcccgccagttcggctgtagcgacgatgcgtttatccatcgcgccgaaatgttcctcaaagagctatggatgccagaaattcagcccgacggcgttttgccgcaggatgattcgtttatggctaagccggcgattaatctggcgaaaaattggacgggaaacncttgtaaaggtccaggaaaggacgagtga

SEQ ID NO: 27850 - DNA, 927 bp, Homo sapiens
  SIMILAR (885)..(280): 991254mologous to Escherichia coli N-acetylmuramoyl-L-alanine amidase,accession number L19346,Smith-Waterman Score=1030.
tcactcgcacaccatgtgtccctccgcgcgcagcacgggggacttttcggtggggattttgggcgccgaccagacgcggcattttcggaaaatagcgccctgtgcagctgaagcgctttgtgtgtagcggggccgcgtcagcccggccgggtacgaggcgcctcgggtccccgcaccacctcctgctgccttcccgtcgccgctcccgaagcttttccaggtcagtgcgggtctgtgtagggccctgttaccaccggatgtggaagttgatctcttcgcaagcagctccgactgtttctcgtgctgctccagccagctggccatttcactgttggcgcgacggttagagagcacccatacggaagcgccagtcgcactgcggttcggtgcggcatcagcgtgaatcgacacgaggaaattggcgttttgcttacgtgccacatcactgcgccccatcaccgagataaagtaatccccgtcacgggttaaaacgcctttaaacatcggatcgtcattgagcaaagtacgcaatttacgcgcgatggcgatggtgacatttttctcccgcgtaccaccggggccgatagcgccagggtcctgaccgccgtgtccggcatcaatagcgatgataattttatcgccagtgttagccgtcgcgcgcgctgccggacgcgttaccgtattactgctgataacacccgtagtgcggttactttccgttttaaacggattgcgcgccggttcgctgacgcgcggtgcgacaaccgcaggcgtttcaacgcgtttcgcaaccacgggcggcggaggaggcggtggcggcacatcggcgttaatcgtaaagacgacagtgtaattgctgccattctgccgcttcaccgctgaggtcaagagtttgagaccagcctggctaacgcggtgaaaccccat

SEQ ID NO: 27851 - DNA, 1264 bp, Homo sapiens
  SIMILAR (1248)..(1207): 1001254mologous to Escherichia coli L-histidinol dehydrogenase (AA 1-434),accession number X52656,Smith-Waterman Score=64.
ctcgcacaccatgtgtccctccgcgcgcagcacgggggacttttcggtggggattttgggcgccgaccagacgcggcattttcggaaaatagcgccctgtgcagctgaagcgctttgtgtgtagcggggccgcgtcagcccggccgggtacgaggcgcctcgggtccccgcaccacctcctgctgccttcccgtcgccgctcccgaagcttttccaggtcagtgcgggtctgtgtagggccctgttaccaccggatgtggaagttgatctcttcgctggtaaaaaataattccacttcccccggaacccagatcatccccgcgatttcctgtttattgcattaaggcgccgggtttccggggctcctggccccgcttattccgcgggggtcggcggggtcggcctgggcgcccgcgccgccgctgcgctttgtccgctgggcacactgcttctgggaggggcgggcagacatggtggcggccgccgccccctcctcggccctagcatgccgcggccgcctcgcggctacccggcttgccggtcccgagcggcagccccggggtggcgatggggtcgcgccgaggcagcggaggttctgcgggcgactttccttcacaaatatgctgtgaccttcgtccgcgccacggctgaccagcacctgctccggttttacgcctgcatattgcgcgtaattttcaatcaccgctttcggctggcattccgggtagcggttgagcgtttgctgagtaagctgaaactccacggcagtggggtattcgttggcgttcagccagacatcgccgttaccgcccagacgacgcgccgactgatacggcgtcaggttgcggacgttttcacgcgctaaatcggtaatagtcacggtgctcatgcttgctcgcaaagtaacggcatttttgtgggcggtcaggcgctcggcggcggccagtgtttctatggttgaagccagcgcggagaacccctctttcgacagttcctgtacggtcatgcgcttctggaaatctgccagcccgaggctggaacaggtggcggtgtaaccgtaagtcggtagaacgtggttggtgccggaggcgtaatcacctgccgattccggtgaccagtcaccaagaaataccgaaccggcgctggtgatgctatcgaccagttcacgggcgttgcgggtctgaatgatcaggtgctccgggccgtaaggcggcttgcgttcaatgcctggcgggcggtttcggcacgccggcagttttgccat

SEQ ID NO: 27852 - DNA, 1904 bp, Homo sapiens
  SIMILAR (1647)..(1901): 671254mologous to Homo sapiens S-adenosylhomocysteine hydrolase,accession number M61831,Smith-Waterman Score=298.
ctatgttaacatgtaatggatttattttttgtttttggaaaaaaaaaaccaagagaaaagaaaataaagtcatctttagtttccttaaattcaaagtctgagcctgaaaatggaagtatcaaagctgatggttatacgtcagtgagaaaaaaatttaaaccaagctgggtgggtctttacatgagataaactatctacaggaaagaatgaccactaacttctgcataataaatgagagtggatcttttaattctgagatggcaatgtactttacaaggaccatttacagactacatcaaacctttttctagataaaaaacgtacttcagtaacttgcctggaattgaagagagcaaaacaggtccgggagaggaaaactttaaaatggtttccacattatcaagcccccttcagaagtactgtggtctcggcccctcctttgaacagatgtcggctcgccacagtccaatcaggtttaaaagcaagaggtatttgtactgaaaccaagcttaaagtgggaagaacacacacaaagcagggcctgtatcattcctttggtttcagttttcacgatgcacccttgaggctaggcacgctgattcaacacacttggagagcttcaccgaaccacactaaacacacagtgatgaactgtgccctggcagagatgacctggcaaaattctcaacttcttccctgaggcagtgcacccgcagttctcggcggcgaagtctttggggcagaaatcccgaagccttcaagaaacggcaggcttctcccccctcaagacttccaagtcccccgcggccacagcgtgtcgctgcgggggccccgcgcgggactggccaggctcttccattaaccctgtctggtccggccgatcccgccgcggaccccgacgcgtctcggccccgcagcacagggcgcccaggaccccgccaccctcgccgcccgttcccctctccggagagcccggcggggccgtcaaggctgccgagacaaagggtaccgcggcgccagacgccgaggcccagccgcgcctgccttcctctttctcccgcccactgccaacctccagtcgcccgcagaacctccgctgcctcggcgcgaccccatctgccatccccgggcgtgctcgctcgtggaccggcaagccggcgaagagatcaacttccacatccggtggtaacagggccctacacagacccgcactgacctggaaaagcttcgggagcggcgacgggaaggcagcaggaggtggtgcggggacccgaggcgcctcgtacccggccgggctgacgcggccccgctacacacaaagcgcttcagctgcacagggcgctattttccgaaaatgccgcgtctggtcggcgcccaaaatccccaccgaaaagtcccccgtgctgcgcgcggagggacacatgaacataaacgaagagcttaatcccaacgcacttgtctttgtcctccttcctgtctatgtgttatgcatcttctcaattagaaggcatgtctgtacagctcagcagctcaggagtaaatgcaaggagtctcggtctgtccccagagctgaaagtgcagttgcgggatgtcagctaaagctgcccaacaggcactttgaacagatgaaggatgatgccatcgtgtgtaacactggacactttgacgtgaaaatcgatgtcaggtggctcaacaagaatgctatgaagaagattgagctgtggacccactcagataagtaccccattgaggttcacttcctgcccaggaagctggatgaggcagtggctgaagcccatctgggcaaggtgaacatgaaactgaccaagcagactgagaagcaggcccagtacctgggcatgtcctgtgatagtctcttcaagctggatcactaccactactga

SEQ ID NO: 27853 - DNA, 419 bp, Homo sapiens
  SIMILAR (233)..(204): 501254mologous to Homo sapiens Human erythropoietin mimic, peptide 4,accession number W40214,Smith-Waterman Score=48.
aagaggcaagagagcacaggttcttgattgttcttgtagctggtttgtctctgttgttaaaacagggttctgcatacatcctgaggttccttcctgccttaccaatattgaatgccaaaaaggagtcaactgacttgaccaggtctatatttcttttctgtcgctccaggattcttctacagccagatgattccttacagatcttggcaccagtggaagcagatgtgggtttctacacttgcaatgccaccaatgccttgggatacgactctgtctccattgccgtcacattagcagcaacagtattcctgcccccatgacttcaggctgatctgggaagggacccttagcaggcggctttgcggggaagatcacagtcaacaatgaagaaggcaatttaaggagccctgggccggatg

SEQ ID NO: 27854 - DNA, 405 bp, Homo sapiens
  SIMILAR (99)..(70): 501254mologous to Homo sapiens Human erythropoietin mimic, peptide 4,accession number W40214,Smith-Waterman Score=48.
cttacttctacttcctgcctttcctctgacaggaggattcttctacagccagatgattccttacagatcttggcaccagtggaagcagatgtgggtttctacacttgcaatgccaccaatgccttgggatacgactctgtctccattgccgtcacattagcaggattatgttgtcatactgtactccagtcacacatgctacccccttgcatatctgtttagcaacagtattcctgcccccatgacttcaggctgatctgggaagggacccttagcaggcggctttgcggggaagatcaaagtcaacaatgaagaaggcaatttaaggagccctgggccggattaaagactgatattattaatgcctattttttgtgaataaaacatttgcttttcttctaaaaa

SEQ ID NO: 27855 - DNA, 508 bp, Homo sapiens
  SIMILAR (2)..(508): 341254mologous to Drosophila melanogaster neuroglian precursor,accession number M28231,Smith-Waterman Score=222.
ctgtgaggccatcggccacccaaggcctaccatcagctgggccaggaatggagaagaagttcagttcagtgacaggattcttctacagccagatgattccttacagatcttggcaccagtggaagcagatgtgggtttctacacttgcaatgccaccaatgccttgggatacgactctgtctccattgccgtcacattagcaggaaagccactagtgaaaacgtcacgaatgacagtgatcaacacggagaagcctgcagtcacagtcgatataggaagcaccatcaaaacagtgcagggagtgaatgtgacaatcaactgccaggttgcaggagtgcctgaagctgaagtcacttggttcaggaataaaagcaaactgggctccccgcaccatctgcacgaaggctccttgctgctcacaaacgtgtcctcctcggatcagggcctgtactcctgcagggcggccaatcttcatggagagctgactgagagcacccagctgctgatc

SEQ ID NO: 27856 - DNA, 1014 bp, Homo sapiens
  SIMILAR (379)..(453): 521254mologous to Homo sapiens DCC,accession number M63702,Smith-Waterman Score=78.
atggtgaccgagcattggcgcctggacgacatcctggggaacctctcccagcagcccgaggagctgcgcgacctctacagcaagcacctggtggcccagctggcccaggagatcttccgcagccacctggagcaccaggacacgctcctgaagccctcggagcgcaggacttccccagtgactctctcgcctcataaacacgtgtctggcttcagcagctccctgcggacctcctccaccggggacgccgggggaggctctcgaaggccacaccgcaagcccaccatcctgcgcaagatctcagcggcccagcagctctcagcctcggaggtggtcacccacctggggcagacggtggccctggccagcgggacactgagtgttcttctgcactgtgaggccatcggccacccaaggcctaccatcagctgggccaggaatggagaagaagttcagttcagtgacagatggagaaggttcagtggaatcttgatagaaacagagacgtggcagccaggtgcaaagaacactaaagcactgggcctaggcaagcagagggaaagtcctggattctccatcatccaggacatcgttgtgggggagggtagcactaagaggagctgcccatatataactcgattgattgatggaagccttacttctacttcctgcctttcctctgacaggaggattcttctacagccagatgattccttacagatcttggcaccagtggaagcagatgtgggtttctacacttgcaatgccaccaatgccttgggatacgactctgtctccattgccgtcacattagcagacataagcacagagattggagaatcatcttggctgttaaattcagcactcagccatcttgctcagaaatcttccaaatccgaatggcctaggcaaacttttgaaggaaaggaagtagttccaggcagtatctctactcctggtggggaatatttagctttgacattgccaagtctcctcttggtcttgtcctcctga

SEQ ID NO: 27857 - DNA, 702 bp, Homo sapiens
  SIMILAR (322)..(645): 981254mologous to Homo sapiens A rod shortened dystrophin (deltaDysH1),accession number Y59241,Smith-Waterman Score=548.
atgaaaaaccacatgattatctcaatacatgcagaaaaagcatttgataaagctaaacatccttttattattataactcttcgcaaaatatgtatggaaggaaatttcctcaacatcaaggctatttatgaaaagcctatagctaatatgatcaacggtggttgtggggtggttgtactgaaagctttccccttaagatttgctaaaaagcaaggatgcccactcttaccacttccatttgtcatagtaccaaaaatactagcaggagcaagtctcaaatatagaaaccaaaaattgatgtgtagtgttaatgtgcttacagatgttgataccacctatccagataagaagtccatcttaatgtacatcacatcactcttccaagttttgcctcaacaagtgagcattgaagccatccaggaagtggaaatgttgccaaggccacctaaagtgactaaagaagaacattttcagttacatcatcaaatgcactattctcaacagatcacggtcagtctagcacagggatatgagagaacttcttcccctaagcctcgattcaagagctatgcctacacacaggctgcttatgtcaccacctctgaccctacacggagcccatttccttcacagcctctaaaagccaccactctaatctctgattctctgagtttggcaattttagatacctggtgtgagtag

SEQ ID NO: 27858 - DNA, 1542 bp, Homo sapiens
  SIMILAR (295)..(348): 501254mologous to Homo sapiens partial similarity to human WT1,accession number AB016901,Smith-Waterman Score=56.
tcaggccctggcccgggccactcggccacattctgcatctgcttccgatccccaggactgtggagaagccacgtcgtgtcctacagagtcctgagggcctcgcatgtgcatgtgaccactgaccgtccactgccagggcgttcttcccaagtgcgaccatggggactctgctgagcactccacactgtcctttccttcgtctgccttcctcaggcatacggcagtgaatcctgcagaagtctcaacaggctcagtaccaggacccagcccttcaccacattcagtggcccttccaagcatgtggccccagaccaggagctcctgcggcactgggaaggtggctgcccaggctgagatcaggaggccgtacctctgaacgagggcaggactgttcttcacaggcagctttcctccaaggaggcagaggacggcactggcacgttcactcagcagccaacattggcaagcacccactctaccccgtggcccggggtgccactgcccatggagcttggaggtgccaactgctgccagtgaccttgggtaagtcattttgtgcttgatccttgcatccccatctgagaccccatcagcgctgacaccataggccccaagagcctgtgaccatggctggtgagagctccccagaacagtggggctctcagagaagtagagtgaggagcacagagagacggatgggtaggtcctttctattttgtctgtctctctcctgccccagatacccactagaatgttggctccatgaggacatggatttgtgtctgcttcagtcactgttgcacccctacccagcccagcatccggggcattgcaggctctaacaccgggcctctgggactcagtttccttgtctgtaaaaatgggggggagcgtaagaagctgcgacggggtgaagtgagcagagacgaggtctgatttggattttgtgaaggtttctggctctcctcctccaagactttctgcgtgcaccagcatcttccattttgtgtttcctgtctgcctctggactctctggcgtccatccagccacttcagtgcgacgtgtgactgctgcttgtgcccttccccaggagtggctgtgttccgctcatcatggaggcctggtgcccggcacagtgcgcacttcaaggcctcagagcatgtttccctcttctgtgatgcaggcctagaggtggcagttctggaaagttcctcctcaccttgcaggggaaactgttgaggtggagggcacttgtccagggcagcacagctgttggccgcgcactctgccttccgaacacgttcctgtactgcttgccgtgcacggagggccacgttcatgcctttggggccacgacagctctctctggaagggaccgtctggccacatctgactgccaagtgctgccggggagaacctgctgaaggtgctggacgtggctgtcggggcgctgggccgccctccagccaaggctcctggcctagagccaggctggacgccagcagggctgtgtgcagcttggccagctttggagctcccat

SEQ ID NO: 27859 - DNA, 549 bp, Homo sapiens
  SIMILAR (1)..(324): 991254mologous to Homo sapiens Human secreted protein sequence encoded by gene 19 SEQ ID NO:72,accession number B25683,Smith-Waterman Score=609.
tcagtctgtctcctcctcttgtgtccaagggaatgtatcgctcccgctggctcagaaccatggctgtgccagccggcacccaggtgtggagacaagatctacaaccccttggagcagtgctgttacaatgacgccatcgtgtccctgagcgagacccgccaatgtggtcccccctgcaccttctggccctgctttgagctttgctgtcttgattcctttggcctcacaaacgattttgttgtgaagctgaaggttcagggtgtgaattcccagtgccactcatctcccatctccagtaaatgtgaaagcagaagacgttttccctgagaagacatagaaagaaaatcaactttcactaaggcatctcagaaacataggctagggtaatatgtgtaccagtagagaagcctgaggaatttacaaaatgatgcagctccaagccattgtatggcccatgtgggagactgatgggacatggagaatgacagtagattatcaggaaataaataaagtggtttttccaatgtacacacctgtacccaaaaaaaa

SEQ ID NO: 27860 - DNA, 1338 bp, Homo sapiens
  SIMILAR (1269)..(1301): 721254mologous to Homo sapiens Human secreted protein sequence encoded by gene 19 SEQ ID NO:72,accession number B25683,Smith-Waterman Score=51.
tttgggtttggacgggtgcgtttgtttttcatagtgcaggtctggagccggactgagatggggagtagagggaccccttgaaacttcagggtggatgaatatgaagtttcatcaccagctgtgatgtttgatattggactgtggttgtgccagttgacactcaggagtggagactagatctgcaatctgttgggactgtgatgaggggatcatcctgccctcgaaccagacccagccctgtagcccaggcactattgcctggagttcctgggctctcagcgccaggaaatcatgaggttcagtgtctcaggcatgaggaccgactaccccaggagtgtgctggctcctgcttatgtgtcagtctgtctcctcctcttgtgtccaagggaagtcatcgctcccgctggctcagaaccatggctgtgccagccggcacccaggtgtggagacaagatctacaaccccttggagcagtgctgttacaatgacgccatcgtgtccctgagcgagacccgccaatgtggtcccccctgcaccttctggccctgctttgagctctgctgtcttgattcctttggcctcacaaacgattttgttgtgaagctgaaggttcagggtgtgaattcccagtgccactcatctcccatctccagtaaatgtgaaaggtctagtctattgttgacttacccaacctctcaaggagaaaatgcgagtacacttactttatcttttgataactcccttcttgaactccccatcagtatgaagctcaccctgttgaatggcctagatggaggatattacaaggaaccaaaaggacattcaggaaaaaacaaaaactacatagagggaggaggaataaaatatcaggtgggaaagaaagaagtggctggtaacaccctcagcatagctgaaagtttcccaatcatggaaaaactggatgttgaaaatccagatagcagctgccaagtcaaggaacctgggctcttccctctactggataaaggcccctcagtatgcaccatccccacaatgccagcatttctcaatggactggacctcaaagtgggggagaagcagctgtcttggcgtctctctgcatcctcagccttctctgatcatgtggagcccccagtggcccccatgggtgcttatctgatgctgtgccagccacaggcaagatgtggggacacgttctgtgaccctctgcagcactgctactatgacaatgccatcctgccctcggatgggacccagaggggtggaactgcaccttcagagtctgcttcgagaagtgctgcccctggtccctcagtcccccagcgtccctcatggtga

SEQ ID NO: 27861 - DNA, 481 bp, Homo sapiens
  SIMILAR (34)..(228): 901254mologous to Homo sapiens ribosomal protein S20,accession number L06498,Smith-Waterman Score=300.
  misc_feature (1)...(481): n = a,t,c or g
ntaacggcgctcctggaactgatcngcatctgcagggncgacccacgcgtncggagaatcactacaagaaaaactccttgtggtgaaggttctaagacgtgggatcgtttccagatgagaattcacaagcgactcattgacttgcacagtccttctgagattgttaagcagattacttccatcagtattgagccaggagttgaggtggaagtcaccattgcagatgcttaagtcaactattttaataaattgatgaccagttgttnnnnnnnnnnnnnnnnnnnnnnnnnnnggggggggccgttttaaagaatccttgggggggcccaattttaccggggcttgaaaggttatatttttttccttttgggggggcgtattaaaacctacctggggattttgggaaagaaccctttttttgggggggggccttattgggccaacctcccttcaaaaattaaaggctttaggggtaatataa

SEQ ID NO: 27862 - DNA, 276 bp, Homo sapiens; identical to SEQ ID NO: 1486
  SIMILAR (91)..(2): 661254mologous to Medicago sativa proline rich protein,accession number L36120,Smith-Waterman Score=127.

SEQ ID NO: 27863 - DNA, 1034 bp, Homo sapiens
  SIMILAR (442)..(786): 941254mologous to Homo sapiens ribosomal protein S20,accession number L06498,Smith-Waterman Score=552.
  misc_feature (1)...(1034): n = a,t,c or g
atggtcttccttgtaccaagtcctcagcagtttaggacttacttagctcaagcaagtcatcaaaggcaaagccaagtcccaacccttagtgctttgactcccaagtcccacactcttcctccgaaaaaagtcacatcgtgtgagattgattttaccctctactatgcttctgttcgcacagtaaatgtcaacatttctgttaattcggttcgtgcatttttgagcactttttctgttcttgcaagacattgtgatgaaagtgaaggactgagggtgttactggtggagggtgtcaaggttcttggcattttgaacaaagaattggacaaaatgcacaaacaaagcaaggaaagaatgaaacaacaaaagcagagatttattgaaaacaaaagcacacttcacagtgtaggagcagcccaagcaagcggatcaagagtgctgaattccggaaacacactcgtggagccagaggtggcaattcaccgaattcgaatcactgtaacaagccgcaaagtaaaatccctggagaaggtgtgtgctgacttgatcagaggagcaaaggaaaagaatctcaaagtgaaaggaccagttcgaatgcctaccaagactttgagaatcactacaagaaaaactccttgtggtgaaggttctaagacgtgggatcgtttccagatgagaattcacaagcgactcattgacttgcacagtccttctgagattgttaagcagattacttccatcagtattgagccaggagttgaggtggaagtcaccattgcagatgcttaagtcaactattttaataaattgatgaccagttgttnnnnnnnnnnnnnnnnnnnnnnnnnnnggggggggccgttttaaaggatccttgggggggccaaagtttacgggggctgggaaggtaatatttttttccttttggggggccgtattaaaacctacctgggaattttgggaaaggacccttattttgggggggggacttattgggccaacctccctacagaattttaaggctttagggaaaa

SEQ ID NO: 27864 - DNA, 1129 bp, Homo sapiens
  SIMILAR (175)..(351): 1001254mologous to Homo sapiens ribosomal protein S20,accession number L06498,Smith-Waterman Score=298.
  misc_feature (1)...(1129): n = a,t,c or g
aggggtagcagaccaggggcncactgtnaacggttgaacnagcacangccgcggaattnggaagacgcggtcgtaagggctgaggatttttggtccgcacgctcctgctcctgactcatcgttgttcgctctcgccgaggaacaagtcggtcaggaagcccgcgcgcaacagccatggcttttaaggataccggaaaaacacccgtggagccggaggtggcaattcaccgaattcgaatcaccctaacaagccgcaacgtaaaatccttggaaaaggtgtgtgctgacttgataagaggcgcaaaagaaaagaatctcaaagtgaaaggaccagttcgaatgcctaccaaggtaaagtaaatcggaggggcaggaagtaggagttgcttccggatgttgcataaattcaggttctttaaggagttcggctgccaaaattgttaacactgatgctgtctacaaacgcacatagaaatcggtggtagattgcggttcctagtaagtagctaatgtttagatatgattgttgaattattgttgctgtgttcttggtgtgctttggtgcttaacaggcgcaagctctaagggtggtgtcctagcacagtgaaaacagacctggcattttcaacccatggtacctgaaaatctattagtgtaaattggaatcataccaaagggaaactaatgaaatgattagaagtaatgattttccagatgttctagggataagtataaaacgataaacacttggtttcctttgtcttttgttacagactttgaagaatcactacaaggaaaaactcctatgtggtgaaggttctaagacgtgggggtattcgtttcccagatgagaattcaccaagcgactcattgacttgcacaagtccttctgagatgttaaggcagattacttccatcagtattgagcccaggagttgaggtggaagctcacacattgcagatagcttaagtcaactatttttaataaattgatgaccaagttgttactgaaaaaagaaaaagaaaaatgactgacaaaccaatacctgggggggtggtttttaaaaatttttgggggggcccaaattcctcgggggtttggaaaaaaaaattttttttatttaggggg

SEQ ID NO: 27865 - DNA, 459 bp, Homo sapiens
gttttaaagaaggcgaactggggaagaagagagctccctgcttctagtgagcaaaggcagcccctgagcttccacagccctccacatttattgggtaggatgaaagggaggaggaggtaacgactggtcagctgcttaattgatcacaagttcacattattgttaacaggcttcaattatgcctaatcacaagaaacacttgtgcctgggtcgtgactgccttcagcattccttctgggtggcagacgcagtttgtcagtttgccaacatcctgctttcatgagaaacggtttgctgtttactcatatagcctccagtggcatactgagttgatcacgaccctcattctttcggcctggacgctgacggaggcaggggcgcctgcagccgactcagccgatccgcactctagcctctgtgtagaaggaacaccgcttctcgcgtttttccgctctttca

SEQ ID NO: 27866 - DNA, 431 bp, Homo sapiens
  SIMILAR (261)..(431): 461254mologous to Homo sapiens zinc finger protein zfp6,accession number U71363,Smith-Waterman Score=128.
gcgcgccctcatggttgcgttagcatggctacctagggatctgttcactgatttagagggtcccagagctctgggtcgggactgaggtgaaagatcggaaaaacgcgagaagcggtgttccttctacacagaggctagagtgcggatcggctgactcggctgcaggcgcccgtgcctgcgtcagcgtgcaggtgaccgccgttcccgcgccgatcttgcctgggtggactggacgaggccgcgccgatgaacctgaccgaggttgttggcatggagccaaagatgaagaggtaccttccaagcagtgtgtttctgtaagagtggtacaggtcacaattccaaagccagctttgtccaccctgaaggcccaaccctggaagatgtggaactcaattctggaggacattcttgccctggctgagcacgatgga

SEQ ID NO: 27867 - DNA, 543 bp, Homo sapiens
  SIMILAR (250)..(161): 531254mologous to Homo sapiens SEQ ID NO 333 from WO9922243,accession number Y19615,Smith-Waterman Score=68.
gccctcatggttgcgttacgataggctacctagggatctgttcactgatttagagggtcccagagctctgggtcgggactgaggtgaaagagcggaaaaacgcgagaagcggtgttccttctacacagaggctagagtgcggatcggctgagtcggctgcaggcgcccctgcctccgtcagcgtccaggtgaccgccgttcccgccccgctcttccctgggtggactggaggaggccgcgcagtgaacctgaccgaggccgaaagaatgagggtcgtgatcaactcagtatgccactggaggctatatgagtaaacagcaaaccgtttctcatgaaagcaggatgttggcaaactgacaaactgcgtctgccacccagaaggaatgctgaaggcagtcacgacccaggcacaagtgtttcttgtgattaggcataattgaagcctgttaacaataatgtgaactttgtgatcaattaagcagctgaccagtcgttactcctcctccctttcatcctacccaataaatgtggagggctgtggaa

SEQ ID NO: 27868 - DNA, 2693 bp, Homo sapiens
  SIMILAR (553)..(2625): 1001254mologous to Homo sapiens R30217_1,accession number AC004076,Smith-Waterman Score=3842.
atggatttgacaaggtgtgaagagcaaagcataaaggacctctgtggttactatacctgtttgatgactatggcccatggtgatgaacaggttagacgttatttcactgggacctctagggtcccagagctctgggtcgggactgaggtgaaagagcggaaaaacgcgagaagcggtgttccttctacacagaggctagagtgcggatcggctgagtcggctgcaggcgcccctgcctccgtcagcgtccaggtgaccgccgttcccgccccgctcttccctgggtggactggaggaggccgcgccgatgaacctgaccgagggtccattgcagtggcagcaatgcataaggaccctgcacagacatttgtgatggggctgtctcctccctccggagttcacgtgcacttcaccagcatttctgttcttacaggttgttggcatggagccaaggatgaggaggtaccttccaagcagtgtgtttctgtaagagtgttacaggtcacaattccaaagccagctttgtccaccctgaaggcccagccctgcaagatgtgtagctcaattctgaaggacattctgcacctggctgagcacgatggaacacaccctgagcaagggctgtacacatgtgcagcagagcatgacctgcaccaaaaggagcagattagagagaagctcaccagaagtgatgagtggaggccttcatttgtgaaccacagtgctcacgtgggagagaggaacttcacatgcacgcagggtggcaaggattttactgccagctcagaccttctccagcaacaggtcttaaacagtgggtggaagctgtacagggatacccaggatggggaagcctttcaaggtgaacagaatgatttcaactccagccaaggtgggaaagacttttgccaccaacatgggctgtttgagcaccaaaaaacccataatggggagaggccttatgagttcagtgaatgtggggaattgtttaggtacaactccaaccttattaaatatcagcaaaatcatgctggagaaaggccttatgagggcactgaatatggaaagacctttattagaaagtccaacctagttcagcaccagaaaattcacagtgaaggctttctttcaaaaaggtctgaccccattgaacatcaggagattctcagtagaccaacaccttatgaatgcacccagtgtgggaaggcctttcttacacaggctcatctggttggtcaccagaaaacccatactggagaacagccctatgaatgcaacaagtgtgggaagttttttatgtataactccaaactcatcagacatcagaaagttcacactggggagaggcgttacgagtgcagtgaatgtgggaaattgtttatggacagcttcacactcggtagacatcagagagttcatactggagaaaggccttttgaatgcagcatatgtggaaaattctttagtcaccgctccacactcaatatgcaccagagagttcatgctggcaaaaggctttataagtgtagcgaatgtgggaaagcctttagcctcaaacataatgttgttcagcatctgaaaattcatactggagaacggccttatgagtgcactgaatgtgagaaggcctttgttagaaagtcccacctagttcagcaccagaaaatccacactgatgcattttcaaaaaggtctgacctcattcaacacaagaggattgacattaggccaaggccttatacatgcagtgaatgtgggaaggccttccttacacaggctcatctggttggtcaccagaaaatccatactggagaacggccttatgaatgcactcaatgtgcgaaggcctttgttagaaagtcccacctagttcagcatgagaaaatccacactgatgcattttcaaaaaggtctgacctcattcaacacaagaggattgacctcaggccaaggccttatgtgtgtagtgaatgtgggaaggccttccttacacaggctcatctagatggtcaccagaaaatccagactggagaacggcgttatgaatgcaatgaatgtgggaaattctttttggacagctacaaacttgttattcatcagagaattcacactggagaaaagccttataaatgcagcaaatgtgggaaattctttagatatcgctgtacactgagtagacatcagaaagttcacactggagaaagaccttatgagtgtagtgaatgtgggaaattttttagagatagctacaaactcattattcatcagagagttcatactggagaaaagccttatgaatgcagcaactgtgggaagtttcttagataccgctctacattcattaaacatcataaagtttgcactggggagaagcctcatgagtgcagtaaatgtagggaattgtttaggactaaatcgagccttattatacatcagcagtctcacactggagaaagtccttttaagttaagggaatgtgggaaagacttcaacaaatgtaatactggtcagcgccaaaaaactcacactggagaaaggtcttatgagtgtggtgaatccagcaaagtgtttaaatacaactccagcctcattaaacatcagataattcatactggaaaaaggccttattggagtgaatgcaggaaagtcaccaaaactgtcacctcattcagcaccaaaaggttcacatcgga

SEQ ID NO: 27869 - DNA, 425 bp, Homo sapiens
  SIMILAR (123)..(1): 461254mologous to Homo sapiens Human apolipoprotein E mutant protein fragment 2,accession number Y20286,Smith-Waterman Score=67.
  misc_feature (1)...(425): n = a,t,c or g
gagtgccggggtgcccagcgccgagccggagcccgacttggcaggtgctgctccgcctggttttagaggggtgatctcagccctgagatagtccccgcttctcccctgctgccctggccctctccgccagtcctggccccacgctgatggcgcccgggcagaggaaaagcttgccggttttatttttcctgagctagacctgaacacaacaaaagagcgcaaaggagacctgcggctcataaacacgaccacagagcctcttttctcctgctcagatttgcagttccagttttgccttgagcccaatgatcatgttaaggtgatccagggcaccgtgttcgtgttcaagtgtatgcaccccgcatcctgcgagctttgnggtggtgaggggaaagagatggctgggctggttggtgcttgagttg

SEQ ID NO: 27870 - DNA, 597 bp, Homo sapiens; identical to SEQ ID NO: 8409
  SIMILAR (2)..(109): 771254mologous to Homo sapiens Human secreted protein, SEQ ID NO: 7176,accession number G03095,Smith-Waterman Score=142.

SEQ ID NO: 27871 - DNA, 510 bp, Homo sapiens
  SIMILAR (376)..(71): 361254mologous to Caenorhabditis elegans weak similarity to collagens; glycine- and proline-rich,accession number AF000298,Smith-Waterman Score=121.
tcagggttggcccagcctttctgcgatggcagcgaggggtctcttcggagcagccgagacgggtgtaacgccgtgggcgggagaagacggctggtgtccacgctctgcagggactcgagccttcagagctgtcgcagggggacgcgcgacccggttcccttcctcctccgcccagacgcgggggagagggggatccagcagccggtggctccgggagctcctcgccgcctcccgtgccaacctgaggatgcgtgttccccggatggaggggaagccaaaggctcctgaagagcccagggctgctgctgggagggtgggcttgggtttggccatcaaggctatagaggtttgattcttgctgctcatatcccatttgaaatcaacacatttaaactgcttaagcttgcatttcacctttggagaatccccatcctctgagtgcctccctgtcttctcttttgcttgctgttcttgtggaaaatagaggtatatctgggagtggtagcgcat

SEQ ID NO: 27872 - DNA, 1529 bp, Homo sapiens
  SIMILAR (34)..(972): 961254mologous to Homo sapiens homeobox protein,accession number X59373,Smith-Waterman Score=1560.
cacaatctctcttcttcaaattctttccccaaaatgtcctttcccaacagctctcctgctgctaatacttttttagtagattccttgatcagtgcctgcaggagtgacagtttttattccagcagcgccagcatgtacatgccaccacctagcgcagacatggggacctatggaatgcaaacctgtggactgctcccgtctctggccaaaagagaagtgaaccaccaaaatatgggtatgaatgtgcatccttatatacctcaagtagacagttggacagatccgaacagatcttgtcgaatagagcaacctgttacacagcaagtccccacttgctccttcaccaccaacattaaggaagaatccaattgctgcatgtattctgataagcgcaacaaactcatttcggccgaggtcccttcgtaccagaggctggtccctgagtcttgtcccgttgagaaccctgaggttcccgtccctcgatattttagactgagtcagacctacgccaccgggaaaacccaagagtacaataatagccccgaaggcagctccactgtcatgctccagctcaaccctcgtggcgcggccaagccgcagctctccgctgcccagctgcagatggaaaagaagatgaacgagcccgtgagcggccaggagcccaccaaagtctcccaggtggagagccccgaggccaaaggcggccttcccgaagagaggagctgcctggctgaggtctccgtgtccagtcccgaagtgcaggagaaggaaagcaaagaggaaatcaagtctgatacaccaaccagcaattggctcactgcaaagagtggcagaaagaagaggtgcccttacactaagcaccaaacgctggaattagaaaaagagttcttgttcaatatgtacctcacccgcgagcgcccgccctagagatcagtaagagcgttaacctcaccgacaaggcaggtcaagattttggtttcaaaaccgccgaatgaaactcaagaagatgagccgagagaaccggatccgagaactgaccgccaacctcacgttttcttaggtctgaggccggtctgaggccggatcagaggccaggattggagagggggcaccgcgttccagggcccagtgctggaggactgggaaagggaaaacaaacactttcaccgctctttgtttgttgttttgttgtattttgttttcctgctagaatgtgactttggggtcattatgttcgtgctgcaagtgatctgtaatccctatgagtatatatatatatatatatatatatatataaaaacttagcacgtgtaatttattattttttcatcgtaatgcagggtaactattattgcgcattttcatttgggtcttaacttattggaactgtagagcatccatccatccatccatccagcaatgtgactttttcatgtctttcctaacacaaaaggtctatgtgtgtggttagtccatgaactcatggcattttgaatacatccagtactttaaaaatgacatatatattt

SEQ ID NO: 27873 - DNA, 2295 bp, Homo sapiens
  SIMILAR (961)..(1689): 951254mologous to Homo sapiens homeobox protein,accession number X59373,Smith-Waterman Score=1228.
gtccttaatccatcttgagctgattttttgtatagggctggacgttcgcttaggcaaggatttcatgaccaacaacctgaaaggaaatgcaataaaaacaaagataaatagctggaacctagttaaactaaagagcttttgcatggcaaaaaggaatagtcagcagagtaaacagacaacccacagaatgggaaagaatcttcacaatctatacatctgataaaggactaatatccagaatctacaatgaactcaaacaaattaatgagaaaaaacaaacaatcctatcacaaaatgggctaaggacacgagtagatgattctcaaaagaagatatacaaatggccaacaaacataggaaaaaacgctcaacatcacaaatgatcagggaaatgcaaatcaaaaccacaatgcgataccacctcactcctgcaagaatggccataataaaaaaattaaaaaaatagaagatgttggtgtgggtgtggtgaacagggaacacttctacactgctgacaacagaagaggtgatttactgtatacctgtaacacttggccacaactgaacacagaaacagtccagaatatcacagatccaggaaaaaggataaataggaactgttttgatgcgagcaagtggtggtctctggggctgtgtggacctacgccggcccaggagaaaccagcctcccgtaaacaccggcggcgagttgtagaaaagtccctccagggtcccagccctttgaaaaggaatcaaacctctatagccttgatggccaaacccaagcccaccctcccagcagcagccctgggctcttcaggagcctttggcttcccctccatccggttgtcaaaccgagcaggatatccgcagagattcgccaaccgtcttggcatgaaggtggaaacaacgggtcaccgccgccctgaatcagctcctgccaaagggctcattaaatccccctccagagcccccatcccaggactaatagattccttgatcagtgcctgcaggagtgacagtttttattccagcagcgccagcatgtacatgccaccacctagcgcagacatggggacctatggaatgcaaacctgtggactgctcccgtctctggccaaaagagaagtgaaccaccaaaatatgggtatgaatgtgcatccttatatacctcaagtagacagttggacagatccgaacagatcttgtcgaatagagcaacctgttacacagcaagtccccacttgctccttcaccaccaacattaaggaagaatccaattgctgcatgtattctgataagcgcaacaaactcatttcggccgaggtcccttcgtaccagaggctggtccctgagtcttgtcccgttgagaaccctgaggttcccgtccctggatattttagactgagtcagacctacgccaccgggaaaacccaagagtacaataatagccccgaaggcagctccactgtcatgctccagctcaaccctcgtggcgcggccaagccgcagctctccgctgcccagctgcagatggaaaagaagatgaacgagcccgtgagcggccaggagcccaccaaagtctcccaggtggagagccccgaggccaaaggcggccttcccgaagagaggagctgcctggctgaggtctccgtgtccagtcccgaagtgcaggagaaggaaagcaaaggtcggtatgagcagagttgccaccccagcggggcgcgcagcccgggaacccggcagagagggagtgccggggtgcccagcgccgagccggagcccgacttggcagaggaaaagcttgccggttttatttttcctgagctagacctgaacacaacaaaagagcgcaaaggagacctgcggctcataaacacgaccacagagcctcttttctcctgctcagatttgcagttccagttttgccttgagcccaatgatcatgttaaggtgatccagggcaccgtgttcgtgttcaagtgtatgcaccccgcatcctgcgagcttgggggtgaggaaatcaagtctgatacaccaaccagcaattggctcactgcaaagagtggcagaaagaagaggtgcccttacactaagcaccaaacgctggaattagaaaaagagttcttgttcaatatgtacctcacccgcgagcgccgcctagagatcagtaagagcgttaacctcaccgacaggcaggtcaagatttggtttcaaaaccgccgaatgaaactcaagaagatgagccgagagaaccggatccgagaactgaccgccaacctcacgttttcttag

SEQ ID NO: 27874 - DNA, 300 bp, Homo sapiens
  SIMILAR (294)..(10): 571254mologous to Homo sapiens Human thyrotropin GPR N- terminal sequence,accession number W03626,Smith-Waterman Score=266.
tcatagcctttcttcttcttcttcttcttcttcttcttcttcttcttcttcttcttcttcttcttcttcttcttcttcttcttcctcttcttcttctttttcctcctcctcctcctcttcgtctctttctctttctccttctccttctcctccttctccttctccttctcctccttctcctccttctccttctccttcttcttccttcttccttcttcttcttcctcttcttcttctttcttcttcttcttctttcttcttcttcttcctttttttttttttttttttgagatggagcat

SEQ ID NO: 27875 - DNA, 241 bp, Homo sapiens
  SIMILAR (241)..(8): 661254mologous to Homo sapiens Human follicle stimulating hormone GPR N-terminal sequence,accession number W03627,Smith- Waterman Score=246.
ccggtggagagccgacaccgtctggaaggatgagccctttttcttgcctcctttgcttttaccattgcccttccttcttatatctttccacattctagttctcctcctcctcctcctcctcctcttcttcttcttcttcttcttcttcttcttcttcttcttcttcttcttcttcttcttcttcttcttcttcttcttcttcttcttcttcttcttcttcttcttcttcttcttcttcctt

SEQ ID NO: 27876 - DNA, 165 bp, Homo sapiens
  SIMILAR (147)..(1): 731254mologous to Arabidopsis thaliana putative protein,accession number AL162506,Smith-Waterman Score=178.
ttcttcttcttcttcttcttctacttcttcttcttcttcttcttcttcttcttcttcttcttcttcttcttcttcttcttcctcttcttcctcttcttcttcttttcttcttttcgtttccgtttttgaaacctgaaattctttgccgccgacattggctaccat

SEQ ID NO: 27877 - DNA, 417 bp, Homo sapiens
  SIMILAR (171)..(49): 1001254mologous to Arabidopsis thaliana putative protein,accession number AL162506,Smith-Waterman Score=206.
cttagttggcatttttgagaatattatataaatgaaattatataataaatcttcttcttcttcttcttcttcttcttcttcttcttcttcttcttcttcttcttcttcttcttcttcctcctcctcctcctcctcctcctcctcttcctcctcctcctcctcctcctcctcatgattgaaagctaatgctattgtttcctgaaagctcagctggggccgagggttgcagattggagggggctctctttccttccacatgggcctttccatggcctccttcagcttccttatggcatagggactacgttccaggagccagtgttccaagaggaccagaaagaagttgtataaccctttatgtacaagttttggaagtcttaaggagtcactttcttggcagttacagccctgccatat

SEQ ID NO: 27878 - DNA, 501 bp, Homo sapiens
  SIMILAR (153)..(28): 611254mologous to Homo sapiens Human secreted protein HCHPF68, SEQ ID NO:163,accession number Y86248,Smith-Waterman Score =161.
tcttcttcttcttcttcttcttcttcttcttcttcttcttcttcttcttcttcttcttcttcttcgtcttcttttcttcttcttcttcttcttcttcttcttcttcttcttcttctccttcttcttctttttcttcttctttttttttttttttcaaaacctcctccttcacgaccctaccccgccccctgggctgtttgtcaaaagcctaacacggatctgtattccgccttagccttgcagcgtacctgccagtctcctgcgccctcttcgcattcagcggcaggcagctgcggcttggtgaattccgcgaattccgcgctggccccgggaccccctggtaactgaggttgcacgaattgagccgcaaccatagggcctaggcaccaaccctacttgggcatcttcttggtggagggtgctggacggtcttctgcaagtaaataagttattggttccagaaacacattggccagatctagtcatgtggctctgcttaat

SEQ ID NO: 27879 - DNA, 1215 bp, Homo sapiens
  SIMILAR (484)..(59): 411254mologous to Homo sapiens Human follicle stimulating hormone GPR N-terminal sequence,accession number W03627,Smith- Waterman Score=297.
tcagctgcctagtgggttgtgccaaagaacaagaccacattttgtagtgaattcttggagcatttctctggcccaataacaacaacaacttcttcttcttcttcttcttcttcttcttcttcttcttcttcttcttcttcttcttctttcttcttcttcctcttcttcttcctcttcttcttcttcttcctcttcttcctcttcttcctcttcttccttcttcttccttcttcttccttcttctttcttcttctcattcttctccttcttctccttcttccccttccccttcttccccttcttccccttcttccccttcttcttcttcttcttcttcttcttcttcttcttcttcttcttcttcttcttcttcttcttcttcttcttcttcttcttcttcctccttctccttctccttctccttctccttctccttctccttctccttctccttcttcttcttcttcttcttcttcttcctctttgaggactaattgctctgtgattgtctttaccttggtcctggaccaactccaagaattcagtgactttacactggcttttcttagagcctcttggagacaacatcctaagatactgcagaccctgtgttttgtttttggttttgaaggccctctgagggccctcaaatggaccctgaggaaatggatacctgagcaggacaaggacctccaagaatggctccctcgcatccacagtactggccccttcgatgcaagtttcctctgctgccatgcaggcgaggggagcctctgacgctgtacctccctcccagctggggttccgactcacggctgaagacctggaccctaggaaccgtacttcccatgtgggcacagaaaggcagaacctcacctttaggtctccctcatcccctgtccagggttctgcagggccttcctcctccaggttgggttccacctccctgaaggtggccagctgcagcactgctgccccactcagggtgccctgaacgacaacagggaaggtcggctttcctggggcagaagactgagggggatatttcactggtatcttggtctcccagtagtggcggccagaggtgaaaccaggggagcccaggacagcacctgccaagttgaatctctcagcactgtttggccgattctgatggatcctcccacatcggacgctcctgaggtcttcagaaatgaggaggaggttgtgagccat

SEQ ID NO: 27880 - DNA, 729 bp, Homo sapiens
  SIMILAR (708)..(442): 471254mologous to Homo sapiens Human follicle stimulating hormone GPR N-terminal sequence,accession number W03627,Smith- Waterman Score=180.
tcacacagcattgttgacactgccgtgttggctgagatatcgcagagctctgtgaaccagatggttctgtgccccgctcacaccctctgaaggacaggtaaagttgctgttaattagggggagagcagagagttgccagggaggctgcctgaatttccccagatgaagttgctttacagcgagggactgagaaaggggtctgcagctgatcctcctctcaatctcacaagtccgccttcctcttgctccgtttttgatgccggagttagcattaggggacatttccttcagtgctagctgtcgcaaagcatccactcccactttttggccctggcgttcccctgtactggggcatataaagtttgcaagtcctatgggcctctctttccagtgatggccaactaggccatcttttgattcatatgcagctagagtcaagagctccggggtactggttagttcataatgttgttctacctcccagcagactctgttgtcactttgtcccatgccaaatccaccaatctcagtaccattctttgatattccattcctaaccatgtctgtcttccatgggctcacaaaatcagcatgtgtgttgttctcttcttcttcttcttcttcttcttcttcttcttcttcttcttcttcttcttcttcttcttcttcttcttcttcttcttcttcttcttcttcttcttctcgatctactacaatccattcatccat

SEQ ID NO: 27881 - DNA, 1896 bp, Homo sapiens
  SIMILAR (1482)..(820): 811254mologous to Homo sapiens Ndr protein kinase,accession number Z35102,Smith-Waterman Score=859.
tccacataggattccgtggcaagagtactattttgctgctttcatgtaggaaggtattgccccccttgcagtcaggccctcaaagcgcttgtacgtgtaattgatgaagacccagtctttgttcttgtagtagcaggagacaatgctggtggtgttacctgttggcttaagaatatcagattctggaaactcatcgaagtttgaggtatcatcaatgcttttgattagaaggtggagggatgttctctaatacctcaaaattagatccttggctttctcagagatgggaacttctggaggaaaagtcaaagtttctttccagttcatcaccttcttatatgtctcttgagaaagtcctctgaaaccatgcaacttaccgatgagcatctcatacatgatcaccccaagcgaccaccaatcacagagcttgttgtacccggtctgcatgaacacctcaggagcaatgtatgggattacaggtgtgagccaccgcacctgaccaagagaaacattttctgcattatttcagaagccacagatattacttactagctgacgtctatttcttttccaggtttctgcttaaggctaacgtaattgttaccacttactgaaatcactggggaggctgtggttcagattcctataaaattctgtcctatgtgcttttttcagtcctgtgcaaagatctggacgaggggaatgcagtggcacctggaagcttggagatgccagaaaccgcagagccctaaagggggtgtcacagcactggctcaggaagcccctaagtctgggctcctggaagggtagttcatgccaatgcccccccaataccttgctgtccaaaagaaggttgtctggtttgatgtctctgtggatgaatccaagttggtgaatagagtctatggctaatactgtttctgctatataaaactgagtctcctcttctgtcagagtgtcttaatgacctttcatcgtcaagtaattacctccaggcaggaactccatgattaggtagaggtttagcttatcctgaaaactatagaacattttcacaacccacaaactgtctgcctccactagaataaaagcactgctacaactgtgctttacctgctctttttcaagcatatctgctttacggagtattttcattgcatacacatgtcctacttgacaagtagctgtgatttttacctcaccaaatgctcctctgcctattacttttaaggactcaaaatcttccaatccaagtcttgttctcttcaaacgaagaaactctgtttccttccgaaggaaaacattgccaatattaattacctcctcatcttttaggccttcttctacaattttttcaaacaaaattctttacctcatttctcgttcttcatgttgagcgataaggttgctataaaaattctccagtgtcactttggtcattgtcaccctttcctttgtgtggttactcatggatgagcaaggacacagactttcctctaagcccttaccgactttttcctctggctgttgcttttccactctcttcttaagaattttccctgccttttcctgtgatgaagacggcggcagcaagcaactcaccagagcccagggagaggcagggctggggacggcggagagccgcagacgccccttcggccagtagtctcgacttgaaggctggcgaagccccggcggcggcagccaacgagccaaagacgggaggggacgcgtgagggactctgagacagggggcaacaggcggttacgactacaggactacaggcacgtgccaccatgcccagctaatcttttcttcttcttcttcttcctcttcttcttcttcttcttcttcttcttcttcttcttcttcttcttcttctcccttccccatgg

SEQ ID NO: 27882 - DNA, 477 bp, Homo sapiens
  SIMILAR (354)..(43): 441254mologous to Homo sapiens Human follicle stimulating hormone GPR N-terminal sequence,accession number W03627,Smith- Waterman Score=199.
tcaggcaggtgctgtgattgttattccattaacaatgaggctttctgtggcctcaggcttcgtgttgtttattttcttctgtttactttttctattgtcttctctttggtgctgtctgttggtggaaccctgctgattctcagtgaagccaagcccacgtactttgccacttcctccgtgcagtctacccaactcttcttcttctccctcttcttcctcctcctcctcctcctcctcttcttcttcttcttcttcttcttcttcttcttcttcttcttcttcttcttcttcttcttcttcttctttgtgctggagggagaagaccctgggatttctgagcgaggcccgtggatgttgaagtcttcctgggtccccgactccatgctctcgcgccccagttactatgacgccctgcacaaccgcagctcggggcacgcccagcgccctgcaggacactcggcctccccggctcagcat

SEQ ID NO: 27883 - DNA, 453 bp, Homo sapiens
  SIMILAR (369)..(34): 651254mologous to Homo sapiens Human follicle stimulating hormone GPR N-terminal sequence,accession number W03627,Smith- Waterman Score=353.
ctagttatatagaatagtagataaaggagccaattcttcttcttcttcttcttcttcttcttcttcttcttcttcttcttcttcttcttcttcttcttcttcttcttgttcttcttcttgttcttcttgttcttcttcttcttcttcttcttcttcttcttcttcttcttcttcttcttcttcttcttcttcttctccttctcctccttctccttctccttcttcttcctcttcctcttccttttcctcttcttcttcctcttcatcttctctctctcttggagcatacgtcttatattttatggtcacccattcatctccggtgctttgctgcctttgtaatctcatcattaacaatatatgagaagagtagttcttcagatttaggcataactgtgatttgttcttggctgctagcacactgggggtggattggcttttgttatgaatcat

SEQ ID NO: 27884 - DNA, 843 bp, Homo sapiens
  SIMILAR (235)..(143): 771254mologous to Arabidopsis thaliana putative protein,accession number AL162506,Smith-Waterman Score=127.
ctagaagtccaagatcaaggtgtcaggagggccacgctttctctgaaatttgttggggagaatccttccttcctcttctagtttctgtgtttgccagccatccttggcattgcttggcttgaagatacacacttggtttgtagaaacatctgtgttttctctcttcttcttcttcttcttcttcttcttcttcttcttcttcttcttcttcttcttcttcttcttcttgtttttcctactgtctgtatcacagctgcctgccttgactaatctgacgcagacaaagtctggaaggaatagagttgacatccgaatagctgtaaatccgcagcggggcaggcagtctatgttagcatctaaaaggctgcagaggtagcggagggaaagctgaatgcggtgttcatggccacagtttcctttcattctataaagagtgtgcttgtcaagcaccatctggaagatgatatgcagccccttctccgtgacgaatgaagacacgcagaggcagattccagaacagcatctacatctttgttcattgatgtcagacacaaaattgagttgtttaaaaacttgctcgggaaggtccacggcttcatttttggtcagcgaaacgaagaacccaatggcagcaaccaactccagacacatctggtcagtcttgttctcccgagagtaggtctgttctaaacacttgacctgtgacagagcatccatgccacgcggctgctccatgaagtagacgccatcatcgtggtctctgcaggtcgtattgtcctgctccactttcctccgaggcttgggtgtgcacgcgctggagccctccctctctgggttggtcat

SEQ ID NO: 27885 - DNA, 1743 bp, Homo sapiens; identical to SEQ ID NO: 14556
  SIMILAR (12)..(47): 1001254mologous to Homo sapiens A protein related to Drosophila naked cuticle polypeptide,accession number B08216,Smith- Waterman Score=63.

SEQ ID NO: 27886 - DNA, 1561 bp, Homo sapiens
  SIMILAR (3)..(455): 991254mologous to Homo sapiens A protein related to Drosophila naked cuticle polypeptide,accession number B08216,Smith- Waterman Score=792.
agctccagtgcgacgtgtccatggaggaggacagccggcaggagtggaccttcaccctgtatgactttgacaacaacggcaaggtcacccgagaggacatcaccagcttgctgcacaccatctatgaggtggcggactcctctgtcaaccactccccaacatccagcaagatgctgcgggtaaagctcaccgtggcccccgatggcagccagagcaagaggagcgtccttgtcaatcaggctgacctgcagagcgcaaggccccgagcagagaccaagcccactgaggacctgcggagctgggagaagaagcagcgagccccgctcaggttccagggtgacagccgcctggagcagtctggctgctaccaccattgcgtagatgagaacatcgagaggagaaaccactacttagatctcgccgggatagaaaactacacgtcccaatttgggcctgacttatgcccccccttattccctgttgtcacggactatgaagatccaaatgaacaccgaatccccttactaggcttattaagacaaataactcccccttcgaatcctgaaaacaactctgaccagtgtggcccggattgtcctctcttcaccagtggctccctcatcccatcccagctcagaaagccacacggacatccacaggtcagccgacgccttatttatagttccctactccaccctccctggaaacagccacctggaccaagggcagacactttacccaagctgagccgatcagatccttcctccttggaagttcggtttggggcctattcctgtaaagctgtgctgggactatccaaactggaccacaggcaagtgaggctactttattcctcgagtcaggatggcttcctctcctcctccaccaattattataatcatcgaacatatcctgggcttgtaaactggctgtttgtgttaacagagcccgagttgacaggggagctgggagacgatgacaggaaagggatgcacacaggtggcatcattagatggctgggacgccccagcagccaattgaagcccatctttcatgcagaagagagacgggtgccaccgccccctgaaaggctgctctgggatgcccctccagatctcgcaggagctcccaacaactccctggctgttaccgccttacctgaggggcaagaccgatgcaagggagagaagtggcagtggcaaggtgctgtgcccaagccctgtgcctgcgggtatgatacacggcaagaggccaagcaagtgcactcaccctctcgggtgagccttgccggtgttgtcaaagtcatacaagaaacccacaacccaaaacaagggcagcccatggccgtgattaagctctgcaccagtggcgaagggatcgagtgggagaccagaattccagctccgccctctgtgcggcctcaagggagttatgaacttctgagccttagacatgcttcctgagctgccaccaagctgcctcatggggctgtcctaaggattaatgtattaatccaatcccaggcacatcagtcattaataaaattaagaatacggtgaaa

SEQ ID NO: 27887 - DNA, 457 bp, Homo sapiens
  SIMILAR (31)..(378): 991254mologous to Homo sapiens ribosomal protein L31 (AA 1- 125),accession number X15940,Smith-Waterman Score=594.
gagtggtggaattcacttggacgctgcagaatggctcccgcaaagaagggtggcgagaagaaaaagggccgttctgccatcaacgaagtggtaacccgagaatacaccatcaacattcacaagcgcatccatggagtgggcttcaagaagcgtgcacctcgggcactcaaagagattcggaaatttgccatgaaggagatgggaactccagatgtgcgcattgacaccaggctcaacaaagctgtctgggccaaaggaataaggaatgtgccataccgaatccgtgtgcggctgtccagaaaacgtaatgaggatgaagattcaccaaataagctatatactttggttacctatgtacctgttaccactttcaaaagtaagttctccatcccataaagccatttaaattcattagaaaaatgtccttacctcttagaatgtgaattcatctgttaag

SEQ ID NO: 27888 - DNA, 605 bp, Homo sapiens
  SIMILAR (322)..(188): 1001254mologous to Homo sapiens normal mucosa of esophagus specific 1,accession number AF228422,Smith-Waterman Score=248.
tttgcagttattgctgcactcctttaattccttatccagagcccaaaaaatgtagacaaaccctaaaaatgtagcagaagcatttccgcacactggtgtccagaatctagtttgtgcagaaatgtttccactagatttatagagtactcttcagaagaaagaggcgagggctcgtcatttggtcacccctttggacattttgcaactcttcaatgggtttccattgttggttgattgttataagcttttgaggtacagtagggtccacagtttcccaaggttctggatttttttttcgatcaaggatcacatcggttttccaaaagagaatacacagcgaaagatgaggctccacccgccgccacagtcatgaacaccaccaagggaatgagttccttccttttcatcaggagttggaaaaagctcatgatgacttcagcgaagaattgccaaatctagaaattaaaaatccaaagtattgatcgcctggtgggcgccaaaccgtccaccgcgctccgcaggccaactgcgggccggcgcgtccgcgtctctgcagatgggagactcacctggacgccgggcggtgcgcacggacgatggtaacg

SEQ ID NO: 27889 - DNA, 1072 bp, Homo sapiens
  SIMILAR (231)..(425): 401254mologous to Homo sapiens FasL isoform,accession number AF288573,Smith-Waterman Score=95.
atgggctccggggcagccacagagggtgatgctggccttggaggcatgagggtggtgactcatagcggtaaaaaccctgtcttggctacctcaggaaatgagtggaatctgtggcttgacgttcctgtattcttgctgatgaaccactcacgatgtccacgtagtggctcctgccaggcgcttgtgaaagttggagaaaagaggtcgccttcccaccatgcccacagtgtgcctcggccccttgttcatggccctcggcagcagatgcctttcctttctctcatgcgcacaggccaggccagcccagcccaccaagccccctcccgagccccctcttggaggagcctcctctacacgggccctcgccaggaaggtgtgagcctcctcaggctgagcatggggcatgagaagaaaggactgggctctggagggctccagcatttaaggagcaggaggaggttggggagccagaggaagtggtcagagagggggttccacctcctactccccaaacctccaaactcctcacaagcacctaggggggccaagagcgaccggggtcggcagatttggcaattcttcgctgaagtcatcatgagctttttccaactcctgatgaaaaggaaggaatgctgggaggagaagagcagctgggatcgggatcagaggggcctagggcagctgtaccctagcacttttcccatgggcccgctcgctgaggctcgtccgctcctctctgctgggtcagcagaggagctccactcccccacctcctcagtacctgctggggtttgaggctgtgtcaggcttaggagcagcaaaggaagggccatggcagccaggcaaagcacctgcctctcggcattcactgaaaaagcctcaagggctgtggaggattcaaaggtggctggcgcacggtaatgctgatgctgccagtccaccaactccacctggagcaggactgtcctcgaaacctcagccctcaccccaaagtaaggaatgctcccagcttaaagtcaaaggggagaagaggaatgaaggaaaagatgcaggcaagaaatatctcacttaa

SEQ ID NO: 27890 - DNA, 381 bp, Homo sapiens
  SIMILAR (130)..(255): 651254mologous to Homo sapiens Human secreted protein encoded by gene 82 clone HOUHH51,accession number Y41389,Smith-Waterman Score=131.
cacagctgccaggtgttaagatggcggtgcggggccgcgcccgcgctcccaggctctcctcccccagccttcctccggctggcagcacgactcgcgtagccgtgcgccgattgcctctcggcctgggcaatggtcccggctgccggtcgacgaccgccccgcgtcatgcggctcctcggctggtggcaagtattgctttgcagaggaaagtggtcgcttatggtcagaggagcagcctgctcaccctctccaggtgggggctgtgtacctgggtgaggaggagctcctgcatgacccgatgggccaggacagggcagcagaagaggccaatgcggtgctggggctggacacccaaggcgatcacatggtgatgctgtctgt

SEQ ID NO: 27891 - DNA, 486 bp, Homo sapiens
  SIMILAR (195)..(67): 1001254mologous to Homo sapiens Human secreted protein encoded by gene 82 clone HOUHH51,accession number Y41404,Smith- Waterman Score=219.
cttcacacccttccagcttttctcagaaggctctttaccagctgcaggtgttttcacaatggcttctgtctgattaaaaatgaagattttcagtgtttccagtgttcgatctgtatgattaaatctggccattggtttagctccttgaaataataaaatattaggaacagctacggtgccaaacctggtagaaaggaaaaaggtatgcattttatggggatctagctctattgtgctgtaaccatacttcacattcaactttttgacaggaggaacgatgatgaatgtcgggcatttgtgaagagagtcataatgagccgtttctttaagataattatgattagcactgtcacatcgaatgcgttttttatggccttgtggaccagttatgacataaggtaccgcttgttcagacttcttgaggtaagcagacaaaatgggtccattttcttctttttttaaaacatgctttatttctggaaacat

SEQ ID NO: 27892 - DNA, 1615 bp, Homo sapiens
  SIMILAR (1104)..(283): 471254mologous to Homo sapiens Human secreted protein encoded by gene 82 clone HOUHH51,accession number Y41389,Smith-Waterman Score=402.
agcggccgcccttttttttttttttttgcagtaaaaacaagaatagtgcatctattgaatatttttgcatttgcttattgcaatactagttaaaacaccagtttataattttttttatacattcagttgttcaacaaatgattcttttaatctgcctgaagtttcaagtcaacacgtcactggagaaaatgtatgaaactgtagcactaatttctgaaacgaagggattgaagttcctctttccaacttctttcagaccatcactactccacatgttcctggctcttgtcctgggaattagccaccggaatactctcaggttcggaagggtaggccatacataataaaactaattaaaaagaataagggaaaatacaaggcaaccagttccacactttttattcaaagtgctggggaaggaggggcctatttgggtcgggcttgaggttaccaccacattcttcttgggctttctattacctgtctggatttaaaaatggagggtttttcagtggtttccagtgttcgatctgtatgattaaatctgaccattggtttagctccttgaaaataataaaatattaggaacagctacggtgccaaacctggtagaaaggctgctgtgctgagatgcatccagtgccaaaaagtgaagagctggaaatgcccgggggcagagagttaaagtgaggggccaaactggcagaaaagcggccacccacggggtgtaaaacaggaactaagagtacaggtcactaccgtttggggttcagacaaatccataaggtcctgtgacaataatttaaaatttttcagagtgaaaatttcctaaaccctgtaatgtttctctccctcacagttcacctttggggatttccagactttcagtgttaattggagtcctctgtcggggcatgcgtcagattcccgccaacttctggctctgtgtaaatactcctcttctctgtcagggtaagtgtgctcacagcgccatcccagagagaaaaggctctctcggacgttgcacctttgagtcctccgctcctcacacgcaccacaggtgacgccgctaggctctgaactcactttgtcctcagcttcccccaggaatcacagacagcatcaccatgtgatcgccttgggtgtccagccccagcaccgcattggcctcttctgctgccctgtcctggcccatcgggtcatgcaggagctcctcctcacccaggtacacagcccccaccactggatccccagtgctcagcacagtgtttagcatatgatgagtgctcagtaagaatttgctagctgactgccctccacgccgcggacgggaagtcccagcacccacagcaatacttgccaccagccgaggagccgcatgacgcggggcggtcgtcgaccggcagccgggaccattgcccaggccgagaggcaatcggcgcacggctacgcgagtcgtgctgccagccggaggaaggctgggggaggagagcctgggagcgcgggcgcggccccgcgccgccatcttaacacctggcagctgtggcgggcgccatcttggagtcgggcggacggcctctatccgctggccgtcggcgctggactggagacctct

SEQ ID NO: 27893 - DNA, 437 bp, Homo sapiens
  SIMILAR (165)..(341): 301254mologous to Japonica saepestriata saepestriata cytochrome oxidase subunit I,accession number AB011048,Smith- Waterman Score=63.
aggtaaacaaactgcaacttatatctgcaatttattttggtatagacaagagggatgccagtagcacactggtggcttcagaagaaattctcaacacctagctcgccagagagtctatgtatgggattgaacaatctgtaaactaaaggatcctaatcatgaaaataagtatgataaattataagtcactattggcactgttgtttatattagcctcctggatcatttttacagttttccagaactccacaaaggtttggtctgctctaaacttatccatctccctccattactggaacaactccacaaagtccttattccctaaaacaccactgatatcattaaagccactaacagagactgaactcagaataaaggaaatcatagagaaactagatcagcagatcccacccagacctttcacccacgtgaacacc

SEQ ID NO: 27894 - DNA, 2502 bp, Homo sapiens
  SIMILAR (298)..(837): 801254mologous to Oryctolagus cuniculus protein of unknown function,accession number Z12840,Smith-Waterman Score=804.
atggttcaccaccgagtgaatggagcagacgaggaggaccacaggaggcaggaagctgacctgtcaggacagtatcaacaggatacttgttcttggttggatttagccaatagaagatccagaggggaggaggagaatgagagagttcattctcagatctatccagggtgtccttcgaatggctccccaaatccaaccaaagcctcttcttacgaagtcatcgacatctgtctctcaggccaggcttcttcaaaacaaaaggcgcttctccctcgccagtgctcaggctcagcaaaggctcaggcagagagagaaaaaatagaagagacatgccaagttggaatgaagcctcctgtccctggtggttatactttacaaggaaaatggataacaacattttgcaaccaggttcagttagacacaattaagataaatggctgtttgaaaggcaaactcatttacctcctgggagactctacactacgtcagtggatctactacttccccaaagttgtaaaaacactgaagttttttgatcttcatgaaactggaatctttaagaaacatttgcttctggatgcagaaagacacactcagattcaatggaaaaaacatagctatcccttcgtcactttccagctctactctctgatagatcatgattatatccctcgggaaattgaccggctatcaggtgacaaaaacacagccatcgtcatcacctttggccagcactttagaccatttcccattgacatttttattcgcagggccatcggtgttcaaaaggctattgaaagactgttcctaagaagcccagccactaaagcctcagttagcaaactcaaatgcttttgggaaccaacccggggaacccaaaagtatgaagccagtcaggtaaccggagcgttcccgctcaggccgaagaagggagcagctactccatcccagctggttattgtcaactcatctgatgctcataacaaatgtgatgaagaaagcgaggttcggataaaaagcaccttggggttgaagttggactgtaagaaagggactgctctcactaaagggaccaaggaagatgaggaggatggtgcaatgagtggagtagaccagctttgcctgctgtcctctgtggattcaagtggcagacctcagctgatgactgactggcatggggtaaaaggacagttctcttgcttcaagtgcggggaggaaaaggaactacagcagaagaggaagctaacaggcaagggctggaatgtatttttcatggttctggaggttgggaagaccaagatcaaggcgctggaagttttggcatctggtaagggcactgcttcttggtttatacaggactttcttgctgtgaactcatcacatggcaggtggggcaagaaggaggagtttctctttcaaaagtggaaagttgatccctggctcccagtgcgatgggaactggtgcagactggcactctcacccacttggtcccagaaggcagatcagacagcgtgacttgtgcctggatgcccttagggagcaagcaggtctataaggagcctgctggtttccctgacatgctccgcctgagaggctccagagtgaggatggcagtggtgacagttcactcccagctcagaaacctgtcacttggagatcagcattttaactaccccctgcccctcaagaaaaaaaaaaaaaaaaaaaagaaggacaccttaatttaccctgctgattggcttgagagctgtcagagtgacaacctgtctctggctgaaagggacctggtgttagttctcaggctggctttgtgtgcattatatggtctgcttgctcctggaaacggcaacactgagagcgctgaactgcaccctggtgacaaaactgaggctcagaggccaatggccttgttcaaggtcacacgcccactaaatgagagacccggagacctggcatcacacgtgagcagatttgccaagtctttcctgaaacctgcaatggagagtttagagtgtccccagtcccgtttggtaggagaggcaaggaagggacacagtgagctggtggagaagatagagaggggctgtgagtctacggttggggaagggaccaccaggaaaggaagcaagagggaccatttagacagtcagtgcaagctgggacaaaggagccagccttggggacagatgactcagagagagctgggagatggacttttccctccctccttcctggagctgcctccttccctccgcttcttgtgttctcccatgggcccttacctcagagaagccagcagcggccatgtgctcctgcattgcccacacttggcaggtgtgctaccttctggccttgggagaatattgtctgctgaagccaagagagaaccgtttggtatcccaagttccccacctggttccttaggttctgaaatctaccctttccctaaattagggtggccaaccatccccagtgatctcagaattgagagattcccctga

SEQ ID NO: 27895 - DNA, 1773 bp, Homo sapiens
  SIMILAR (43)..(189): 701254mologous to Homo sapiens Human secreted protein, SEQ ID NO: 6908,accession number G02827,Smith-Waterman Score=183.
atgcctcgccctgcttcagctcatgcacggtgtgctgcatccactgtcctgcacccactgtccggcactccccatgagatgaaccaagtacctcagttggaaattcagaaatcacccgtcttctgcatcactcatgctgggaactgtagactggagctgttcttattctgccatcttggctccaccccgctcgaatgtattgtctataatttaaatgcttttgagtttctttggtctgctctaaacttatccatctctgtccattactggaacaactccgcaaagtccttattccctaaaacatcactgataccattaaagccactaacagagactgaactcagaataaaggaaatcatagagaaactagatcagcagatcccacccagacctttcacccatgtgaacaccaccaccagtgccacacacagcacagccaccatcctcaaccctcgagatacatactgcaggggagaccagctggacatcctactggaggtgagggaccacttgggacagaggaagcaatatggtggggatttcctgagggccaggatgtcctccccagcactgacggcaggtgcttcaggaaaggtgatggacttcaacaatggcacctacctggtcagcttcactctgttctgggagggccaggtctccctgtctctgctgctcatccaccccagtgaaggggcgtcggctctctggagggcaaggaaccaaggctatgataaaattattttcaaaggcaaatttgttaatggcacctctcatgtcttcactgaatgtggcctgaccctaaactcaaatgctgaactctgtgaatatctggatgacagagaccaagaagccttctattgtatgaagcctcaacacatgccctgtgaggctctgacctacatgaccacccggaatagagaggtatcttatcttacagacaaggaaaacagccttttccacaggtccaaagtgggagttgaaatgatgaaggatcgtaaacacattgatgtcactaattgtaacaagagagaaaaaatagaagagacatgccaagttggaatgaagcctcctgtccctggtggttatactttacaaggaaaatggataacaacattttgcaaccaggttcagttagacacaattaagataaatggctgtttgaaaggcaaactcatttacctcctgggagactctacactacgtcagtggatctactacttccccaaagttgtaaaaacactgaagttttttgatcttcatgaaactggaatctttaagaaacatttgcttctggatgcagaaagacacactcagattcaatggaaaaaacatagctatcccttcgtcactttccagctctactctctgatagatcatgattatatccctcgggaaattgaccggctatcaggtgacaaaaacacagccatcgtcatcacctttggccagcactttagaccatttcccattgacatttttattcgcagggccatcggtgttcaaaaggctattgaaagactgttcctaagaagcccagccactaaagtgattattaagacagaaaacatcagggagatgcacatagagacagagaggtttggagacttccatggttatattcactatcttatcatgaaggatattttcaaagacctcaacgtgggcatcattgatgcctgggacatgaccattgcatatggcactgacactatccacccacctgatcatgtgattggaaatcagattaacatgttcttaaactacatttgctaa

SEQ ID NO: 27896 - DNA, 273 bp, Homo sapiens
  SIMILAR (186)..(61): 881254mologous to Cloning vector pBPSCat2 alfa- peptide,accession number AJ403982,Smith-Waterman Score=194.
agtcgacctgcaggcatgcaagcttggcactggccgtcgttttactacgtcgtgactgggaaaacctggcgttacccaacttaatcgccttgcagcacatccccctttcgccagctggcgtaatagcgaagaggcccgcaccgatcgcccttcccaacagttgcgcacctgattggcgaatggcgcctgatgcgaaacgctgggtgaaagtaaaagatgctgaagatcagttgggtgcacgagtgggttacatcgaactggatctcaacagcg

SEQ ID NO: 27897 - DNA, 2190 bp, Homo sapiens
  SIMILAR (792)..(1): 991254mologous to Homo sapiens 27-JUN-1991 Chimeric cytochrome P450IA1 expression construct,accession number Q36498_cd1,Smith-Waterman Score=1346.
ttaccaatgcttaatcagtgaggcacctatctcagcgatctgtctatttcgttcatccatagttgcctgactccccgtcgtgtagataactacgatacgggagggcttaccatctggccccagtgctgcaatgataccgcgagacccacgctcaccggctccagatttatcagcaataaaccagccagccggaagggccgagcgcagaagtggtcctgcaactttatccgcctccatccagtctattaattgttgccgggaagctagagtaagtagttcgccagttaatagtttgcgcaacgttgttgccattgctacaggcatcgtggtgtcacgctcgtcgtttggtatggcttcattcagctccggttcccaacgatcaaggcgagttacatgatcccccatgttgtgcaaaaaagcggttagctccttcggtcctccgatcgttgtcagaagtaagttggccgcagtgttatcactcatggttatggcagcactgcataattctcttactgtcatgccatccgtaagatgcttttctgtgactggtgagtactcaaccaagtcattctgagaatagtgtatgcggcgaccgagttgctcttgcccggcgtcaatacgggataataccgcgccacatagcagaactttaaaagtgctcatcattggaaaacgttcttcggggcgaaaactctcaaggatcttaccgctgttgagatccagttcgatgtaacccactcgtgcacccaactgatcttcagcatcttttactttcaccagcgtttgggggtgttctggtgtggagctgtcgtcatgcaggcttttgttggctttgggttggggttcgggagcggcgataccgtaaagcacgaggaagcggtcagcccattcgccgccaagctcttcagcaatatcacgggtagccaacgctatgtcctgatagcggtccgccacacccagccggccacagtcgatgaatccagaaaagcggccattttccaccatgatattcggcaagcaggcatcgccatgggtcacgacgagatcctcgccgtcgggcatgcgcgccttgagcctggcgaacagttcggctggcgcgagcccctgatgctcttcgtccagatcatcctgatcgacaagaccggcttccatccgagtacgtgctcgctcgatgcgatgtttcgcttggtggtcgaatgggcaggtagccggatcaagcgtatgcagccgccgcattgcatcagccatgatggatactttctcggcaggagcaaggtgagatgacaggagatcctgccccggcacttcgcccaatagcagccagtcccttcccgcttcagtgacaacgtcgagcacagctgcgcaaggaacgcccgtcgtggccagccacgatagccgcgctgcctcgtcctgcagttcattcagggcaccggacaggtcggtcttgacaaaaagaaccgggcgcccctgcgctgacagccggaacacggcggcatcagagcagccgattgtctgttgtgcccagtcatagccgaatagccagagggcgccccagctggcaattccggttcgcttgctgtccataaaaccgcccagtctagctatcgccatgtaagcccactgcaagctacctgctttctctttgcgcttgcgttttcccttgtccagatagcccagtagctgacattcatccggggtcagcaccgtttctgcggactggctttctacgtgttccgcttcctttagcagcccttgcgccctgagtgcttgcggcagcgtgaagctagcttggcttggagcccatctctccgcatcacctttggtaaaggttctaagctcaggtgagaacatccctgcctgaacatgagaaaaaacagggtactcatactcacttctaagtgacggctgcatactaaccgcttcatacatctcgtagatttctctggcgattgaagggctaaattcttcaacgctaactttgagaatttttgtaagcaatgcggcgttataagcatttaatgcattgatgccattaaataaagcaccaacgcctgactgccccatccccatcttgtctgcgacagattcctgggataagccaagttcatttttctttttttcataaattgctttaaggcgacgtgcgtcctcaagctgctcttgtgttaatggtttcttttttgtgctcat

SEQ ID NO: 27898 - DNA, 885 bp, Homo sapiens
  SIMILAR (238)..(471): 941254mologous to Cloning vector pKG1M bleomycin resistance protein,accession number Y18316,Smith-Waterman Score=406.
gctcaaggcgcgcatgcccgacggcgaggatctcgtcgtgacccatgcgatgcctgcttgccgaatatcatggtggaaaatggccgcttttctggattcatcgactgtggccggctgggtgtggcggaccgctatcaggacatagcgttggctacccgtgatattgctgaagagcttggcggcgaatgggctgaccgcttcctcgttgggcttcggaatcgttttccgggacgccgctggatgatcctccagcgcggggatctcatgctggagttcttcgcccaccccgggctcgatcccctcgcgagttggttcagctgctgcctgaggctggacgacctcgcggagttctaccggcagtgcaaatccgtcggcatccaggaaaccagcagcggctatccgcgcatccatgcccccgaactgcaggagtggggaggcacgatggccgctttgattccaacctatggaactgatgaatgggagcagtggtggaatgcctttaatgaggaaaacctgttttgctcagaagaaatgccatctagtgatgatgaggctactgctgactctcaacattctactcctccaaaaaagaagagaaaggctggcggggttgccttactggttagcagaatgaatcaccgatacgcgagcgaacgtgaagcgactgctgctgcaaaacgtctgcgacctgagcaacaacatgaatggtcttcggtttccgtgtttcgtaaagtctggaaacgcggaagtcagcgctcttccgcttcctcgctcactgactcgctgcgctcggtcgttcggctgcggcgagcggtatcagctcactcaaaggcggtaatacggttatccacagaatcaggggataacgcaggaaagaacatgtga

SEQ ID NO: 27899 - DNA, 1188 bp, Homo sapiens
  SIMILAR (1)..(714): 991254mologous to unidentified BLA,accession number A95103,Smith-Waterman Score=1209.
atgagtattcaacatttccgtgtcgcccttattcccttttttgcggcattttgccttcctgtttttgctcacccagaaacgctggtgaaagtaaaagatgctgaagatcagttgggtgcacgagtgggttacatcgaactggatctcaacagcggtaagatccttgagagttttcgccccgaagaacgttttccaatgatgagcacttttaaagttctgctatgtggcgcggtattatcccgtgttgacgccgggcaagagcaactcggtcgccgcatacactattctcagaatgacttggttgagtactcaccagtcacagaaaagcatcttacggatggcatgacagtaagagaattatgcagtgctgccataaccatgagtgataacactgcggccaacttacttctgacaacgatcggaggaccgaaggagctaaccgcttttttgcacaacatgggggatcatgtaactcgccttgatcgttgggaaccggagctgaatgaagccataccaaacgacgagcgtgacaccacgatgcctgtagcaatggcaacaacgttgcgcaaactattaactggcgaactacttactctagcttcccggcaacaattaatagactggatggaggcggataaagttgcaggaccacttctgcgctcggcccttccggctggctggtttattgctgataaatctggagccgaagtaaggttccttcacaaagatccggaccaaagcggccatcgtgcctccccactcctgcagttcgggggcatggatgcgcggatagccgctgctggtttcctggatgccgacggatttgcactgccggttgggcgttcgcttggtcggtcatttcgaaccccagagtcccgctcagaagaactcgtcaagaaggcgatagaaggcgatgcgctgcgaatcgggagcggcgataccgtaaagcacgaggaagcggtcagcccattcgccgccaagctcttcagcaatatcacgggtagccaacgctatgtcctgatagcggtccgcacacccagccggccacagtcgatgaatccagaaaagcggccattttccaccatgatattcggcaagcaggcatcgccatgggtcacgacgagatcctcgccgtcgggcatgcgcgccttgagcctggcgaacagttcggctggcgcgagcccctga

SEQ ID NO: 27900 - DNA, 3271 bp, Homo sapiens
  SIMILAR (868)..(1629): 991254mologous to synthetic construct lacZ neomycin phosphotransferase fusion protein,accession number X76682,Smith- Waterman Score=1320.
atgactatcgtcgccgcacttatgactgtcttctttatcatgcaactcgtaggacaggtgccggcagcgctctgggtcattttcggcgaggaccgctttcgctggagcgcgacgatgatcggcctgtcgcttgcggtattcggaatcttgcacgccctcgctcaagccttcgtcactggtcccgccaccaaacgtttcggcgagaagcaggccattatcgccggcatggcggccgacgcgctgggctacgtcttgctggcgttcgcgacgcgaggctggatggccttccccattatgattcttctcgcttccggcggcatcgggatgcccgcgttgcaggccatgctgtccaggcagcctaacttcgatcattggaccgctgatcgtcacggcgatttatgccgcctcggcgagcacatggaacgggttggcatggattgtaggcgccgccctataccttgtctgcctccccgcgttgcgtcgcggtgcatggagccgggccacctcgacctgaatggaagccggcggcacctcgctaacggattcaccactccaagaattggagccaatcaattcttgcggagaactgtgaatgcgcaaaccaacccttggcagaacatatccatcgcgtccgccatctccagcagccgcacgcggcgcatctcgggcagcgttgggtcctgcagatccggctgtggaatgtgtgcttttgcaaaaagcttcacgctgccgcaagcactcagggcgcaagggctgctaaaggaagcggaacacgtagaaagccagtccgcagaaacggtgctgaccccggatgaatgtcagctactgggctatctggacaagggaaaacgcaagcgcaaagagaaagcaggttctccggccgcttgggtggagaggctattcggctatgactgggcacaacagacaatcggctgctctgatgccgccgtgttccggctgtcagcgcaggggcgcccggttctttttgtcaagaccgacctgtccggtgccctgaatgaactgcaggacgaggcagcgcggctatcgtggctggccacgacgggcgttccttgcgcagctgtgctcgacgttgtcactgaagcgggaagggactggctgctattgggcgaagtgccggggcaggatctcctgtcatctcaccttgctcctgccgagaaagtatccatcatggctgatgcaatgcggcggctgcatacgcttgatccggctacctgcccattcgaccaccaagcgaaacatcgcatcgagcgagcacgtactcggatggaagccggtcttgtcgatcaggatgatctggacgaagagcatcaggggctcgcgccagccgaactgttcgccaggctcaaggcgcgcatgcccgacggcgaggatctcgtcgtgacccatggcgatgcctgcttgccgaatatcatggtggaaaatggccgcttttctggattcatcgactgtggccggctgggtgtggcggaccgctatcaggacatagcgttggctacccgtgatattgctgaagagcttggcggcgaatgggctgaccgcttcctcgtgctttacggtatcgccgctcccgattcgcagcgcatcgccttctatcgccttcttgacgattcttctgagcgggactctggggttcgaaatgaccgaccaagcgacgccaacctgccatcacgagatttcgattccaccgccgccttctatgaaaggttgggcttcggaatcgttttccgggacgccggctggatgatcctccagcgcggggatctcatgctggagttcttcgcccaccccgggctcgatcccctcgcgagttggttcagctgctgcctgaggctggacgacctcgcggagttctaccggcagtgcaaatccgtcggcatccaggaaaccagcagcggctatccgcgcatccatgcccccgaactgcaggagtggggaggcacgatggccgctttgattccaacctatggaactgatgaatgggagcagtggtggaatgcctttaatgaggaaaacctgttttgctcagaagaaatgccatctagtgatgatgaggctactgctgactctcaacattctactcctccaaaaaagaagagaaaggtcgttcgctccaagctgggctgtgtgcacgaaccccccgttcagcccgaccgctgcgccttatccggtaactatcgtcttgaagtccaacccggtaagacacgacttatcgccactggcagcagccactgcagaactttaaaagtgctcatcattggaaaacgtttcttcggggcgaaaactctcaaggatcttaccgctgttgagatccagttcgatgtaacccactcgtgcacccaactgatcttcagcatcttttactttcaccagcgtttctgggcacttgtccggctgcccccccacatctcacagtgtgacgaagtcttccggttcttcgaggctcgacccgaggatgtcaaccctccaaaagagaggcaaatggaaggttgtggacagagccctggaacctctccacagcagcctcccttcactctgcaggtagttactgagtgccagctgtatgccagcccaggcctgggtacagagcagccaccccaaaaaggctgggggaatggaattgggttggccgagctgaaggaaggcctacagagccctttggagcctctggcggaaggggccatccccagacatagccggagggagctgtccaaaaagcctgtgtttcctactgtgcttagggtgactgcctggggtttcctggtgcccttctcctggggaggcctgggctccaacctcccactgagggagccactggttggtgctgcaggaaccagaggaaagagcctggcagccgcagggaagctgagtttctgtaacgagtgtggagacaggactgtgattcactcaaggcctgaggtcggcgccaacaaaggttatcaggaaggcctgcagggaggaggccaggctcatgtgtcccttgttccagaagagccagatcaggatagtgcccatgtccccagtgactgctgggctctgaaggtcacccccaagtcagctgtctggcagcccagccggcctcttgagcagttcccagtggctgtaggccccgcagacaggcatcctgggcccagcagccaatgtcagctggcagacagaaggtggctcttcctggcttcacctctcactctgggaactctgaacggcaggatggcaatctccattccccagcgaggcctgctgcccgctgctg

SEQ ID NO: 27901 - DNA, 2559 bp, Homo sapiens
  SIMILAR (765)..(247): 891254mologous to Escherichia coli TEM-derived extended spectrum beta-lactamase,accession number AF308742,Smith-Waterman Score=777.
  misc_feature (1)...(2559): n = a,t,c or g
tcactcaaaggcggtaatacggttatccacagaatcaggggataacgcaggaaagaacatgtgagcaaaaggccagcaaaaggccaggaaccgtaaaaaggccgcgttgctggcgtttttccataggctccgccccccggctccagatttatcagcaataaaccagccagccggaagggccgagcgcagaagtggtcctgcaactttatccgcctccatccagtctattaattgttgccgggaaggctcgtcgtttggtatggcttcattcagctccggttcccaacgatcaaggcgagttacatgatcccccatgttgtgcaaaaaagcggttagctccttcggtcctccgatcgttgtcagaagtaagttggccgcagtgttatcactcatggttatggcagcactgcataattctcttactgtcatgccatccgtaagatgcttttctgtgactggtgagtactcaaccaagtcattctgagaatagtgtatgcggcgaccgagttgctcttgcccggcgtcaacacgggataataccgcgccacatagcagaactttaaaagtgctcatcattggaaaacgttcttcggggcgaaaactctcaaggatcttaccgctgttgagatccagttcgatgtaacccactcgtgcacccaactgatcttcagcatcttttactttcaccagcgtttctcctctttgaaactttctctggctaacacagccaaatataatactttttcctttgaacttattaatgctacaaaaatattgacacttagtatgatttactgtatttacttcacatgttgtcttatctctgtaactagtttttcttcttttacaatgatagacttttgcattgggaccaatgaatctggtgtgaaaaaccctgctgtagtagtgaaagagcatcaggagatactgactgtaccaggcagccaagtcacctagaagtctttctgaagcatggccgggccttacccctggagtctctgatgcaggtctgaggcccaggaacttgcatttctcattggttcccagctgatgctgatactgttggtccagcatgacacagaaccactgatgcagaggtggcagtgggtgtgcggtttgtgccgagctggcgcctggtgctgtgcacacagtggccgccgagcgggcaggggcccaggaggcggcagctggagctggtcctccacaattaggagggctgattgcctgggccacacacctgcagcatagtgctgctgtaccgctgctgtcccaacgcatgtgccacacttgctgtctgtcccctaggaagcttgtaattggctgcagggcagccaagtcactcagctcctctccctgtgggaagtggctgtgtgctgcgttaatccgccagccctctgtcaaggggcttccttcctgtggggtgcccctcccgctgtcactctcccgcatccaaatgtgctcttcagaagccacttcctcctgggaactgaacccagactttggggaagctgccaccagtccatagtgagagtcaggcttcctcagagtgtggtatcgacggcactgctgccagataacaccaccggggaaacattccatcatgatggccgtgcggacataggaagccagttcatccatcgctttcttgtctgctgccatttgcttgttctgcgctggctcatcacgctggataccaaggctgatgttgtagatattggtcaccggctgaggtgtttcgattgccgctgcgtggatagcaccatttgcgatagnggcgtccttgatgaatgacactccattgcgaataagttcgaaggagacggtgtcacgaatgcgctggtccagctcgtcgattgccttttgtgcagcagaggtatcaatctcaacgccaagcgtcatcgaagcgcaatattgctgctcaccaaaacgcgtattgaccaggtgttcaacggcaaatttctgcccttctgatgtcagaaaggtaaagtgattttctttctggtattcagttgctgtgtgtctggtttcagcaaaaccaagctcgcgcaattcggtgtcntctttatcatgcaactcgtaggacaggtgccggcagcgctctgggtcattttcggcgaggcaccgtttcgctggagcgcgacgatgatcggcctgtcgcttgcggtattcgaaatcttgcacgccctcgctcaagccttcgtcaatggcgatagctagactgggcggttttatggacagcaagcgaaccggaattgccagctggggcgccctctggtaaggttgggaagccctgcaaagtaaactggatggctttcttgccgccaaggatctgatggcgcaggggatcaagatctgatcaagagacaggatgaggatcgtttcgcatgattgaacaagatggattgcacgcaggttctccggccgcttgggtggagaggctattcggctatgactgggcacaacagacaatcggctgctctgatgccgccgtgttccggctgtcagcaggggcgcccggttctttttgtcaagaccgacctgtccggtgccctgaatgaa

SEQ ID NO: 27902 - DNA, 2931 bp, Homo sapiens
  SIMILAR (2718)..(1981): 931254mologous to synthetic construct tetracycline resistance,accession number V00083,Smith-Waterman Score=1137.
tcactcaaaggcggtaatacggttatccacagaatcaggggataacgcaggaaagaacatgtgagcaaaaggccagcaaaaggccaggaaccgtaaaaaggccgcgttgctggcgtttttccataggctccgccccccggctccagatttatcagcaataaaccagccagccggaagggccgagcgcagaagtggtcctgcaactttatccgcctccatccagtctattaattgttgccgggaagctagagtaagtagttcgccagttaatagtttgcgcaacgttgttgccattgctgcaggcatcgtggtgtcacgctcgtcgtttggtatggcttcattcagctccggttcccaacgatcaaggcgagttacatgatcccccatgttgtgcaaaaaagcggttagctccttcggtcctccgatcgttgtcagaagtaagttggccgcagtgttatcactcatggttatggcagcactgcataattctcttactgtcatgccatccgtaagatgcttttctgtgactggtgagtactcaaccaagtcattctgagaatagtgtatgcggcgaccgagttgctcttgcccggcgtcaacacgggataataccgcgccacatagcagaactttaaaagtgctcatcattggaaaacgttcttcggggcgaaaactctcaaggatcttaccgctgttgagatccagttcgatgtaacccactcgtgcacccaactgatcttcagcatcttttactttcaccagcgtttcacagaagtaaggttccttcacaaagatccggaccaaagcggccatcgtgcctccccactcctgcagttcgggggcatggatgcgcggatagccgctgctggtttcctggatgccgacggatttgcactgccggtagaactccgcgaggtcgtccagcctcaggcagcagctgaaccaactcgcgaggggatcgagcccggggtgggcgaagaactccagcatgagatccccgcgctggaggatcatccagccggcgtcccggaaaacgattccgaagcccaacctttcatagaaggcggcggtggaatcgaaatctcgtgatggcaggttgggcgtcgcttggtcggtcatttcgaaccccagagtcccgctcagaagaacgtaaagcacgaggaagcggtcagcccattcgccgccaagctcttcagcaatatcacgggtagccaacgctatgtcctgatagcggtccgccacacccagccggccacagtcgatgaatccagaaaagcggccattttccaccatgatattcggcaagcaggcatcgccatgggtcacgacgagatcctcgccgtcgggcatgcgcgccttgagcctggcgaacagttcggctggcgcgagcccctgatgctcttcgtccagatcatcctgatcgacaagaccggcttccatccgagtacgtgctcgctcgatgcgatgtttcgcttggtggtcgaatgggcaggtagccggatcaagcgtatgcagccgccgcattgcatcagccatgatggatactttctcggcaggagcaaggtgagatgacaggagatcctgccccggcacttcgcccaatagcagccagtcccttcccgcttcagtgacaacgtcgagcacagctgcgcaaggaacgcccgtcgtggccagccacgatagccgcgctgcctcgtcctgcagttcattcagggcaccggacaggtcggtcttgacaaaaagaaccgggcgcccctgcgctgacagccggaacacggcggcatcagagcagccgattgtctgttgtgcccagtcatagccgaatagcctctccacccaagcggccggagaacctgctttctctttgcgcttgcgttttcccttgtccagatagcccagtagctgacattcatccggggtcagcaccgtttctgcggactggctttctacgtgttccgcttcctttagcagcccttgcgccctgagtgcttgcggcagcgtgaagctttttgcaaaagcaatccatgccaacccgttccatgtgctcgccgaggcggcataaatcgccgtgacgatcagcggtccaatgatcgaagttaggctggtaagagccgcgagcgatccttgaagctgtccctgatggtcgtcatctacctgcctggacagcatggcctgcaacgcgggcatcccgatgccgccggaagcgagaagaatcataatggggaaggccatccagcctcgcgtcgcgaacgccagcaagacgtagcccagcgcgtcggccgccatgccggcgataatggcctgcttctcgccgaaacgtttggtggcgggaccagtgacgaaggcttgagcgagggcgtgcaagattccgaataccgcaagcgacaggccgatcatcgtcgcgctccagcgaaagcggtcctcgccgaaaatgacccagagcgctgccggcacctgtcctacgagttgcatgataaagaagacagtcataagtgcggcgacgatagtcatgccccgcgcccaccggaaggagctgactgggttgaaggctctcaagggcatcggtcgacgctctcccttatgcgactcctgcattaggaagcagcccagtagtaggttgaggccgttgagcaccgccgccgcaaggaatggtgcatgcaaggagatggcgcccaacagtcccccggccacggggcctgccaccatacccacgccgaaacaagcgctcatgagcccgaagtggcgagcccgatcttccccatcggtgatgtcggcgatataggcgccagcaaccgcacctgtggcgccggtgatgccggccacgatgcgtccggcgtagaggatcttggcagtcacagcatgcgcatatccatgcttcgaccatgcgctcacaaagtaggtgaatgcgcaatgtagtacccacatcgtcat

SEQ ID NO: 27903 - DNA, 1011 bp, Homo sapiens
  SIMILAR (369)..(1010): 981254mologous to Pichia pastoris Beta-Lactamase,accession number Z46232,Smith-Waterman Score=1074.
ttcttctgagcgggactctggggttcgaaatgaccgaccaagcgacgcccaacctgccatcacgagatttcgattccaccgccgccttctatgaaaggttgggcttcggaatcgttttccgggacgccggctggatgatcctccagcgcggggatctcatgctggagttcttcgcccaccccgggctcgatcccctcgcgagttggttcagctgctgcctgaggctggacgacctcgcggagttctaccggcagtgcaaatccgtcggcatccaggaaaccagcagcggctatccgcgcatccatgcccccgaactgcaggagtggggaggcacgatggccgctttggtccggatctttgtgaaggaaccttacttctgtgaaacgctggtgaaagtaaaagatgctgaagatcagttgggtgcacgagtgggttacatcgaactggatctcaacagcggtaagatccttgagagttttcgccccgaagaacgttttccaatgatgagcacttttaaagttctgctatgtggcgcggtattatcccgtgttgacgccgggcaagagcaactcggtcgccgcatacactattctcagaatgacttggttgagtactcaccagtcacagaaaagcatcttacggatggcatgacagtaagagaattatgcagtgctgccataaccatgagtgataacactgcggccaacttacttctgacaacgatcggaggaccgaaggagctaaccgcttttttgcacaacatgggggatcatgtaactcgccttgatcgttgggaaccggagctgaatgaagccataccaaacgacgagcgtgacaccacgatgcctgcagcaatggcaacaacgttgcgcaaactattaactggcgaactacttactctagcttcccggcaacaattaatagactggatggaggcggataaagttgcaggaccacttctgcgctcggcccttccggctggctggtttattgctgataaatctggagccg

SEQ ID NO: 27904 - DNA, 939 bp, Homo sapiens
  SIMILAR (612)..(82): 941254mologous to Escherichia coli beta-lactamase,accession number A24782,Smith-Waterman Score=859.
tcatccgtttataatgttgcccggaagcagataagtagtcgccagtaatagttgcgcacgttttccattgatacagcatcgtgtgtcacgctgtcgtttgtatggctcattcagttccgtttcccaacgatcaaggcgagttacatgatcccccatgttgtgcaaaaaagcggttagctccttcgttcctccgatcgttgtcagaagtaagttggccgcagtgttatcactcatggttatggcagcactgcataattctcttactgtcatgccatccgtaagatgcttttctgtgactggtgagtactcaaccaagtcattctgagaatagtgtatgcggcgaccgagttgctcttgcccggcgtcaatacgggataataccgcgccacatagcagaactttaaaagtgctcatcattggaaaactttcttcggggcgaaaactctcaaggatcttaccgctgttgagatccagttcgatgtaacccactcgtgcacccaactgatcttcagcatcttttactttcaccagcgtttctgggtgagcaaaaacaggaaggcaaaatgccgcaaaaaagggaataagggcgacacggaaatgttgaatactcatactcttcggcccgctaacgcggagatacgccccgacttcgggtaaaccctcgtcgggaccactccgaccgcgcacagaagctctctcatggctgaaagcgggtatggtctggcagggctggggatgggtaaggtgaaatctatcaatcagtaccggcttacgccgggcttcggcggttttactcctgaagccttcttctctcaactcgtcaaagtcattctctgtccagctttgttccattgctggcaaggacctgcgttcctttggaggagaagacgtgtgctggtttttagaattttcagcttttctgctctggtttctccccat

SEQ ID NO: 27905 - DNA, 704 bp, Homo sapiens
  SIMILAR (77)..(595): 891254mologous to Pichia pastoris Beta-Lactamase,accession number Z46232,Smith-Waterman Score=777.
aagaaaaactagttacagagataagacaacatgtgaagtaaatacagtaaatcatactaagtgtcaatatttttgtagcattaataagttcaaaggaaaaagtattatatttggctgtgttagccagagaaagtttcaaagaggagaaacgctggtgaaagtaaaagatgctgaagatcagttgggtgcacgagtgggttacatcgaactggatctcaacagcggtaagatccttgagagttttcgccccgaagaacgttttccaatgatgagcacttttaaagttctgctatgtggcgcggtattatcccgtgttgacgccgggcaagagcaactcggtcgccgcatacactattctcagaatgacttggttgagtactcaccagtcacagaaaagcatcttacggatggcatgacagtaagagaattatgcagtgctgccataaccatgagtgataacactgcggccaacttacttctgacaacgatcggaggaccgaaggagctaaccgcttttttgcacaacatgggggatcatgtaactcgccttgatcgttgggaaccggagctgaatgaagccataccaaacgacgagccttcccggcaacaattaatagactggatggaggcggataaagttgcaggaccacttctgcgctcggcccttccggctggctggtttattgctgataaatctggagccg

SEQ ID NO: 27906 - DNA, 2229 bp, Homo sapiens
  SIMILAR (526)..(2226): 991254mologous to Plasmid F 100 pct identical to gp:ECOTNPA_3,accession number AP001918,Smith-Waterman Score=2936.
atgcgactttttggttacgcacgggtatcaaccagccagcaatctctcgatattcaggttcgggcactcaaagacgcaggcgtgaaagcaaatcgcatctttactgacaaggcatcgggcagttcaagcgatcggaaagggctggacttgctgaggatgaaggtggaggaaggtgacgtcatcttggtgaagaaacttgaccgccttgggcgcgatactgctgacatgatccagttaataaaagagtttgacgcccaaggtgtatccattcggtttattgatgacggaatcagtaccgatggggagatgggtaaaatggttgtcactattctatctgcagtggcccaggcagaacgacagagaatactagagcgtaccaatgaaggtcgccaagaggcaatggcaaaaggagttgtttttgcagaaaatgataaaaagatgttgagtaatgctttcattgaaactgctgactttaggactctaattgaaactgatgacaggaccattgttgttggtagacgagggacagaaacattgttgaatgaacatttgaaaaaatggaattctgcacaaggtgacattttaagaaagtgtaggcttgtcgcaaaggagtatttagatgaaaataacccagaagaatcaattggtgatcttcaattcaatttgaatatctcagaaatagaaaataatatagtatcacttcttgaacgctcagacaggaaagttgtcatattaatggataagctagatgaggcgtatgaaccggataatataggaattggaatcattgcaggtctagcatatgcatctattgaattaaatcaaaaagcaaaatgcattcgtccaataatttttttaagggataatatatttaggtcgctatcaaaggaagatcctgattactcgagaaatatagagggtcaagtcataaggttgcattgggactgggcacaactcctaatgctgtcagctaaaagaatgaaagtagcatttaagctagatattgagaaagatcaacgagtttgggatagatgcacagcggatgatcttaaagggaggaatggttttaagcgatgtttgcaatttaccctttaccggcccagggatttactatcattgttgaatgaagcttttttttccgcattcagagagaatagagaaactatcataaacactgacctagaatatgcagccaagtcaatttccatggccagacttgaagatctctggaaagagtatcagaagatctttccttcaatacaggttataactagtgcatttcgtagcattgaacctgaattaacagtttatacgtgcttaaaaaaaatagaagcatctttcgaattaatcgaagaaaatggagatcctaaaataacgtctgaaatacagttgttaaaggcaagtggaattctccaaagtttgtatagtgtaggatttgttggtattcgtgataaaaacacctcatcctattcattttgccatgacgggcgaactccagataaaggttttgaaagtaatgagaaattattaattcatccatgttactggcttggtttgaatctaaatcgtaatgcacttgctccagaggaagcagaggagataaatgacgaatatgatattaatattatttcagataattcagccattagaaataaaacaataggtcaaataactactcatctagatcagataccgataggaaatgaaggtgccactgaatttgaacaatggtgtttagacgcactaagaatagtatttgcatcccacctaacagacatcaagtcccatccaaatggtaacgcagttcagagacgagatattataggcaccaatggtggcaaatctgatttttggaaacgagtattggaggactataaaacaagacaagttgtttttgatgctaaaaattttgaagaattaggtccatctgagtatagacaattacaatcatatttaacaggtccgtatggaaagctcggttttataattaatagagatgagagtgaggtattgaaatcaggaaaagatttagattggacaaaggaaatgtatcaatcccataattcattaataataaagttacctgcgaaatatatatctaaactgctgcagaaattaagaaatcctgaaaaacatgacgctatagatagacagatggggaaacttttaactttatatgaaacatcatatatggctattaaaagcacccaaaagaaaagaagaaaataa

SEQ ID NO: 27907 - DNA, 231 bp, Homo sapiens
  SIMILAR (225)..(127): 841254mologous to unidentified cloning vector beta- lactamase,accession number M37847,Smith-Waterman Score=137.
gagccagcccacgtcaatgactcgcggtaagtccggccctcctgggaccaccatccgatcgggaattcgtatgcgaccagcttcgaggcctcgcagtatcagcgtactctgctgggataacacgcccctagatctatcagagacgtcggggcgaaaactctcaaggatcttcccgctgttgagatccagttcgatgtaacccactcgtgcccccaactgatcttcaggcat

SEQ ID NO: 27908 - DNA, 547 bp, Homo sapiens
  SIMILAR (1)..(387): 901254mologous to Escherichia coli beta-lactamase,accession number A24782,Smith-Waterman Score=598.
atgagtattcaacatttccgtgtcgcccttattcccttttttgcggcattttgccttcctgtttttgctcacccagaaacgctggtgaaagtaaaagatgctgaagatcagttgggtgcacgagtgggttacatcgaactggatctcaacagcggtaagatccttgagagttttcgccccgaagaacgtttttcaatgatgagcacttttaaagttctgctatgtggcgcggtattatcccgtattgacgccgggcaagagcaactcggtcgccgcatacactattctcagaatgacttggttgagtactcaccagtcacagaaaagcatattacggatggcatgacagaaaggcttgagcgaagcttttctgataatacagcatcactgcagacccgtagctctagcgtttatcaaccagggtcctggtgcaccagaagggcaccaaaaaattgtgtgaatgcaggggccaagtgcagcagtgatgggaactgcagacctggcatggttctgtccggggctgcggttacaagtcaccacaaaccag

SEQ ID NO: 27909 - DNA, 789 bp, Homo sapiens
  SIMILAR (349)..(657): 1001254mologous to Homo sapiens fanconi anemia protein E,accession number AF265210,Smith-Waterman Score=537.
atgcgggtaacagtgaatgagcaggacagtggctgtgacgcaactgtgtatgcgagcgagaggaagggcgcagaggaaacctatttgttcttagatgacaccgtgactctcatgagggcactgactgagtggctgcatgcctttggcagctgcgtgaccttgaaaccactgttgctgcgattgccccggatatgccagaggaacctgatgtccctgctgatggccgttcggccatcgctgccggaaagtgggctcctctctgtgctgcagattgcccagcaggacctagcccctgacccagatgcctggctccgtgccctgggggaattgctgcgaagggatttgggggctccagaccctgaagaagaggagaacagggactcccagcagcctgggaaacgcagaaaggactcagaggaagaggctgccagtcctgaggggaagagggtccccaaaagattacggtgttgggaagaggaagaagatcatgagaaggagagacccgaacataagtcactggaatccctggcagatggaggaagtgcatctcctattaaggaccagcctgtcatggcagttaagactggcgaggacggttcgaatctggatgatgctaaaggtctggctgagagtttggagttgcccaaagctatccagtgtatgcgcgaccgagttgctctttgcccggcgtcaatacgggataataccgcgccacatagcagaactttaaaagtgctcatcattgaaaacgtcttcgggcgaaaactctcaagatcttaccgctgttga

SEQ ID NO: 27910 - DNA, 411 bp, Homo sapiens
  SIMILAR (3)..(272): 951254mologous to Serratia marcescens beta- lactamase,accession number X97254,Smith-Waterman Score=442.
aaacgctggtgaaagtaaaagatgctgaagatcagttgggtgcacgagtgggttacatcgaactggatctcaacagcggtaagatccttgagagttttcgccccgaagaacgttttccaatgatgagcacttttaaagttctgctatgtggcgcggtattatcccgtattgacgccgggcaagagcaactcggtcgccgcatacactattctcagaatgacttggttgagtactcaccagtcacagaaaagcatcttacggatggcatgacaagcctctgggccctaatacaaagcaagcacactctaaagaagccagaagaatgcaagcagcgaagtcgccgctccccacaggcaagagagtaccggcagacagcggcgcgagacaggggcagaacgatgaggcgccgga

SEQ ID NO: 27911 - DNA, 1788 bp, Homo sapiens
  SIMILAR (526)..(1785): 991254mologous to Plasmid F 100 pct identical to gp:ECOTNPA_3,accession number AP001918,Smith-Waterman Score=2168.
atgcgactttttggttacgcacgggtatcaaccagccagcaatctctcgatattcaggttcgggcactcaaagacgcaggcgtgaaagcaaatcgcatctttactgacaaggcatcgggcagttcaagcgatcggaaagggctggacttgctgaggatgaaggtggaggaaggtgacgtcatcttggtgaagaaacttgaccgccttgggcgcgatactgctgacatgatccagttaataaaagagtttgacgcccaaggtgtatccattcggtttattgatgacggaatcagtaccgatggggagatgggtaaaatggttgtcactattctatctgcagtggcccaggcagaacgacagagaatactagagcgtaccaatgaaggtcgccaagaggcaatggcaaaaggagttgtttttgcagaaaatgataaaaagatgttgagtaatgctttcattgaaactgctgactttaggactctaattgaaactgatgacaggaccattgttgttggtagacgagggacagctaaaagaatgaaaggagcatttaagctagatattgagaaagatcaacgagtttgggatagatgcacagcggatgatcttaaagggaggaatggttttaagcgatgtttgcaatttaccctttaccggcccagggatttactatcattgttgaatgaagcttttttttccgcattcagagagaatagagaaactatcataaacactgacctagaatatgcagccaagtcaatttccatggccagacttgaagatctctggaaagagtatcagaagatctttccttcaatacaggttataactagtgcatttcgtagcagtgaacctgaattaacagtttatacgtgcttaaaaaaaatagaagcatctttcgaattaatcgaagaaaatggagatcctaaaataacgtctgaaatacagttgttaaaggcaagtggaattctccaaagtttgtatagtgtaggatttgttggtattcgtgataaaaacacctcatcctattcattttgccatgacgggcgaactccagataaaggttttgaaagtaatgagaaattattaattcatccatgttactggcttggtttgaatctaaatcgtaatgcacttgctccagaggaagcagaggagataaatgacgaatatgatattaatattatttcagataattcagccattagaaataaaacaataggtcaaataactactcatctagatcagataccgataggaaatgaaggtgccactgaatttgaacaatggtgtttagacgcactaagaatagtatttgcatcccacctaacagacatcaagtcccatccaaatggtaacgcagttcagagacgagatattataggcaccaatggtggcaaatctgatttttggaaacgagtattggaggactataaaacaagacaagttgtttttgatgctaaaaattttgaagaattaggtccatctgagtatagacaattacaatcatatttaacaggtccgtatggaaagctcggttttataattaatagagatgagagtgaggtattgaaatcaggaaaagatttagattggacaaaggaaatgtatcaatcccataattcattaataataaagttacctgcgaaatatatatctaaactgctgcagaaattaagaaatcctgaaaaacatgacgctatagatagacagatggggaaacttttaactttatatgaaacatcatatatggctattaaaagcacccaaaagaaaagaagaaaataa

SEQ ID NO: 27912 - DNA, 816 bp, Homo sapiens
  SIMILAR (519)..(259): 1001254mologous to synthetic construct galactosidase fusion protein,accession number A04190,Smith-Waterman Score=441.
tcactcaaaggcggtaatacggttatccacagaatcaggggataacgcaggaaagaacatgtgagcaaaaggccagcaaaaggccaggaaccgtaaaaaggccgcgttgctggcgtttttccataggctccgccccccggctccagatttatcagcaataaaccagccagccggaagggccgagcgcagaagtggtcctgcaactttatccgcctccatccagtctattaattgttgccgggaagtgtcatgccataccgtaagatgcttttctgtgactggtgagtactcaaccaagtcattctgagaatagtgtatgcggcgaccgagttgctcttgcccggcgtcaacacgggataataccgcgccacatagcagaactttaaaagtgctcatcattggaaaacgttcttcggggcgaaaactctcaaggatcttaccgctgttgagatccagttcgatgtaacccactcgtgcacccaactgatcttcagcatcttttactttcaccagcgtttcaagcagctggacgccccgcgtgaggccgtagacgtccaccagggcccagagcgggtcggccgtgcggaccccgctgaagaacagcataacagccgagtcgttgatgcggtggaagacacggcccttcttgtccacccagaatgcgatgatgttgccctgtctgtaaaatgggcccagaacttctttgcctgcttgaaggtaggggctggccccagtgctctctggaggctcttccccattagagagcttggtgactgtgactgtgatggtttctattccccagtgaatttgttccat

SEQ ID NO: 27913 - DNA, 468 bp, Homo sapiens
  SIMILAR (187)..(339): 941254mologous to synthetic construct beta-lactamase coding region,accession number Z29589,Smith-Waterman Score=242.
ggcaggcctcgggacctgcagcccgccatgcctgagcctcccaccccctccatgggctcctgtgctgcccgagcctccccaacgagcgccaccccctgctccacggcacccagtcccatccaccactcaagggctgaggagtgcgggcacacagcactgggactggcaggcagctccacctgcagccccggaaccttccgcaaactattaactggcgaactacttactctagcttcccggcaacacttaatagactggatggaggcggataaagttgcaggaccacttctgcgctcggcccttccggctggctggtttattgctgataaatctggagccgctgcgatcttttcagctgccatcttcccagtcgccatcttctccatcgccatcttcccagtgaccatcttcccagtcagcagtatccacttcttttcctacaccatcccctcctcaggacaattctag

SEQ ID NO: 27914 - DNA, 2169 bp, Homo sapiens
  SIMILAR (496)..(368): 341254mologous to Homo sapiens haemopoietic progenitor homeobox HPX42B,accession number AF068006,Smith-Waterman Score=46.
tcactcaaaggcggtaatacggttatccacagaatcaggggataacgcaggaaagaacatgtgagcaaaaggccagcaaaaggccaggaaccgtaaaaaggccgcgttgctggcgtttttccataggctccgccccccggctccagatttatcagcaataaaccagccagccggaagggccgagcgcagaagtggtcctgcaactttatccgcctccatccagtctattaattgttgccgggaagcgctgttgagatccagttcgatgtaacccactcgtgcacccaactgatcttcagcatcttttactttcaccagcgtttccgttatcaccgccagctccgtgccaagcacgtctgccagacccacagagatcctttctgtttctggtggagggagggagggtggccggtgtgtttggtgtggaggggctgctattggggtctgaggcacccagggagtgtctggacccacagcagggcccctgcccaggtggtcatcctgacccctgctgctgatcaggaagactttcatcatccacacgggtttaaaggggccccagggaccggagggtcgagctgcgcacaggtgtggggacggccaccctctgcccactgcctggcccacagccttctgtggctccttgaggcctggggcactgtgcttgtgggggcagctgggggcatccaggagcagaggacttgccaaactctgggactgacgtccagctgtcagccagaggaccccagaagagagtgggaaacaggcgggagagttcaggaccaagacggtgtggtttgtggcctggacctctgagagctgcatctccctggccagcctcttccgctccagagggctcaggtactggtggtgctggaagacgccctccaaggtgcggacctgctccatggtgaaggctgtgcggacacggggggcccgcaaggtatttggctccttactcaaccctgcaggctctttaaagacagctgtgctccaggtgacccggaatgggcttgagcctagacgctgagcaggcaccggctgtgcggccatggtcctctccggcgcaggcagatttgaggacccggcggcctccttgatgctgacggcctgagggggctcccgggcgccgatgtctggcccgggccagggaggctccccagggagaagtcggcaggcctgggggtgtgggtcggccctgagcagctgctctgggagagccagtccacggagccaaagctggagagctgggcggggtaggaactccgcgtcggcggcgggactggtgcgtccccgccaagccaggctgtccccactgtggccagggcgcgggcagagccgccggtgactgtggcgcccaaacctcacggggacgccctgagcacgggcccccgggacggtcatagccacgcgcggccgctgctcccacgaacctgagtcccgagctgtctgcgtctccgcgtccccgggtcgcctgcgcgtcggcgtggggcgcggggaccgacgtgaccgggtgggaggcagccatgccgagggtaggacggtgtcttccgcgcactggcttggggtccgcacggcgtctccggcggccggagttaggcggaggcgcaggtccggcccccgaagccatgcggggtttcggcgcagacgcggggtccacggagcagccccgactcccggccaggtcctgaccgcggctgcctcagcgcccacgccgcccgcggaaatcagaaagaccggcgggcctcgccccacggttacgcccgccccagccagccgagcctcccgggctggggtcacaggagaggggtcgcggaacggaccgtgccgccgctgaccctggtcttcctcggaccagcccggagtccagctagtccccgaaacgcgctccccccgagtccagggcctgaggacagacaccgggcccagcgcgtgctgccggccccgtcgcgactcgcccgagcctcctccgagcactctgggaccactggcacgggtccctgaggaccctcgctcggcggccgcgctgcccagaatgaagcccacggccagggacactgtctggtcgaaggcgccgcgcactgctccacgtgctggttcaaagtcacactggtcgcgcaacgggcccatgatgttcgcgatgtcgcccaggtgccccacggtctgcat

SEQ ID NO: 27915 - DNA, 2159 bp, Homo sapiens
  SIMILAR (1073)..(792): 651254mologous to Klebsiella pneumoniae beta- lactamase,accession number X53817,Smith-Waterman Score=328.
ttgttcgccaggctcaaggcgcgcatgccgacggcgaggatctcgtcgtgacccatggcgatgcctgcttgccgaatatcatggtggaaaatggccgcttttctggattcatcgactgtggccggctgggtgtggcggaccgctatcaggacatagcgttggctacccgtgatattgctgaagagcttggcggcgaatgggctgaccgcttcctcgtgctttacggtatcgccgctcccgattcgcagcgcatcgccttctatcgccttcttgacgagttcttctgagcgggactcgccgccttctatgaaaggttgggcttcggaatcgttttccgggacgccggctggatgatcctccagcgcggggatctcatgctggagttcttcgcccaccccgggctcgatcccctcgcgagttggttcagctgctgcctgaggctggacgacctcgcggagttctaccggcagtgcaaatccgtcggcatccaggaaaccagcagcggctatccgcgcatccatgcccccgaactgcaggagtggggaggcacgatggccgctttggtccggatctttgtgaaggaaccttacttcggctccagatttatcagcaataaaccagccagccggaagggccgagcgcagaagtggtcctgcaactttatccgcctccatccagtctattaattgttgccgggaagctagagtaagtagttcgccagttaatagtttgccgaacgttgttgccattgctgcaggcatcgtggtgtcacgctcgtcgtttggtatggcttcattcagtgtcatgccatccgtaagatgcttttctgtgactggtgagtactcaaccaagtcattctgagaatagtgtatgcggcgaccgagttgctcttgcccggcgtcaacacgggataataccgcgccacatagcagaactttaaaagtgctcatcattggaaaacgttcttcggggcgaaaactctcaaggatcttaccgctgttgagatccagttcgatgtaacccactcgtgcacccaactgatcttcagcatcttttactttcaccagcgtttctcttacatctttgaggttcctgaatccttttagggtaatggccaccgcttgtgacccaaatgcttctgctaaggtgaaaagggcaatgcatgcggcctcatcatagagctcccagatggctgctccctcgctagatgatgttagacttctttccttgggaaggtttgagaactccatgtgttcagagacctgatttggcttttgctctgagacacaaaagagcagttcacatcttcctggttgacaagcagatcccacccccgaaccatccttccccaccaagtcccaagctgcatcagtgcaggtgccatgaaggacggggaaggctggcccagggagctcgtcacgtggcaaatagtatcgacggcactgctgccagataacaccaccggggaaacattccatcatgatggccgtgcggacataggaagccagttcatccatcgctttcttgtctgctgccatttgctttgtgacatccagcgccgcacattcagcagcgtttttcagcgcgttttcgatcaacgtttcaatgttggtatcaacaccaggtttaactttgaacttatcggcactgacggttaccttgttctgcgctggctcatcacgctggataccaaggctgatgttgtagatattggtcaccggctgaggtgtttcgattgccgctgcgtggatagcaccatttgcgatagcggcgtccttgatgaatgacactccattgcgaataagttcgaaggagacggtgtcacgaatgcgctggtccagctcgtcgattgccttttgtgcagcagaggtatcaatctcaacgccaagcgtcatcgaagcgcaatattgctgctcaccaaaacgcgtattgaccaggtgttcaacggcaaatttctgcccttctgatgtcagaaaggtaaagtgattttctttctggtattcagttgctgtgtgtctggtttcagcaaaaccaagctcgcgcaattcggctgtgccagatttagaaggcagatcaccagacagcaacgcgccacggaaaaacagcgcatacagaacatccgtcgccgcgccggacaacgtgataattttatgacccat

SEQ ID NO: 27916 - DNA, 1611 bp, Homo sapiens; identical to SEQ ID NO: 16034
  SIMILAR (808)..(1515): 961254mologous to Escherichia coli beta-lactamase,accession number A24782,Smith-Waterman Score=1153.

SEQ ID NO: 27917 - DNA, 851 bp, Homo sapiens
  SIMILAR (1)..(252): 951254mologous to Leishmania major probable levansucrase precursor,accession number AL160371,Smith-Waterman Score=401.
atgaacatgaacatcaaaaaaattgtaaaacaagccacagttctgacttttacgactgcacttctggcaggaggagcgactcaagccttcgcgaaagaaaataaccaaaaagcatacaaagaaacgtacggcgtctctcatattacacgccatgatatgctgcagatccctaaacagcagcaaaacgaaaaataccaagtgcctcaattcgatcaatcaacgattaatcatattgtgtcggccaaagacttgatgtgtgtgacagctggcgctgcactacgctgtaggaatagtagactgatacaacagttatccggcgccaagcggttcggggctgaaacgggggggttcggtgcaccacaagccccagtttggaagcgaaccgaccctacaccgaaacttaagatacctacaaggcgtgagcctatgagaaaggcgcccacgcttcccgaaagggaggaaaggcggacagggtatcgggtaaacggcagggtcggaaacaggagagcgcagaagggagcttccagggggaaacgcctggggggcggagcctatggaaaaacgccagcaacgcggcctttttacggttcctggccttttgctggccttttgctcacatgttctttcctgcgttatcccctgattctgtggataaccgtattaccgcctttgagtgagctgataccgctcgccgcagccgaacgaccgagcgcagcgactgcaaatggtgtggtattagcaactgagaaaaaacagaaatccattctgtatgatgagcgaagtgtacacaaagtagaaccaattaccaagcatataggtttggtgtacagtggcatgggccccgattacag

SEQ ID NO: 27918 - DNA, 2790 bp, Homo sapiens
  SIMILAR (1824)..(2651): 961254mologous to Pichia pastoris Beta-Lactamase,accession number Z46232,Smith-Waterman Score=1335.
tcagttcggtgtaggtcgttcgctccaagctgggctgtgtgcacgaaccccccgttcagcccgaccgctgcgccttatccggtaactatcgtcttgagtccaacccggtaagacacgacttatcgccacatctggccccagtgctgcaatgataccgcgagacccacgctcaccggctccagatttatcagcaataaaccagccagccggaagggccgagcgcagaagtggtcctgcaactttatccgcctccatccagtctattaattgttgccgggaagctagagtaagtagttcgccagttaatagtttgcgcaacgttgttgccattgctacaggcatcgtggtgtcacgctcgtcgtttggtatggcttcattcagctccggttcccaacgatcaaggcgagttacatgatcccccatgttgtgcaaaaaagcggttagctccttcggtcctccgatcgttgtcagaagtaagttggccgcagtgttatcactcatggttatggcagcactgcataattctcttactgtcatgccatccgtaagatgcttttctgtgactggtgagtactcaaccaagtcattctgagaatagtgtatgcggcgaccgagttgctcttgcccggcgtcaatacgggataataccgcgccacatagcagaactttaaaagtgctcatcattggaaaacgttcttcggggcgaaaactctcaaggatcttaccgctgttgagatccagttcgatgtaacccactcgtgcacccaactgatcttcagcatcttttactttcaccagcgtttcgcacagatgcgtaaggagaaaataccgcatcaggcgccattcaccattcaggctgggcttctgttgtgaagagcgatcagtgagggcctcttcgctattcgccagctggcgaaagggggatgtgcttctgaagcctacttctgtcagttcatcaaactcattctccatccagttttgtttccttgctggcgaggcattgtgatcctttggaagagaagaggcactctggtttttggaattttcagcctttttgtgctggtttctctccatcttcgtggatttgatgttggtgacctttggatggggtctctgagtggacgtcctttttgttgatgttgatactattcctttctgtttgttagttttccttctaatagtcaggcccctctgctgcaggtctgctggagtttgctggaggtccactccaggccccttttgcctgggtatctccagtagaggctacagaacaagatgccctgcccagagaggagaaatctggagacgcagtctggctgcagtggctttgcggagctgcggtgggcgtctccaagttcgaacttgctggcagctttgtttacaccgtgagggtaaaaccgcctactcacacctcagtaatggcagatgcccctcccctcaccaagctcgagtgtcccaggtcaacttcagactgctgtgctggcactgagaatttcaagccagtggatgttagcttgctggactctgtgggggtgggatcggctgagcaagacaacttggctccctggcttcagccctctttccaggggagtgaacagttctgtctcactggcgttccaggagctgctgggttttgtggagaggatgttatcatcgttcctgatttaggggaaaatgctaagaaaataagtgattttcaaaaccttgccatgattccatcagtaatggagtttgcactggtactgggaacctccagggcagtagaagaagccgtgggaggaactttcacatttggcgaggcaagtacaattttgttagggctttttgaaactgcatttgaaaacttgcttagcggttttgtgattcatgaaacgctggtgaaagtaaaagatgctgaagatcagttgggtgcacgagtgggttacatcgaactggatctcaacagcggtaagatccttgagagttttcgccccgaagaacgttttccaatgatgagcacttttaaagttctgctatgtggcgcggtattatcccgtgttgacgccgggcaagagcaactcggtcgccgcatacactattctcagaatgacttggttgagtactcaccagtcacagaaaagcatcttacggatggcatgacagtaagagaattatgcagtgctgccataaccatgagtgataacactgcggccaacttacttctgacaacgatcggaggaccgaaggagctaaccgcttttttgcacaacatgggggatcatgtaactcgccttgatcgttgggaaccggagctgaatgaagccataccaaacgacgagcgtgacaccacgatgcctgcagcaatggcaacaacgttgcgcaaactattaactggcgaactacttactctagcttcccggcaacaattaatagactggatggaggcggataaagttgcaggaccacttctgcgctcggcccttccggctggctggtttattgctgataaatctggagccggtgagcgtgggtctcgcggtatcattgcagcactggggccagatggtaagccctcccgtatcgtagttatctacacgacggggagtcaggcaactatggatgaacgaaatagacagatcgctgagataggtgcctcactgattaagcattggctgcgcaactgttgggaagggcgatcggtgcgggcctcttcgctattacgccagctggcgaaagggggatgtgctgcaaggcgattaagttgggtaacgccagggttttcccagtcacgacgttgtaaaacgacggcca

SEQ ID NO: 27919 - DNA, 1071 bp, Homo sapiens
  SIMILAR (669)..(794): 901254mologous to unidentified cloning vector beta- galactosidase alpha-peptide,accession number M77169,Smith-Waterman Score=201.
tcagttcggtgtaggtcgttcgctccaagctgggctgtgtgcacgaaccccccgttcagcccgaccgctgcgccttatccggtaactatcgtcttgactccaacccggtaagacacgacttatcgccacatttggccccagtgctgcaatgataccgcgagaaccaagcttaacggctccagatttatcagcaattaaccagccatccggaagggccgagcgcagaagtggtcctgcaactttatccgcctccatccagtctattaattgttgccgggaagctagagtaagtagttcgccagttaataatttgcgcccaaatgttgccattgctacaggcatcggggtgtcgcgcttgttcttgaagcattccagctttggactgggccgttcttttacaacgttgttaatggggaaaaacctgtcgttacccaactttattagcctggcaaacatttctcttttctccaattgggttaatttctttagctcggtactctgggtgaggatggagatgatgatgatgatgacgatggtgatgatgatatatagtttttgccgggatcctctagagtcgacctgcatgcatgcaagcttggcactggccgtcgttttacaacgtcgtgactgggaaaaccctggcgttacccaacttaatcgccttgcaacacatccccctttcgcccagctggcgtaatagcgaagaggcccgcaccgatcgcccttcccaacagttgcgcagcctgaatggcgaatggcgcctgatgcggtattttctccttacgcatctgtgcgaaacgctggtgaaagtgaaagatgctgtagataagttgggtgcacgagtgggttacctccgaactggatctcaacagcggtaagatccttgagagttttcgccccgaagaaacgttttccaatgatgagcacttttaaagttctgcagtggctgctgccagtggcgataagtcgtgtcttaccgggttggacttcaagacgatagttaccggataaggcgcagcggtcgggctgaacggggggttcgtgcacacagcccagcttggagcgaacgac

SEQ ID NO: 27920 - DNA, 1310 bp, Homo sapiens
  SIMILAR (1007)..(1168): 981254mologous to synthetic construct galactosidase fusion protein,accession number A04190,Smith-Waterman Score=265.
atgcggtctcgccgttgcctgggactgaccccgccccgccccgtcctgctccgggcagccccgcggacagctgcacgggtggcctcgtggtccatggcctccggctgggccggggaaagccgtttcgcggagcacgcccggcggggccagccgggggtgagggtcaggggccatcccctgggcagccctcaggttgcaggaccctctggatctgtttccggcttgcacggtgggcctttccagcagctccggaatgctcccgatgagctcagcttcctggatgaggaggcgcccctgagccccagaccccggaacctgccaagggtcccaggaggcccggaggctgcaggccttggctccaacttccagccgcgcgtgtcctacgtgccgcccaccctgtgtgtgtggagtccctttgtgtgcactgtgcgcggcctcggtctccgctgcccactgctggctctcatgctgctgctatgccaacggttcgaaggtgatggtggccggcgtcatggttctggagccacttgtccagcagaaacgctggtgaaagtaaaagatgctgaagatcagttgggtgcacgagtgggttacatcgaactggatctcaacagcggtaagatccttgagagttttcgccccgaagaacgttttccaatgatgagcacttttaaagttctgctatgtggcgcggtattatcccgtgttgacgccgggcaagagcaactcggtcgccgcatacactattctcagaatgacttggttgagtactcaccagtcacagaaaagcatcttacggatggcatgacagtaagagaattatgcagtgctgccataaccatgagtgataacactgcggccaacttacttctgacaacgatcggaggaccgaaggagctaaccgcttttttgcacaacatgggggatcatgtaactcgccttgatcgttgggaaccggagctgaatgaagccataccaaacgacgagcgtgacaccacgatgcctgtcagcaatggcaacaacgttgcgcaaactattaactggcgaactacttactctagcttcccggcaacaattaatagactggatggaggcggataaagttgcaggaccacttctgcgctcggcccttccggctggctggtttattgctgataaatctggagccgtggctgctgccagtggcgataagtcgtgtcttaccgggttggactcaagacgatagttaccggataaggcgcagcggtcgggctgaacggggggttcgtgcacacagcccagcttggagcgaacgacctacaccgaactga

SEQ ID NO: 27921 - DNA, 972 bp, Homo sapiens
  SIMILAR (151)..(792): 981254mologous to Escherichia coli ES-beta- lactamase,accession number Y10281,Smith-Waterman Score=1074.
atgtcccgcccaagatcagggtcacgcaagcagtccgaggccagcaagggagacagcggcctctgccacggcactgactccacgtcagagcagggactgctagaccgggctgcggaggggctggcaggtgacagagtcagctccgtgagggaaacgctggtgaaagtaaaagatgctgaagatcagttgggtgcacgagtgggttacatcgaactggatctcaacagcggtaagatccttgagagttttcgccccgaagaacgttttccaatgatgagcacttttaaagttctgctatgtggcgcggtattatcccgtgttgacgccgggcaagagcaactcggtcgccgcatacactattctcagaatgacttggttgagtactcaccagtcacagaaaagcatcttacggatggcatgacagtaagagaattatgcagtgctgccataaccatgagtgataacactgcggccaacttacttctgacaacgatcggaggaccgaaggagctaaccgcttttttgcacaacatgggggatcatgtaactcgccttgatcgttgggaaccggagctgaatgaagccataccaaacgacgagcgtgacaccacgatgcctgcagcaatggcaacaacgttgcgcaaactattaactggcgaactacttactctagcttcccggcaacaattaatagactggatggaggcggataaagttgcaggaccacttctgcgctcggcccttccggctggctggtttattgctgataaatctggagccgtcctgtcgggtttcgccacctctgacttgagcgtcgatttttgtgatgctcgtcagggggcggagcctatggaaaaacgccagcaacgcgcctttttacggttcctggccttttgctggccttttgctcacatgttctttcctgcgttatcccctgattctgtggataaccgtattaccgcctttgagtga

SEQ ID NO: 27922 - DNA, 3109 bp, Homo sapiens
  SIMILAR (899)..(2137): 981254mologous to Plasmid F 100 pct identical to gp:ECOTNPA_3,accession number AP001918,Smith-Waterman Score=2114.
atgcgactttttggttacgcacgggtatcaaccagccagcaatctctcgatattcaggttcgggcactcaaagacgcaggcgtgaaagcaaatcgcatctttactgacaaggcatcgggcagttcaagcgatcggaaagggctggacttgctgaggatgaaggtggaggaaggtgacgtcatcttggtgaagaaacttgaccgccttgggcgcgatactgctgacatgatccagttaataaaagagtttgacgcccaaggtgtatccattcggtttattgatgacggaatcagtaccgatggggagatgggtaaaatggttgtcactattctatctgcagtggcccaggcagaacgacagagaatactagagcgtaccaatgaaggtcgccaagaggcaatggcaaaaggagttgtttttgcagaaaatgataaaaagatgttgagtaatgctttcattgaaactgctgactttaggactctaattgaaactgatgacaggaccattgttgttggtagacgagggacaggatcatttaatttagcaagggcagcaacaagactattatggcgatacgctatgctaatggagatagcatcatatatatcatctcattacaaattgtcatctcaaatatcatcagaaacattgttgaatgaacatttgaaaaaatggaattctgcacaaggtgacattttaagaaagtgtaggcttgtcgcaaaggagtatttagatgaaaataacccagaagaatcaattggtgatcttcaattcaatttgaatatctcagaaatagaaaataatatagtatcacttcttgaacgctcagacaggaaagttgtcatattaatggataagctagatgaggcgtatgaaccggataatataggaattggaactcattgcaggtctagcatatgcatctattgaattaaatcaaaaagcaaaatgcattcgtccaataatttttttaagggataatatatttaggtcgctatcaaaggaagatcctgattactcgagaaatatagagggtcaagtcataaggttgcattgggactgggcacaactcctaatgctgtcagctaaaagaatgaaagtagcatttaagctagatattgagaaagatcaacgagtttgggatagatgcacagcggatgatccttaaaagggagggaatggttttaagcgatgtttgcaatttaccctttaccggcccagggatttactatcattgttgaatgaagcttttttttccgcattcagagagaatagagaaactatcataaacactgacctagaatatgcagccaagtcaatttccatggccagacttgaagatctctggaaagagtatcagaagatctttccttcaatacaggttataactagtgcatttcgtagcattgaacctgaattaacagtttatacgtgcttaaaaaaaatagaagcatctttcgaattaatcgaagaaaatggagatcctaaaataacgtctgaaatacagttgttaaaggcaagtggaattctccaaagtttgtatagtgtaggatttgttggtattcgtgataaaaacacctcatcctattcattttgccatgacgggcgaactccagataaaggttttgaaagtaatgagaaattattaattcatccatgttactggcttggtttgaatctaaatcgtaatgcacttgctccagaggaagcagaggagataaatgacgaatatgatattaatattatttcagataattcagccattagaaataaaacaataggtcaaataactactcatctagatcagataccgataggaaatgaaggtgccactgaatttgaacaatggtgtttagacgcactaagaatagtatttgcatcccacctaacagacatcaagtcccatccaaatggtaacgcagttcagagacgagatattataggcaccaatggtggcaaatctgatttttggaaacgagtattggaggactataaaacaagacaagttgtttttgatgctaaaaattttgaagaattaggtccatctgagtatagacaattacaatcatatttaacaggtccgtatggaaagctcggttttataattaatagagatgagagtgaggtcgttcgctccaagctgggctgtgtgcacgaaccccccgttcagcccgaccgctgcgccttatccggtaactatcgtcttgagtccaacccggtaagacacgacttatcgccactgcagcagccactggtaacaggattagcagagcgagataactacgatacgggagggcttaccatctggccccagtgctgcaatgataccgcgagacccacgctcaccggctccagatttatcagcaataaaccagccagccggaagggccgagcgcagaagtggtcctgcaactttatccgcctccatccagtctattaattgttgccgggaagctagagtaagtagttcgccagttaatagtttgcgcaacgttgttgccattgctgcaggcatcgtggtgtcacgctcgtcgtttggtatggcttcattcagctccggttcccaacgatcaaggcgagttacatgatcccccatgttgtgcaaaaaagcggttagctccttcggtcctccgatcgttgtcagaagtaagttggccgcagtgttatcactcatggttatggcagcactgcataattctcttactgtcatgccatccgtaagatgcttttctgtgactggtgagtactcaaccaagtcattctgagaatagtgtatgcggcgaccgagttgctcttgcccggcgtcaacacgggataataccgcgccacatagcagaactttaaaagtgctcatcattggaaaacgttcttcggggcgaaaactctcaaggatcttaccgctgttgagatccagttcgatgtaacccactcgtgcacccaactgatcttcagcatcttttactttcaccagcgttttattcagcagccgttctgcctcagatctctccatgggtgcagacagaaatctttccttgctggtaccatgctgttccaaaccttttctccgtgtctcacacctctctggaggatgacaatacgacaggtgagg

SEQ ID NO: 27923 - DNA, 1840 bp, Homo sapiens
  SIMILAR (1400)..(1705): 921254mologous to Escherichia coli beta-lactamase,accession number A24782,Smith-Waterman Score=476.
attccaacctatggaactgatgaatgggagcagtggtggaatgcctttaatgaggaaaacctgttttgctcagaagaaatgccatctagtgatgatgaggctactgctgactctcaacattctactcctccaaaaaagaagagaaaggctggcggggttgccttactggttagcagaatgaatcaccgatacgcgagcgaacgtgaagcgactgctgctgcaaaacgtctgcgacctgagcaacaacatgaatggtcttcggtttccgtgtttcgtaaagtctggaaacgcggaagtcagcgctcttccgcttcctcgctcactgactcgctgcgctcggtcgttcggctgcggcgagcggtatcagctcactcaaaggcggtaatacggttatccacagaatcaggggataacgcaggaaagaacatgtgagcaaaaggccagcaaaaggccaggaaccgtaaaaaggccgcgttgctggcgtttttccataggctccgccccctgagagatgatagcatgaactgctgttgaatcttgtcaaacgccttttctgcgtctggtgagataatcatgcagctcatatctttggctccgatgatatgccggattacacatactgatttgcgtatgtagaaccacccttgcatcccaaggatgaagcccatttgatcatggtggataaactttttcatgtgctgctgcaattcgtttgccagcattttattgaggatttgtgcctctcgatccttcttggacctggattctgttgtgccctgtgccctcctgataggtcttcgctccatgtcttcatcctgcgttgcatatggacgcctttttccatcgtcttcctcgcttttactacggccgtgttctgactccacgggtagctctcctcgcctctctgtgttcttgtagaggcgacagacaagctgtgaccgtcttcgggagctgcatgtgtcataagttttcaccgtcatcaccgaaacgcgcgagacgaaagggcctcgtgatacgcctatttttatagaaacgctggtgaaagtaaaagatgctgaagatcagttgggtgcacgagtgggttacatcgaactggatctcaacagcggtaagatccttgagagttttcgccccgaagaacgttttccaatgatgagcacttttaaagttctgctatgtggcgcggtattatcccgtattgacgccgggcaagagcaactcggtcgccgcatacactattctcagaatgacttggttgagtactcaccagtcacagaaaagcatcttacggatggcatgacagtaagagaattatgcagtgctgccataaccatgagtgataacactgcggccaacttacttctgacaacgatcggaggaccgaaggagctaaccgcttttttgcacaacatgggggatcatggtatctcgctttgatcgttgggaaccggagctgaatgaagccataccaaacgacgagcgtgacaccacgatgcctgtagcaatggcaacaacgttgcgcaaactattaactggcgaactacttactctagcttcccggcaacaattaatagactggatggaggcggataaagttgcaggaccacttctgcgctcggcccttccggctggctggtttattgctgataaatctggagccggtgagcgtgggtctcgcggtatcattgcagcactggggccagatgattgtggctgcccctgtggagttaggaattgcctcggcatcagccttcgaacaaggggctccacgctgtcattttgcacctggcctcacaaatgatgtagctgatcctgagcagaagattgaggaaggtggaaa

SEQ ID NO: 27924 - DNA, 4811 bp, Homo sapiens
  SIMILAR (1977)..(2171): 321254mologous to synthetic construct galactosidase fusion protein,accession number A04190,Smith-Waterman Score=68.
atgagattgaccccgcgcgcgctgtgcagcgccgcccaggccgcctggcgggagaacttccccctgtgcggtcgcgacgtggcgcgctggttcccgggccacatggccaaggggctgaagaagatgcagagcagcctgaagctggtggactgtatcatcgagaaaattatgcaacacttagaaggagaaggcctaaaaaatgtcatttttaccaactgtgtaaaggatgaaaatgtcaagcagatcatcccgatggtcactgaactgattgggagaagccaccgctaccaccgaaaagagaacctggagtactgtatcatggtcattggggtccccaacgtgggcaagtcctccctcatcaactccctccggaggcagcacctcaggaaagtggactcacagtacttggccttttgtgactggctgatgtcaccgatcgtgatgtcctcaagggaaagcaccagggtgggtggcgagcctgggatcaccagagctgtgatgtccaaaattcaggtctctgagcggcccctgatgttcctgttggacactcctggcgtgctggctcctcggattgaaagtgtggagacaggcctgaagctggccctgtgtggaacggtgctggaccacctggtcggggaggagaccatggctgactacctgctgtacaccctcaacaaacaccagcgctttgggaagagtatgagtattcaacatttccgtgtcgcccttattcccttttttgcggcattttgccttcctgtttttgctcacccagaaacgctggtgaaagtaaaagatgctgaagatcagttgggtgcacgagtgggttacatcgaactggatctcaacagcggtaagatccttgagagttttcgccccgaagaacgttttccaatgatgagcacttttaaagttctgctatgtggcgcggtattatcccgtgttgacgccgggcaagagcaactcggtcgccgcatacactattctcagaatgacttggttgagtactcaccagtcacagaaaagcatcttacggatggcatgacagtaagagaattatgcagtgctgccataaccatgagtgataacactgcggccaacttacttctgacaacgatcggaggaccgaaggagctaaccgcttttttgcacaacatgggggatcatgtaactcgccttgatcgttgggaaccggagctgaatgaagccataccaaacgacgagcgtgacaccacgatgcctgcagcaatggcaacaacgttgcgcaaactattaactggcgaactacttactctagcttcccggcaacaattaatagactggatggaggcggataaagtctcacatccaggtcatgctgatataagaggtgggttcacagtcttgggcagctctgcccttgtggctttgcaagaaatacaaaaaactgtcagagactattatgaacacttctatgcatgcgagctagacaacatagtagaaatggaaaaattcctggaaacatacaaccacacaagattgaaccgagaagagattgaatccctgaacagaccaataacaagttccaaaattgaatcattaataaaaaccctacaaactagaaataacccaggaccagatgaatttacagccaaattctaccagatgcaaaaggaggagctgagaataaaatacctaggaatccaacttacaagggatgtgaaggacctcttcaaggagaactacaaaccactgctcaacaaaataaaagaggacacatacaaatggaaaaacattccatgctcatggataggaagtatcaatatcgtgaaaatggccatactgcccaaggctaagcgtggaagcaaaacccttttgctcccaagcaaggagaggaagccgtgtgggcagaagttggctgccacttggggaagagcagaaaactctcacacgctggggtggaggctgcctgaagacagtgtggccaccacagacctggggccaccacagaccagccctcacgcggccagccctcacactgctgtcagatccggggccaccacagtccggcccttaatcagtcagacccggggacaccgcaggccagccctcacgcagccagtcctcatgccatcatacctggggccaccgcaggccagccctcagtcagacccggggccacctcaggccagtcttcagtcagtcagaccaggggacactgcaggccagtcctcacacgggtggtacaccaggcagccgcaccttcttcaccgcttcctgatgccaccggccacctgccagccccgtgtcactcttctaaggagtcaaggaaaaataaaaagatatggcattggtcctgaatggaattcagtttacagaagcccacagtccacacggaagccacagtgcacacggaagcccacagtccacatggaagcccacagtccagaccacgcagaaacccacagtccacacagaaacccacagtccagtccacacggaagcccacagtccagaccacacagaaacccacagtccacacagaaacccacagtccacacggaagcccacagtccacacggaagcccacagtccacacggaagcccatagtccagtccacacagaagcccacagtccacacggaagctcacagtccagaccacacagaaacccagagtccacacggaagcccacagtccacacagaagcccagagtccacacagaagcccacagtccagtccacacggaagcccacagtccacacgtaagcccacagtccacacagaagcccacagtccagtccacacggaagcccacagtccacacggaagcccacagtccacacggaagcccagagtccacacggaagcccacagtccagtccacatggaagcccagagtccacacggaagcccacagtccacacggaagcccacagtccacatggaagcccacagtccagtccacacggaagcccagagtccacacggaagcccacagtacacacggaagcccacagtccacacggaagtccacagtcaagatcaaccttccaagaacatgtataggacacttacttctcttggaggagctcgatccaaaatacgggggcagaggcacagctctgactgacagctcccttgctgtgggaccaccacctggtcgtttggatattgggaggaggctggagcgccaagaggccatgcggctgccccacaatcacatccctgtcaggtcccggagctggattcagacccggaacgtgtgtgtgcgcgccatcacggcaggaagtttagcaaaagccccaggacgttcttttagggacgtggcagctgaaaatgcacaggagacagcatcctgggtcgcgtttgtcgtccgcgcgaacagctgttcagagtcagacagacacaagccgggcatccgacggctccaaccactgcagctggggcttgtggcctgggacagtcctcggtggccctctgagggcgatacagtggcaaggcagtcggcggcgtgctcctgcccacgctgggctctgggcttcctggaaccacaggacatgaggcctctttcatgcacgcaaagcctggtgtgcaaggagctcacacccaatgcacgtccagccaaaacgctggtgaaagtaaaagatgctgaagatcagttgggtgcacgagtgggttacatcgaactggatctcaacagcggtaagatccttgagagttttcgccccgaagaacgttttccaatgatgagcacttttaaagttctgctatgtggcgcggtattatcccgtattgacgccgggcaaaagcaactcggtcgccgcatacactattctcagaatgacttggttgagtactcaccagtcacagaaaagcatcttacggatggcatgacagtaagagaattatgcagtgctgccataaccatgagtgataacactgcggccaacttacttctgacaacgatcggaggaccgaaggagctaaccgcttttttgcacaacatgggggatcatgtaactcgccttgatcgttgggaaccggagctgaatgaagccataccaaacgacgagcgtgacaccacgatgcctgcagcaatggcaacaacgttgcgcaaactattaactggcgaactacttactctagcttcccggcaacaattaatagactggatggaggcggataaagttgcaggaccacttctgcgctcggcccttccggctggctggtttattgctgataaatctggagccgaagtaaggttccttcacaaagatccggaccaaagcggccatcgtgcctccccactcctgcagttcgggggcatggatgcgcggatagccgctgctggtttcctggatgccgacggatttgcactgccggtagaactccgcgaggtcgtccagcctcaggcagcagctgaaccaactcgcgaggggatcgagcccggggtgggcgaagaactccagcatgagatccccgcgctggaggatcatccagccggcgtcccggaaaacgattccgaagcccaacctttcatagaaggcggcggttgggcgtcgcttggtcggtcatttcgaaccccagagtcccgctcagaagaactcgtcaagaaggcgatagaaggcgatgcgctgcgaatcgggagcggcgataccgtaaagcacgaggaagcggtcagcccattcgccgccaagctcttcagcaatatcacgggtagccaacgctatgtcctgatagcggtccgcacacccagccggccacagtcgatgaatccagaaaagcggccattttccaccatgatattcggcaagcaggcatcgcatgg

SEQ ID NO: 27925 - DNA, 1485 bp, Homo sapiens
  SIMILAR (1164)..(526): 981254mologous to Escherichia coli TEM-derived extended spectrum beta-lactamase,accession number AF308742,Smith-Waterman Score=1082.
atagggcgaattcgagctcggtacccggggatcctctagagtcgacctgcaggcatgcaagcttgagtattctatagtgtcacctaaatagcttggcgtaatcatggtcatagctgtttcctgtgtgaaattgttatccgctcacaattccacacaacatacgagccggaagcataaagtgtaaagcctggggtgcctaatgagtgagctaactcacattaattgcgttgcgctcactgcccgctttccagtcgggaaacctgtcgtgccagctgcattaatgaatcggccaacgcgcggggagaggcggtttgcgtattgggcgctcttccgcttcctcgctcactgactcgctgcgctcggtcggttcggctgcggcgagcgggtatcagcttcactcaaaggcgggtaatacggttatccacagaatcaggggataacgcaggaaaggacatgtgaagcaaaaggccagcaaaaggccaggaaccgtaaaaaggccgcgttgctggcgtttttccataggctccgccccccggctccagatttatcagcaataaaccagccagccggaagggccgagcgcagaagtggtcctgcaactttatccgcctccatccagtctattaattgttgccgggaagctagagtaagtagttcgccagttaatagtttgcgcaacgttgttgccattgctacaggcatcgtggtgtcacgctcgtcgtttggtatggcttcattcagctccggttcccaacgatcaaggcgagttacatgatcccccatgttgtgcaaaaaagcggttagctccttcggtcctccgatcgttgtcagaagtaagttggccgcagtgttatcactcatggttatggcagcactgcataattctcttactgtcatgccatccgtaagatgcttttctgtgactggtgagtactcaaccaagtcattctgagaatagtgtatgcggcgaccgagttgctcttgcccggcgtcaatacgggataataccgcgccacatagcagaactttaaaagtgctcatcattggaaaacgttcttcggggcgaaaactctcaaggatcttaccgctgttgagatccagttcgatgtaacccactcgtgcacccaactgatcttcagcatcttttactttcaccagcgtttgcataagtcggtgtatgtcagccgtgatggtgatggcagtgctgaccattgcatgcagatttcttaaaatgacagtgtctgttggccacatatgcagtctgaactttgctttgcagacatccacgacagcgatggcagttccagcagcagccaccagagcctcaagagcacagccaaatgggcggcatccctggagaatctgctggaagacccagaaggcgtgaaaagatttagggtttgtctttttcattgttaatcgggatggatgcagtgtgtgcagaagttcagatgcacacaggggagaaataggccagttcaacat

SEQ ID NO: 27926 - DNA, 1504 bp, Homo sapiens
  SIMILAR (501)..(1022): 391254mologous to Cloning vector pRSQ beta- lactamase,accession number U34887,Smith-Waterman Score=206.
  misc_feature (1)...(1504): n = a,t,c or g
gccacgttcgccggctttccccgtcaagctctaaatcgggggctccctttagggttccgatttagtgctttacggcacctcgaccccaaaaaacttgattagggtgatggttcacgtagtgggccatcgccctgatagacggtttttcgccctttgacgttggagtccacgttcttaatagtggactcttgttccaaactgggaacaacactcaaccctatctcggtctattcttttgatttataagggattttgccgatttcggcctattggttaaaaaatgagctgatttaacaaaaatttaacgcgaattttaacaaaatattaacgcttacaatttaggtggcacttttcggggaaatgtgcgcggaacccctatttgtttatttttctaaatacattcaaatatgtatccgctcatgagacaataaccctgataaaatgcttcaataatattgaaaaaaggaagagtatgagtattcaacatttccgtgtcgcccttattccctttttttgcggcatttttgccttcctgttttttgctcacccagaaacgctggtgaaagtaaaaagatgctgaagatcagttggggtgcacgagtgggttacatcgaactgggatctcaacagcggtaagatccttgagagtttttcgccccgaagaacggttttccaatgatgagcacttttaaagttctgctatgtggcgcggtattatcccgtattgacgcccggccaagagcaactcggtccgccgcatacactattctcaaaaatgacttggtggagtactcaccagtcacagaaaagcatctttacggatgggcatgacagtaagagaattattgcagtgctgccataaccatgagtgataacactgcgggccaacttacttctgacaaccgatcggaggaccgaaggagcttaacccgcttttttgcacaacatnggggggatcatgtaacttcgccttgatccgttgggaaccggagctgaatgaagccataccaaacgacgagcgttgacaccacgatgcctgtagcaatggcaacaacgttgcgcaaactattaactggcgaactacttactctagcttcccggcaacaattaatagactggatggaggcggataaagttgcaggaccacttctgcgctcggcccttccggctggctggtttattgctgataaatctggagccggtgagcgtgggtctcgcggtatcattgcagcactggggccagatgtggctgctgccagtggcgataagtcgtgtcttaccgggttggactcaagacgatagttaccggataaggcgcagcggtcgggctgaacgggggccgaacgaccgagcgcagcgagtcagtgagcgaggaagcggaagagcgctgacttccgcgtttccagactttacgaaacacggaaaccgaagaccattcatgttgttgctcaggtcgcagcgttttgcagcagcagtcgcttcacgttcgctcgcgtatcggtga

SEQ ID NO: 27927 - DNA, 2536 bp, Homo sapiens
  SIMILAR (929)..(1918): 1001254mologous to Plasmid F 100 pct identical to gp:ECOTNPA_3,accession number AP001918,Smith-Waterman Score=1722.
ggattataaaaacttcctctttaatcaaggcctttaacatgaacagatttcttgaataaaatggaaagtttccagtacactgaaacataaatccgcaagtcaccacacatacaacacccggcaggaaaaaacaaaaacagcaagtttacatgatccctgttaccagccatgttcctcaaattcggaggcttccctccatctgcccaagtgtgttctggatacagagcacatcgtggcttctggggtcacacctcaccttaggcctgtgggcccccacagagcacctccatctggcctgggcctatggtgggtggtgggctctaaccaaggaagccaaagcgtttcccagcaccattcaaaacagtgtaattgaaacatcttttaaaatatccaaaagtgaagaaaacaagaaggccaacataaataaatgttatccagaaagatgtttaggaagtaagggacaagctgtgtaaaggccttgaaggctgaaaaagtagcattgcccagctttcatttctttgggtttcttgggttagtgggcgcccggaacagcaagatgtgaggttctggttcatgggatcatataaatggacccatccctgactctgctgaacgccaagattcctccattcagattcagacatcagatgggttttaggggaccagcttggctatggtccttgggcagcatgacatgtcgatactcaaactcctcgtcatcgtatttgtccgaatacttttggacttcttggatcagcatcctttttcatttactcctctaattcagagatcactggaattttctgtaagctatgtttttacagaagttggtgaaggcgttacatttgaacgattcattgtccaatgtatgaatcttattaagatgattgtcaaaaattatgcttataagccatccaaaaattttgaagctaaaagaatgaaagtagcatttaagctagatattgagaaagatcaacgagtttgggatagatgcacagcggatgatcttaaagggaggaatggttttaagcgatgtttgcaatttaccctttaccggcccagggatttactatcattgttgaatgaagcttttttttccgcattcagagagaatagagaaactatcataaacactgacctagaatatgcagccaagtcaatttccatggccagacttgaagatctctggaaagagtatcagaagatctttccttcaatacaggttataactagtgcatttcgtagcattgaacctgaattaacagtttatacgtgcttaaaaaaaatagaagcatctttcgaattaatcgaagaaaatggagatcctaaaataacgtctgaaatacagttgttaaaggcaagtggaattctccaaagtttgtatagtgtaggatttgttggtattcgtgataaaaacacctcatcctattcattttgccatgacgggcgaactccagataaaggttttgaaagtaatgagaaattattaattcatccatgttactggcttggtttgaatctaaatcgtaatgcacttgctccagaggaagcagaggagataaatgacgaatatgatattaatattatttcagataattcagccattagaaataaaacaataggtcaaataactactcatctagatcagataccgataggaaatgaaggtgccactgaatttgaacaatggtgtttagacgcactaagaatagtatttgcatcccacctaacagacatcaagtcccatccaaatggtaacgcagttcagagacgagatattataggcaccaatggtggcaaatctgatttttggaaacgagtattggaggactataaaacaagacaagttgtttttgatgctaaaaattttgaagaattaggtccatctgagtatagacaattacaatcatatttaacagaaacgctggtgaaagtaaaagatgctgaagatcagttgggtgcacgagtggtttacatcgaactggatctcaacagcggtaagatccttgagagttttcgccccgaagaacgttttccaatgatgagcacttttaaagttctgctatgtggcgcggtattatcccgtattgacgccgggcaagagcaactcggtcgccgcatacactattctcagaatgacttggttgagtactcaccagtcacagaaaagcatcttacggatggcatgacactgaatgaagccataccaaacgacgagcgtgacaccacgatgcctgcagcaatggcaacaacgttgcgcaaactattaactggcgaactacttactctagcttcccggcaacaattaatagactggatggaggcggataaagttgcaggaccacttctgcgctcggcccttccggctggctggtttattgctgataaatctggagccggggggcggagcctatggaaaaacgccagcaacgcggcctttttacggttcctggccttttgctggccttttgctcacatgttctttcctgcgttatcccctgattctgtggataaccgtattaccgcctttgagtga

SEQ ID NO: 27928 - DNA, 634 bp, Homo sapiens
  SIMILAR (192)..(242): 881254mologous to Mus musculus WW domain binding protein 5; WBP5,accession number U92454,Smith-Waterman Score=100.
ctatccagagagcaaaatctcctcctttgccttgctctttgctgggtctctgacaacatggtcatcttcagcatgggtatttgtcagtaagaattggaaaacactgttgtctctggaccacaggacaactgatagagccttccataagtatttgaagatgtgacattttatgaggtgaccactctcttttcttgccaccttctcctccttctcctcctcctcctcctcctcctcctcctccttcttctttcttcttcttattttttgagatggagtctcactctttgctatagcatggggcacagtcattgcccatagtaagtgttgcttatggatagagggccatgcacagcaggcagcctggaaaacaagcccttgccaagcctgcatgtcaaagctcctcttagctcctcttgtgcagttgtaggcattggcctggctgggactttcacacttaaatttcatcccttcaaatgatccactctccacctgcctccctccacctgtggcaatccttttctccttgtctttcttccttgcaggctccttcttcagcccctctgtggttacagccatcactgtttggtcctttgataactacctttgccctgtgaactgtcttcttctgctgtat

SEQ ID NO: 27929 - DNA, 625 bp, Homo sapiens
  SIMILAR (173)..(316): 341254mologous to Homo sapiens Human secreted protein clone fm3_1 protein sequence SEQ ID NO:82,accession number Y53038,Smith- Waterman Score=68.
tcacggatgcaaagaacagacatccactaaaaccagctcaaacacccagaacatttgttggtttgtggtacaggaaagaatgagttctgtggcttcaggtacggctatatccaggagctcaacaaatatagccagagctatctctctgactcttacttgtacatcttggtgcatattgtcctcagtctgcagaccgttcttttgaacaactggggaaagtggcctgggcccctgcaggtcgaacctttgggtgccctccctgatctctctcctaactgtgctccccgccctgcccgactgcatccttcgccacagggccgtggtagcctgcatggctgtgtgctcgtgccgcaatgggctgagcacgtagatctgatgtgacaccatagcctgaagatgaacagcacctgacccttgctcccagggaggacaatgtgcagcgaggctgtgcaataaagtcgggagtgtggtgagctgtaaaggaagcccgcaggcctaggccacgggcccgagggcaggggcacgccatgcagaaggactctgacccggccccacagctggccagataagagagacgccttgagtcgaggggccggaggctctgaggctcccccctggtatggag

SEQ ID NO: 27930 - DNA, 518 bp, Homo sapiens
  SIMILAR (147)..(518): 831254mologous to Homo sapiens similar to P41-ARC; similar to Q92747 (PID:g3334339),accession number AC004922,Smith-Waterman Score=521.
tcctcagcttggattggcatcccaacaatgttttgctggcagcaggatcatgtgacttcaaatgcagagtgttttctgcttacattaaagaagtggatgaaaagccagccagcatgccctggggcaccaagatgccttttgggcagctgatgtcagagtttggtggcagtggcaccggtggctgggtccacgggaacagtgtcgtggctgctggccatgactgctacccaatgctctttaattatgatgaccgcggctgcctgaccttcgtctccaagttagacattccaaaacagagcatccaacgcaacatgtctgccatagaacacttccgcaacatggacaagagggccacgattgaggaccacaacatggccttggagaggctgcaccagaatagcatcactcacgtctctatttatgaggtagacaagcaaggttgtcgcaaattttgcactactggcattgatggagccatgacaatttgggatttcaagaccctcgagtcttccatccag

SEQ ID NO: 27931 - DNA, 3018 bp, Homo sapiens
  SIMILAR (1786)..(2445): 1001254mologous to Escherichia coli Pyruvate dehydrogenase (cytochrome) (EC 1.2.2.2),accession number D90724,Smith-Waterman Score=1164.
atgcacaacgtagcatggaatgccttgttctggtgtaaccacgatcagccgcgcattgtttctcgctttggtgatgaaggtgaataccgcgtgcctgcggcaaaaatgctggcgatggtgctgcatggcatgcagggaacgccgtatatctaccagggcgaagagattggcatgaccaacccgcatttcacgcgcattactgactatcgcgacgtagagagcctcaatatgtttgccgagctgcgcaacgatgggcgtgatgccgacgagttattggcaatcctcgccagtaaatcccgtgacaacagtcgcacgcccatgcaatggagcaacggcgataatgccgggtttacggctggcgaaccgtggattggcctgggcgataactatcaacaaatcaacgtagaagccgcgctggccgatgattcctcggtgttttacacctaccaaaagttaatcgcactgcgtaagcaggaagccatcctgacatggggcaattaccaggatctgctgccaaacagccctgtattgtggtgctatcgccgtgaatggaaggggcaaaccttgctggtcattgccaaccttagccccttacctgatgatttactgcaacgcctgcaagagcatttcaccgttcaccaggtggcaaacctcagcccacaaaccgtcgaacaaaatgcagcaatttttgccgaagctgaaggtttactgggttcaaacgagaatgtaaatgccgcattgctggaaaaaatgccgaaactgcgtgccacatcaacgatctccgtcggctatgacaattttgatgtcgatgcgcttaccgcccgaaaaattctgctgatgcacacgccaaccgtattaacagaaaccgtcgccgatacgctgatggcgctggtgttgtctaccgctcgtcgggttgtggaggtagcagaacgggtaaaagcaggcgaatggaccgcgagcataggcccggactggtacggcactgacgttcaccataaaacactgggcattgtcgggatgggacggatcggcatggcgctggcacaacgtgcgcactttggcttcaacatgcccatcctctataacgcgcgccgccaccataaagaagcagaagaacgcttcaacgcccgctactgcgatttggatactctgttacaagagtcagatttcgtttgcctgatcctgccgttaactgatgagacgcatcatctgtttggcgcagaacaattcgcggaccgagtcttggtctgtctccaggctggaacacgcgtgtgtcgttgtgcgctttttttgggtgaaaggagtaagaaaatggcgacaggaaagtcctgctctcgctggtttgcgcctcttgcggcgttattaatggtagttagcctgagtgggtgttttgataaagaaggcgatcagcgtaaagcgtttatcgacttcctgcagaatacagtgatgcgtagcggtgaacgtctaccaaccctgactgccgatcagaaaaaacagtttggtccttttgtctctgattacgcgattctgtatggttattctcagcaggtgaatcaggcgatggattccggtctgcgcccggttgtagacagcgttaacgcaattcgcgtaccgcaggattacgttacgcaaagcggtccgctgcgtgaaatgaacggttcgctgggtgtgctggcgcaacaactgcaaaatgcgaagttgcaggccgatgctgcgcactctgcgctaaaacagagcgatgatttgaaaccggtctttgatcaggcattcaccaaagtgtcttatcgcatgggcaccatcgagtggatgtccacccgccacgaagaagtggcggcctttgccgctggcgctgaagcacaacttagcggagaactggcggtctgcgccggatcgtgcggccccggcaacctgcacttaatcaacggcctgttcgattgccaccgcaatcacgttccggtactggcgattgccgctcatattccctccagcgaaattggcagcggctatttccaggaaacccacccacaagagctattccgcgaatgtagtcactattgcgagctggtttccagcccggagcagatcccacaagtactggcgattgccatgcgcaaagcggtgcttaaccgtggcgtttcggttgtcgtgttaccaggcgacgtggcgttaaaacctgcgccagaaggggcaaccatgcactggtatcatgcgccacaaccagtcgtgacgccggaagaagaagagttacgcaaactggcgcaactgctgcgttattccagcaatatcgccctgatgtgtggcagcggctgcgcgggggcgcataaagagttagttgagtttgccgggaaaattaaagcgcctattgttcatgccctgcgcggtaaagaacatgtcgaatacgataatccgtatgatgttggaatgaccgggttaatcggcttctcggatcgtacccagattgccctcagtgtcaataatcacgaagtgcacatctataagaagaatgggcgccagtgtgtgaaagctcacgaactcaaggagcacaatggacacatcacagatattgactgggctcccaagcatgaccacatcgtcacttgtggggcagaccacaatgcctatgtctggagtcagaaagatggtgtctggaagccaacactgatgatcctgagaattaatcgcacagctactttcgtgaagtggtccgcgcccatttatcgagtgacccaaaaggctgccagttttgagtgggatccagaacaggagaaggctctgcgacaggtccaggctgctgtgcaagctgctctgccacttgggccatatgatccagcagatctaatggtgcttgaggtgtcagtggcaggcagggatgctgtgagaagcctttggcaggcccccataggtgaatcacagcggaggcctctaggattttggagcaaggccctgccatcttcttcagataactactctcctttagagagacaagtgctgtttggagcctttggcaggctcccatag

SEQ ID NO: 27932 - DNA, 507 bp, Homo sapiens
  SIMILAR (2)..(274): 441254mologous to Spirulina platensis translation elongation factor EF-G (AA 1-697),accession number X15646,Smith-Waterman Score =180.
  misc_feature (1)...(507): n = a,t,c or g
ggatgacttatgtgcattggcatttaaagttctccatgacaagcagcgaggaccactggtttttatgcgcatttactcaggcactataaaaccccagttggccattcataatattaatggaaactgcacggagagaataagtcgtctgcttttgccgtttgctgaccaacatgtagaaatcccttcattgactgctggtaacattgctttgactgttgggcttaaacatactgccactggagacaccattgtctcatccaagtccagtgcattagctgcagctcgtagagccgaacgggagggagaaaagaagcacagacaaaacaatgaaggcagagagacttttattggctgggagtgggagattccaggaacctgttttcttctgtaccataggaacccccatcactgtctaaggcagccagatttgggaacatgcgtttgaaatgtctttcagcgtgaggatccccgttttgaaagtgagggttaggttccnggattttggga

SEQ ID NO: 27933 - DNA, 1187 bp, Homo sapiens
  SIMILAR (411)..(986): 881254mologous to Homo sapiens Sop2p-like protein,accession number Y08999,Smith-Waterman Score=913.
gaaacaactgaagcaaggaatgccttaattgaacaagttgcagatttggatgatgaatctgctgacttggttttagaagaattttgtgagaattttgatctgttaccagctgaaaagctacagactgcaatacatagagtgacactagctcagacagcagtgcctgtgctttgtggaagtgccctgaaaaacaaagggatacagcccttgttagatgctgttactatgtacttaccttcacctgaagagcgtaactatgaatttctgcagtggtataaggatgacttatgtgcattggcatttaaagttctccatgacaagcagcgaggaccactggtttttatgcgcatttactcaggcactataaaaccccagttggccattcataaatattaaatggaaactgcacggatcgtacccagattgccctcagtgtcaataatcacgaagtgcacatctataagaagaatgggcgccagtgtgtgaaagctcacgaactcaaggagcacaatggacacatcacagatattgactgggctcccaagcatgaccacatcgtcacttgtggggcagaccacaatgcctatgtctggagtcagaaagatggtgtctggaagccaacactgatgatcctgagaattaatcgcacagctacttttgtgaagtggtccgccctagagaacaaatttgctgtgggaagtgaagcacgactcatttcagtttgttactttgagtctgaaaatgactggtgggtgagcaagcacattaaaaagctgattcgctccacagtcctcagcttggattggcatcccaacaatgttttgctggcagcaggatcatgtgacttcaaacacagagtgttttcttcctacattaaagaagtggatgaaaagctggccagcatgccctgggacagcaagatgctttttgggcagctgatgtcagagtctggtggcggtggcactggtggctgggtccacgggttagacattccaaaacagagcatccaacgcaacatgtctgccatggaatgcttctgcaacacggacaagagggccacgactgagggctccaacatggctttgaagatgctgcgccagaatagcatcactcaagtctctatttatgaggtggatgagaaagattgtcgcaaatattgcactactggcatcgatggagagccatga

SEQ ID NO: 27934 - DNA, 1624 bp, Homo sapiens
  SIMILAR (813)..(1280): 461254mologous to Homo sapiens p41-Arc,accession number AF006084,Smith-Waterman Score=376.
cggacgcgtggggttcgcgtcgactgcccagagtccgcgaatcctccgctccgagcccgtccggactcccccgatcccagctttctctcctttgaaaacactaagaataatgtcactgcatcagtttttactagagccaatcacctgtcatgcctggaacagggatcgtactcgaccagtctgtcttgattactatagcttggtggtaagttttgaaatcaagaagtagattgccctcagtcccaataatcacgaagtgcacatctataagaagaacgggagccagtgggtgaaagctcatgaactcaaggagcacaacggacacatcacaggtattgactgggctcccaagagcgaccgcattgtcacttgtggggcagaccgcaatgcctatgtctggagtcagaaagatggtgtttggaagccaaccctggtgatcctgagaattaatcgcgcagctacttttgtgaagtggtcccccctagagaacaaatttgctgtgggaagtggagcacgactcatttctgtttgttactttgagtctgaaaatgactggtgggtgagcaagcacattaaaaagccgattcgctccacagtcctcagcttggattggcatcccaacaacgttttgctggcagcaggatcatgtgacttcaaatgcagagtgttttctgcctacattaaagaagtggatgaaaagaaagccagcacgccctggggcagcaagatgccttttgggcagctgatgtcagagtttggtgggcagtggcactggtgggctgggtccacggggtaagcttctctgccagtggggagccgcctgggctggggttcagccacggacagcaccgtgtctgtttgctggatgccttcaaaaagttttgcaggtctcgactctgaagacagagttcctgccgctcctaagtgtgtcatttgtctcagagaacagcgtcgtggctgctggccatgactgctgcccaatgctctttaactactatgaccgcggctgcctgaccttcgtctccaagttagatattccaaaacagagcatccaacgcaacatgtctgccatggaacgcttccgcaacatggacaagagagccacaactgaggaccgcaacacggccttggagacgctgcaccagaatagcatcactcaagtctctatttatgaggtggacaagcaagattgtcgcaaattttgcactactggcatcgatggagccatgacaatttgggatttcaagaccctcgagtcttccatccagggcctccggataatgtgaagctgagtgagcctccgccatccagcatgacaaacttgtggccgaccgcagctgtgccgtggcacgatggcgaggaagccagccccaaggaaacactgaaaacacatatcacgccaatgccgtgtggttttgtttgaatataaaattggtgaaagtgttggtttttttaaggcagtaatttttttgtttgtttttttgcgatttcattccattcttgaccaaagcttctctttaagtagtttattatggaaaattgtcacactaacttaaaagacagggtgagggagatatgtaaattgtccactagaaaattaaataaaagaactgaatgtggaaaa

SEQ ID NO: 27935 - DNA, 767 bp, Homo sapiens
  SIMILAR (625)..(578): 561254mologous to Homo sapiens RPB11b1beta protein,accession number AJ277740,Smith-Waterman Score=45.
gtgagcttatttaagcttttaatcacctggatgcaggcaggctgagcccaaaaagagagtcagcaaagggagataggggtggggccattttataagatttgggtaggtaaaggaaaattacagtcaaagggggattgttccctggcgggcaggagtgggggtcacaaggtgctcagtgggggtgattttgagccagaatgagccaggaaaaggactttcacaaggtaatgtcatcacttaaggcaaggaccggccattttcacttcttttgcggtggaatgtcatcagttaaggcaaggaccggccattttcacttcttttgcggtggaatgtcatcagttaaggcaaggaccagccattgacacttcctttgtggtggaatgtcatcagttaaggcggggcaggacattttcacttcttttgtgattcttcagttacttcaggccatctgggcatatacctcgcgtcaggtgctcccctagaattcctggctgcagggagtcctgtgggaagacggagaacaccaccgcaggctttccacacaggagtctggatttgtctgtgaaattcaggagctcattttggcaggctgtataggaagcgtggtgctggcatctgcttctggtgaggttctcagggagcttacaatccaggcagaaggtgaaggggaagcaggcacatcagtggcaagagagggagcaaggtggaggaagtgctgcactcttttaaacaatcagatctcgcatgaactgaaaactcagtcttca

SEQ ID NO: 27936 - DNA, 918 bp, Homo sapiens
  SIMILAR (322)..(540): 371254mologous to Homo sapiens Gag protein,accession number AF164612,Smith-Waterman Score=130.
atggcagggaccaacacggagctcctgaatttcacagacaaatccagacccctgtgtggaaagcctgcggtggtgttctccgtcttcccacaggactccctgcagccaggaattctaggggagcacctgacgcgagtggttgactcaaagcctttgtcaattaaatctgtactaactaaatacaagcattgccagcttggaggagctgcaaaactctcttcggctgctggtgccggccgccccctggcctgctctttcactgagtatcagtgtctgagtacctgtctcatccgtcatgcagctgaggctcaattaagggacctaatgcaaactgttgtatcccaaaacccatggttccctgaagaaggcatgctagacgtaaagctctggaacaagtggggagaaatcttaaacattgcatgcaagggcaaggtcccagtatcatctttaatgctatgggccttagttagggcagccctggctccattatacacagaagagcctaaaaaggagaaggaggaagaaccatcacctgctttaccacctcctcttccctcagccccgatatcaccaggccaaaataaaaaaggggaaacggaggttttgcctaagccccctcctccagtagataggaaaaaggacaggggatatgctacagcgaagagaccctgtcttaagcaagcagcattaaaaggggagctctttgcctgcccagtaatgcaagatcaacaaggcaatcagatgtataaacccatttcttttaacgcttatttaaaaatacgaaaaaacattaaagaccagagctgcgcgaccatgcgagcggtgggcagaaggaaaggctcagcagcagggaggcttgcagacctggagccaacagatgctcccaggaactcgacctgcatagtagcaacgcaatga

SEQ ID NO: 27937 - DNA, 642 bp, Homo sapiens
  SIMILAR (23)..(94): 451254mologous to Perameles gunnii protamine P1,accession number L35305,Smith-Waterman Score=45.
tcaggcagaaggaagttggatgagcttgcggaacacccggggggccagtcggccccgctcccgcatccatcgcggaggcgcggcccctttaaggctcccggaaacggtcccacaggaccggaagtgaccctctttatttcccttcctcacgtggtgcaggcaggaagtgacgcgcctggcccgggagctgcggtcgcagagtgccgacggagccggagtcgcggacgccgcggggtctccgggacaggtgaccttcatcagggggtggccaggaggggcccagactgtgaatcctgtgctctgcccgtgaccgccccccgccccatcaatcccattgcataggtttagagagagcacgtgtgaccactggcattcatttggggggtgggagattttggctgaagccgccccagccttagtccccagggccaagcgctggggggaagacggggatttagggatgggtctcaatctcggaagagggaggagtctgggagtggggccggctggcccagcctgtaagatactgtatatgcgctgctgtagataccggaatgaattttctgtacatgtttggttaattttttttgtacatgatttttgtatgtttccttttcaataaaatcagattggaacagtgaa

SEQ ID NO: 27938 - DNA, 426 bp, Homo sapiens
  SIMILAR (246)..(94): 401254mologous to Mus musculus transposase-like protein,accession number AF205599,Smith-Waterman Score=105.
tcaagttgccatagctgcgagtctggggagagcacagtcggttgagtcgctgcgtttggtcagttgcaccttctgggtcactggtagccgcgggagccgggtggggcccagcatttctccatggatgacacagtgcatagactcatattcagaagcaccctctttgacttgagtagtgaaaccagcaagccgttcagtcatggcagctgcttcgtctgtgcacataccaacacaaaatgaccaatgtggttttccaatagtaaaggacttcttagctttagcaatgtggttagccactgagaatgatgctcgcagtacagatgcatttgatgaagtggtggccttcaataattgcttctgttctttgtgttcatgtttttttcttttgaaaaactccagaggcttgtcttttaatgcagtgtgcat

SEQ ID NO: 27939 - DNA, 1207 bp, Homo sapiens
  SIMILAR (337)..(89): 301254mologous to Homo sapiens Human secreted protein, SEQ ID NO: 5996,accession number G01915,Smith-Waterman Score=72.
ttttccaaggaagcatttttattcactttctaactggagtttgcctcctacaaaggaggctggtcctttaacaaaaaaaaaaaatagagcagggcgagagggcgcggccaagggatcaggcttttatccgggaaagttacccgaaggccagctatatggcatcctgggatttgcagttccttttcgggactctctcccttggtaattccttgatcatgaggccgagatggactacaactcccagagggccaagcggcggcagcggggtcctgtactctcgctgtggctgggcggctagttcaagttgccatagctgcgagtctggggagagcacagtcggttgagtcgctgcgtttggtcagttgcaccttctgggtcactggtagccgcgggagccgggtggggcctaggcgatgatccggcattaaggagctgggatcatcctccgtctcagggggtttggggaaagggtaggggcatccaacgatcatcggcttgactaggccctttgccctgaacctcatgaagaaatgataggaggcagacatatgcgcctaaaaagagcgctgagctcagagaggagcatctcggagttctgggggtgtgctttgatttgtgtacatcaatggcagaatcatgcagcgaatcagatcacttacgctgtcgtgaccgattgagtccatgggctggcagatcaacgcacaggggaactcgtagtcttcctacagtagaagttaccgagaaggtcaacactataacaagtactttacaggataccagtcggaacctgcgacaagtggaccagatgcttggacgataccgagaatacagtaatggacaggcgggtgcgatagaacatgactatggggatccacagggtattaaacgaatgagatcaagaactggtgtccggtttgttcaagagactgatgatatgactcagcttcatggttttcatcagtctcttcgagacctcagcagtgaacaaattcgccttggagatgatttcaacagggagctttccagaaggagccggtcagatgccgaaacaaaaagggctttggaagaattgactgaaaaacttaatgaagcccagaaacaagaagtgttttttgtgaagagccttggaaaggtgaagatacaatgcctgtcttctgctgaagtagacaacgtctttccaattaatgtgtggcaatgtggtatctaa

SEQ ID NO: 27940 - DNA, 490 bp, Homo sapiens
  SIMILAR (190)..(113): 381254mologous to Homo sapiens dJ612B18.2 (dynamin 2),accession number AL031864,Smith-Waterman Score=62.
actggaggacatcagacagcggtatgaacaacaggtgctggagaagtgttttgaagtgttaaatgggaagataaccacaggagatagcgcctgcttccagccttgcttcatctatcagcttgctaatcacagctgtgtttccagccttctgctctccctgtatcatgagcttcgggagcttcagcaggcagtagtcctggctgttgatggttggctggagaggaaaaggaataaagaagcagtgtatgctggcaggccctggtaccatctctaacagcggttatcacagcaacattaaacttttaaataaggagaacttccatgcgtaaactgaactgttgattgacagatttcatggatgtagcaaacatctaatctgggagccacatggccatccccaaatgacacattctatttctgttcttgacacactgcctgctttttacaatttttttgtgcctatttctattaaagtgttcagaaagtaaaa

SEQ ID NO: 27941 - DNA, 543 bp, Homo sapiens
  SIMILAR (69)..(488): 271254mologous to Sus scrofa involucrin,accession number M34441,Smith-Waterman Score=149.
agcaggcagatgccgctctggaagagtttaagcggtaggtggaactgaactcagagaaagtctatgctgaaatgaaagagcagatggaaaaagtggaggcagatctaactagatccaaatctcttcgtgagaaacaatcaaaggagtttttatggcaactggaggacatcagacagcggtatgaacaacagatagtagagctgaagctggagcatgaacaggagaagacgcacctattacagcagcataacgcagagaaggatagcctagtccgagaccatgaacgggaaattgaaaacctggaaaaacagcttcgcgctgccaatatggagcacgaaaatcaaattcaggagttcaagaaacgagatgcacaggttattgccgacatggaggcccaggttcacaagttgagagaagaattgatcaatgtgaactcacagcggaaacagcagctggtagagcttggtcttcttcgtgaagaggaaaagcaaagggctacaagggaacatgagattgtcgtcaataaactgaaggctgaatcag

SEQ ID NO: 27942 - DNA, 792 bp, Homo sapiens
  SIMILAR (523)..(762): 261254mologous to Leishmania major putative glycoprotein,accession number AF110372,Smith-Waterman Score=78.
atggtaccagttactccagaggttgagccatgtgatgcacctgttccccctttgccttctgccatgattatggaaaaagtggaggcagatctaactagatccaaatctcttcgtgagaaacaatcaaaggagtttttatggcaactggaggacatcagacagcggtatgaacaacaggtgctggagaagtgttttgaagtgttaaatgggaagataaccacaggagatagcgcctgcttccagccttgcttcatctatcagcttgctaatcacagctgtgtttccagccttctgctctccctgtatcatgagcttcgggagcttcagcaggcagtagtcctggctgttgatggttggctggagaggaaaaggaataaagaagcagtgtatgctggcaggccctgccagagaatatggagaaccactctccctactttctctagctataacccgtttttacaccagggctatgtagaatataaagtttgtaatttgattaccttcaagattattttgatagtagagctgaagctggagcatgaacaggagaagacgcacctattacagcagcataacgcagagaaggatagcctagtccgagaccatgaacgggaaattgaaaacctggaaaaacagcttcgcgctgccaatatggagcacgaaaatcaaattcaggagttcaagaaacgagatgcacagccacccagctgcggtttgaataaattgatgtggaaccaaaggcgggactttaaagggaaaaggtttgatggacttggactccgaaccagatga

SEQ ID NO: 27943 - DNA, 912 bp, Homo sapiens
  SIMILAR (440)..(910): 1001254mologous to Escherichia coli Potassium-transporting ATPase (EC 3.6.1.36), c chain (ATP phosphohydrolase (potassium- transporting), C chain),accession number D90708,Smith-Waterman Score=803.
cgctaccccggtctcgcgtccgcccgtaaactccggccgtgtacgcgtcttctccagggatctccacagctcccgctggcccctgcacactatgctagagctcctcggacccctgctcctctcggctcgtcccaattctcaagtctcctccactctgtccgcgtctcatctctccggtccccactcaactagccatctcctgtccgcccttcatctctactcctcaccctcctctccacactcctcccgccctctcctctcgcgctcgtctacttctcctcgtctcctttccgctctcggctccacccctttacacctcttcgcccattctgctccgtccttcatgcatttacggtctgggtgggctactggtcccgtttatcggtatcaaagtcattgatttactgctgaccgtttgcggtctggtgtgaggtttaccatgagtggattacgtccggcattatcaacatttatctttctgttattgattactggcggcgtttacccgctgctgaccaccgtactggggcaatggtggtttccctggcaggccaatggttcgttgattcgtgaaggtgatacggtgcgcggttcggcattaatcgggcagaattttaccggcaacggctattttcatggtcgcccgtcggcaacggcagaaatgccctataatccacaggcttctggcgggagcaatctggcggtcagtaaccctgagctggataaactaatagccgcacgcgttgctgcattacgggccgctaacccggatgccagcgcgagcgttccggttgaactggtgacggcatcggcaagcgggctggacaataatatcaccccgcaagcggcggcctggcaaatcccacgcgtggcgaaagcgcgtaatctcagcgttgaacagctcacgcaact

SEQ ID NO: 27944 - DNA, 717 bp, Homo sapiens
  SIMILAR (514)..(717): 971254mologous to Escherichia coli ferric enterobactin transport ATP-binding protein,accession number U82598,Smith- Waterman Score=334.
tctgcgcttaacacctgtttatggcgaatcaacttccggggggcgtcgttaccgtcagcctcgcgggtatttcccttatcgtcttgttacttcaggagtctcgcaaaaaatgaccgaatcagtagcccgtttgcgcggcgaaccagttaaccctgggatatggcaaatataccgttgcggaaaatctgactgtagaaatacctgatggtcacttcacggcaattatcgggccaaatggctgcggtaaatccacgttactgcgtaccttaagccgcctgatgacgcttgctcatgggcatgtctggctggatggcgagcacattcaacattacgccagtaaagaggttgcacgccggattggtctgttggcgcaaaatgctaccacgccgggcgatatcaccgtgcaggagctggtggcgcgtggacgttatccgcatcaaccgctgtttacccgctggcgcaaagaggatgaagaagcggtatcgaaagcaatgcaggccacgggaataactctatgtggcagatcaaagcgtggataccctttctggcggacaacgccagcgagcgtggatcgcgatggtgctggcccaggaaacggcaattatgctgctcgacgaacccacgacctggctggatatcagtcatcagattgatttgctggagttgttaagcgaactgaaccgcgaaaaaggatataccctggcggcggtgctgcac

SEQ ID NO: 27945 - DNA, 876 bp, Homo sapiens
  SIMILAR (873)..(610): 901254mologous to Rattus norvegicus ribosomal protein L21,accession number M27905,Smith-Waterman Score=424.
  misc_feature (1)...(876): n = a,t,c or g
tttttggaaattaaattgaatttttaaatttttttagcccaaaagggggttttcccaaaatggttttttccaattttggggccaggggggtttttcccctggtttgggtcccccgggattttttttaccagggttttaaattttccccttaaaaaattttttacccttttggttaaaaaaattccttgggnnnnnnnnnnnnnnnnnnnnnnnnnnnnnnnnncagctgttgtaaaagaggctgagttcttgatttgattctcagcttggttactgttgagtgtacagcagtgctactgatttgtgtacattgattttgtatcctgagacttcactgaattcatttatcagatctaggagctttccagaggagtctttaagggtttctttgacaaagacagctacattccctatgctgatggtatcgccttcgttcagccaacgatctggcgtcagcggcggaactggcgcaacattacggcgtgccggttttcggcccggaaaaagaagatgagttctggctgcaaggcttgcctgcgcaaagtcgtatgtttggtctggaaagttgagttgaagtgaacttagaaaattcaatgcctttgtctttggcttctttttctgattattttccttcacgcgtttcaggaaactatcttggctcttagagtgcttaatgtgttcaataagcgcattaattctcttggcaagaatcttgcctttaacttgtttgtttacaataaggccaacagcatgccaggtaacattgtagactcttccagttttgccatgataacacttgtggggcattcctttttgagcagtacccattcccttgatgtctacaatatcacctttcttatagatttgcatatacat

SEQ ID NO: 27946 - DNA, 1467 bp, Homo sapiens; identical to SEQ ID NO: 24758
  SIMILAR (1093)..(1464): 1001254mologous to Escherichia coli Potassium-transporting ATPase (EC 3.6.1.36), c chain (ATP phosphohydrolase (potassium- transporting), C chain),accession number D90708,Smith-Waterman Score=609.

SEQ ID NO: 27947 - DNA, 873 bp, Homo sapiens
  SIMILAR (411)..(530): 971254mologous to Homo sapiens 17beta-hydroxysteroid dehydrogenase,accession number X87176,Smith-Waterman Score=190.
ctcgttttgcaaaaccagtatatccaggacaaactctacaaactgagatgtggaaggaaggaaacagaattcattttcaaaccaagggtccaagaaactgaggacatggtcatttcaaatgcatatgtggatcttgcaccaacatctggtacttcagctaagacaccctctgagggcgggaagcttcagagtacctttgtatttgaggaaataggacgccgcctaaaggatattgggcctgaggtggtgaagaaagtaaatgctgtatttgagtggcatataaccaaaggcggaaatattggggctaagtggactattgacctgaaaagtggttctggaaaagtgtaccaaggccctgcaaaaggtgctgctgatacaacaatcatactttcagatgaagattttcatgggaggtggtccggggcaagcttgaccctcagaaggcattctttagtggcaggctgaaggccagagggaacatcatgctgagccagaaacttcagatgattcttaaagactacgccaagctctgaagggcacactacactattaataaaaatggaatcattaaatactctcttcacccaaatatgcttgattattctgcaaaagtgattagaactaagatgcaggggaaattgcttaacattttcagatatcagataactgcagattttcattttctactaatttttcatgtatcattatttttacaaggaactatatataagctagcacataattatccttctgttcttagatctgtatcttcataataaaaaaattttgcccaagtcctgtttccttagaatttgtgatagcattgataagttgaaaggaaaattaaatcaataaaggcctttgataccttta

SEQ ID NO: 27948 - DNA, 439 bp, Homo sapiens; identical to SEQ ID NO: 18593
  SIMILAR (293)..(436): 771254mologous to Homo sapiens neutral protease large subunit,accession number M27826,Smith-Waterman Score=186.
  misc_feature (1)...(439): n = a,t,c or g

SEQ ID NO: 27949 - DNA, 462 bp, Homo sapiens
  SIMILAR (110)..(244): 911254mologous to Homo sapiens calbindin D28K,accession number S46006,Smith-Waterman Score=231.
cctacctgcacccaggtgaaataaacagctttattgctcacacaaagcctgtttggtggtctcttcacacggacgcgcatgaaatttggtgccatgactcggatcgggggacctcccttgggagatcaatcccctgtcctcctgctctttgctctgtgagaaacatccgcctacgacctcaggtcctcagaccgaccagcccaagaaacatctcaccaatttcaaatccggagcttgctacatgtgccggaaatctggccactgggcagaggaatgcccgcagcctgggattcctcctaagccgcgtcccatctgtgtgggaccccactgaaaatcggactgttcaactcacctggcagccactcccagagcccctggaactccggcccaaggctctctgactgactccttcccagatcttctcggcttagcggctgaagactgacactgcccgatcgcctc

SEQ ID NO: 27950 - DNA, 460 bp, Homo sapiens
  SIMILAR (227)..(322): 811254mologous to Homo sapiens HHLA3 protein,accession number AF126163,Smith-Waterman Score=140.
  misc_feature (1)...(460): n = a,t,c or g
ctcagcccacctgcacccaggaccccactgaaaatcggactgttcaactcacctggcagccactcccagagcccctggaactctggcccaaggctctctgactgactccttcccagatcttctcggcttagcggctgaagactgatactgcccgatcgcctcagaagccccctagaccatcacggatgccgagcttcaggtaactctcacaatggaaggcaggaacgtcaggcctctgagcccaagccaagccatcgcatcccctgtgacttgcacatatacacccagatggcctgaagtaactgaagaatcacaaaagaagtgaaaaggccctgccccgccttaactgatgacattccaccattgtgatttgttcctgccccaccttaactgagtgattaaccctgtgaatttccttctcctggctcagaagctnccccactgcaccttgtgacccccg

SEQ ID NO: 27951 - DNA, 381 bp, Homo sapiens; identical to SEQ ID NO: 5723
  SIMILAR (295)..(236): 501254mologous to Homo sapiens Human secreted protein, SEQ ID NO: 5576,accession number G01495,Smith-Waterman Score=64.

SEQ ID NO: 27952 - DNA, 751 bp, Homo sapiens; identical to SEQ ID NO: 10177
  SIMILAR (133)..(297): 941254mologous to Homo sapiens Human secreted protein, SEQ ID NO: 5210,accession number G01129,Smith-Waterman Score=278.

SEQ ID NO: 27953 - DNA, 453 bp, Homo sapiens; identical to SEQ ID NO: 440
  SIMILAR (152)..(238): 601254mologous to Homo sapiens Human secreted protein, SEQ ID NO: 5576,accession number G01495,Smith-Waterman Score=70.
  misc_feature (1)...(453): n = a,t,c or g

SEQ ID NO: 27954 - DNA, 487 bp, Homo sapiens; identical to SEQ ID NO: 1994
  SIMILAR (168)..(299): 551254mologous to Homo sapiens calbindin D28K,accession number S46006,Smith-Waterman Score=116.

SEQ ID NO: 27955 - DNA, 357 bp, Homo sapiens; identical to SEQ ID NO: 443
  SIMILAR (148)..(279): 481254mologous to Human T-cell lymphotropic virus type 1 Gag,accession number S74562,Smith-Waterman Score=143.

SEQ ID NO: 27956 - DNA, 705 bp, Homo sapiens; identical to SEQ ID NO: 22785
  SIMILAR (292)..(627): 381254mologous to Human T-cell lymphotropic virus type 1 Gag,accession number S74562,Smith-Waterman Score=186.

SEQ ID NO: 27957 - DNA, 462 bp, Homo sapiens; identical to SEQ ID NO: 23458
  SIMILAR (462)..(382): 811254mologous to Homo sapiens Human secreted protein, SEQ ID NO: 5576,accession number G01495,Smith-Waterman Score=99.

SEQ ID NO: 27958 - DNA, 1773 bp, Homo sapiens
  SIMILAR (348)..(4): 1001254mologous to Plasmid F Protein D,accession number M12987,Smith-Waterman Score=584.
tcaggataattgtttcagcatcgcaaccgcatcagactccggcatcgcaaactgcacccggtgccgggcagccacatccagcgcaaaaaccttcgtgtagacttccgttgaactgatggacttatgtcccatcaggctttgcagaactttcagcggtataccggcatacagcatgtgcatcgcataggaatggcggaacgtatgtggtgtgaccggaacagagaacgtcacaccgtcagcagcagcggcggcaaccgcctccccaatccaggtcctgaccgttctgtccgtcacttcccagatccgcgctttctctgtccttcctgtgcgacggttacgccgctccatgagcttatcgcgaataaatacctgtgacggaagatcacttcgcagaataaataaatcctggtgtccctgttgataccgggaagccctgggccaacttttggcgaaaatgagacgttgatcggcacgtaagaggttccaactttcaccataatgaaataagatcactctactcaagccagcatcttctgctatcagtgccctggcagccactcccagagcccctggaactctggcccaaggctctctgactgactccttcccagattttctcagcttagcagctgaagactgacgctgccggatcgcctcggaagcccctagatctgatgatttaataagagggtatttttccttttgctcagcacgtctcctttctgctgccatgcgtagagggatgtgtttgctttcccttctgtcattactgtaagtttcctgaggcttctccaaccagatataacgatttttatcttcacaggattcatctaaagcatttccatttggattatacgctatgcagttctttgtattaaaagtttcaaatgatggaaatctgccatgagaaattatgttccaagagcgaagtagagaaggcacgatgtgtactttttcagaaagaacagcgttgaattgttgaagctgagcgggccctccacactgggtggcattggtggttttgttggtatgcagaacctccattctccatgcttttttgctgcattctgtgcagctgagctctgacaactgtatcacacagtcttcctcaccctctggcttctgtctgttttcaaccattggaaagcattggtaggagaagagaagctctacctttggaatatcaaatatctggcctagtgtcttttcaatgacaaaaacaagagtaagattatccacttcaataagcaaaaagcagtaatttaatttgatgtgatttttaagaaaatctttgtttcctctgaggaactggtatgttgtctctccagaattcaggagaaatgtgtaattgaccagaccagaggtccccaagccccaggccacagaccggtactgtggcctgttaggaaccctgtagctgccagtggggtggttgccctccacttgcaagggcaaagggccagtgtgacagcctccacctgcacttagtgggtcccaagcttttgtccagcgtccaagaagaatgaggtcacacttgacaactgaagaatggtaagagtggagaattttattgagcgatgaaaacagttctagagtctccactggagcactgcctagtcgagctctgagaagagggccaccattctccaaaccccagaatggtgatccattgacagtttgcaacatgtgcttgggaaagctgcagccactaagcacagccaggagtggggctgtaccctgcaaagccacaggggcagagattcccaaggccat

SEQ ID NO: 27959 - DNA, 366 bp, Homo sapiens; identical to SEQ ID NO: 10185
  SIMILAR (103)..(216): 811254mologous to Homo sapiens Human secreted protein, SEQ ID NO: 5576,accession number G01495,Smith-Waterman Score=150.

SEQ ID NO: 27960 - DNA, 632 bp, Homo sapiens
  SIMILAR (397)..(528): 511254mologous to Human T-cell lymphotropic virus type 1 Gag,accession number S74562,Smith-Waterman Score=154.
atgagaacacatggacccaaggacgggaacatcacacatcagggcctgttggaggacacatgtgacatttggtgccaaagacccgggacaggaggactccttcaggagactggccccctgtccttgccctcattctgtgaggagatccacctacaacatcaggtcctcagaccaagcagcccaaggaatatctcaccaatttcaaatctggctgctccttgcaaggccacagcaagtccctcagcctctgctcccccaccctataatccttctatcacttccactcctcacacccggtctggcttacagtttcgttccgcgactagccctcccccacctgcccgacaatttcctcttaaagaggaggctggagctaaaagcacagtcaagggatcttgcttcaagtgccagaaatctggccactgggccaaggaatgcctgcatcccgggattcctcctaagccgtgtcccatctgtgtggaaccccactggaaatcggatggtccaacttgcctggcagccactcccagagcccctggaattctggcccaaggctctctgactgactcctttccagatcttcttggcttagtggctgaagactgatgctgcccgatcgcctcggaagcccc

SEQ ID NO: 27961 - DNA, 733 bp, Homo sapiens
  SIMILAR (247)..(402): 781254mologous to Homo sapiens Human secreted protein, SEQ ID NO: 5210,accession number G01129,Smith-Waterman Score=216.
atggtctccactctgctaaagatcaattctgagaaggaagagttcacaatgtaccctaagataattcataaactgaagatggaagaagaactgtctgagtccccccaggatgtcataacaaaggtgatggaagccctagatgcagcaggcagcctgctctgtgggagagactcagcccccctgcacccaggtgaaataaacagctttattgctcacacaaagcctgtttggtggtctcttcacacggactcacatgaaatttggtgccgtgactcggatcgggggacctcccttgggggatcaatcccctgtcctcctgctctttgctccgtgaaaaagatccacttacgatctcagggcctcagacccaccagcccaaggaacatctcaccaattttaaatcaggaccccactgaaaatcggactgttcaactgcacctggcagccactcccagagcccctggaactctggcccaaggcgctctgactgactccttcccagatcttctcagcttagcagctgaagactgacactgcccgatcacctcggaagcctgtttaagttgcgtttccgagttgacgtgcacatcacagatttcacagtgaaatgttttattttggaggcctgtgtttcctttattaacaggtcctttgcctttcactcctgccctaggaaaggctttgatagtgccacttccattccgggcttctaacatggttttgtgcttagtac

SEQ ID NO: 27962 - DNA, 1593 bp, Homo sapiens; identical to SEQ ID NO: 10188
  SIMILAR (1452)..(751): 851254mologous to Mus musculus protocadherin,accession number AF281899,Smith-Waterman Score=1033.

SEQ ID NO: 27963 - DNA, 642 bp, Homo sapiens
  SIMILAR (93)..(149): 781254mologous to Human endogenous retrovirus tripartite fusion transcript PLA2L,accession number Z14310,Smith-Waterman Score=83.
ttcggactcagcccaccatgcacccaggtgaaataaacagctttactgctctcacacaaagcctgtttggtggtctcttcacacggacgcgcatgaaatttggtgctgtgactcggattgggggacctcccattgggagatcaatcccctgtcctcctgttctttgctccatgagaaagatccacctacgacctcaggtcctcagaccgaccagcccaagaaacgtctcaccaatttcaaatccgccactcccagagcccctggaactctggcccaaggctctctgactgactccttcccagatcttctcggcttagcggctgaagactgacaccggccgatcgcctcggttgaagccccctagaccatcacggatgccgagcttcgggtaactctcacagtggaaggttcccacggcgcccctaatcccgctygaagcagccctgagaaacatcgcccattctctctccatatcaccccccaaaaatttttgccaccccaacacttcaacactattttgttttatttttcttattaatataagacggcaggaatgtcaggcctctgagcccaagccaagccatcgcatcccctgtgacttgcacgtatatgcccagatggcctgaagtaactgaagaatca

SEQ ID NO: 27964 - DNA, 582 bp, Homo sapiens
  SIMILAR (373)..(504): 531254mologous to Human T-cell lymphotropic virus type 1 Gag,accession number S74562,Smith-Waterman Score=158.
atggctggaaagatcaaggctaggcatctgcatctgactgctcctcttcaggtcgctccccgccaagctaaatcaggctccgattcttccttggcctctgctcctccaccctataatccttctatcacctcccctgtgcacacctggttcagcttacagtttcattctgagactagccctcccccacctgcccaacaatttcctcttagagcggtggctggaactgaaggcatagtcaggatgaatgggaaagagtttttgctgcagcccaatctcacgctgataactgcctgcttcaagagccatccctccaggaaggcattagagcagttctctatagatcccaatgactataggcagttcccaggatcttgctttaagtgccagaaatctggccactgggccaaggaatgcctgcagcccaggattcctcctaagctgtgccccatctgtgtgggacttcactggaaatcggactgtccaactcaccaggcagccactcccagagcccctggaactctggcccaaggctctctgactgactccttcccagatcttcttggcttagtgactgaagactga

SEQ ID NO: 27965 - DNA, 436 bp, Homo sapiens
  SIMILAR (325)..(254): 831254mologous to Homo sapiens Human secreted protein, SEQ ID NO: 5576,accession number G01495,Smith-Waterman Score=90.
ccaggagtaagaggagcccagggtggtccctctatccccaggcagtgtgaagagtctgctattggtcctaaatttgcttggatcatctcttcctttcactggaagcaaggcatgttcaacatggaggctccttcttcccttttctttgtcaacatgtgtgcagtaaagaagcagacaacctggggccggccagacagaggattcatctggcagccactcccagaggccctggaactctggcccaaggctctctgactgactccttcccagatcttctcggcttagcggctgaagactgacactgcccgatcgcctcggaagcccccagaccatcacggacgccgagcttcgggtaactctcacagtggaaggttcccacgccgaccctaatcccgcttgaagcagccctgagaaacatcgcccattctctgtccat

SEQ ID NO: 27966 - DNA, 909 bp, Homo sapiens
  SIMILAR (846)..(778): 821254mologous to Homo sapiens Human secreted protein, SEQ ID NO: 5576,accession number G01495,Smith-Waterman Score=85.
tcaggatctaaaggtgcctgcattatagatggcggcacccacagggcagatgtggacagcaaccatgccacaccatgaggcagaagcatcagcaggtgcagcaggagctgctgcagggcactcaagcaggttccagacaactggcccagtgaccctttgctgtgtgccacctagggacttggtgccctgtgtcccagctgctccagccacagctaaaggaccaaggtatagcttgggttgtggcctcacggggtgcaagccccaagccttggcagcttctgtgtggtgttgagctttgtgtttattagtcattttatattgtttcttgttccttttccttatgtttgaggggctgatcaagttactatttttcctgccgcagcgttcctcacatggggcaccaactgtggtagcactcctctcacaggagcaccagctgtgggggtgtctgtcccttgcagacccttgacctggtgatggatgaataatgtacactgacacacagatattctgttttgccagtccagctgagagtgtctgtccacgctgcttacagactccttgctgagtgttgtaaacagttgctaccacggccccaatcagttgacctctgtaactcttggtcccagaatttaagatgctcagagtccttatgtcctcagtgatgggtggcagaggaaatggtaatggtttttcttggtcctcggcttgggtgcactgattacccctggcagccactcccagagcccctggaactctggcccaaggctctctgtctgactccttcccagatcttctcggcttagcggctgaagactgacactgcccgatcgccttggaagcccccttcttaccacattttagacttctcctttggttatctcttataccatcttttctggacctcat

SEQ ID NO: 27967 - DNA, 783 bp, Homo sapiens
  SIMILAR (91)..(327): 961254mologous to Escherichia coli RecC1004,accession number AF176618,Smith-Waterman Score=406.
atggaattttgtatttcattaggccggaaaataactttttcaaacatttttccctacaacggggccaattggaaggttttcttaaaaaagtcccaaccattattgaatgcactggttgagcaggatgatgccgaacgcttgttccgccgcttccgagcggcaggggatttaccgtatggcgcttttggtgaaattttctgggaaacacagtgccaggagatgcagcagcttgccgacagagtcattgcctgtcgccagccggggcagagtatggaaattgatctcgcctgcaacggtgtgcagataactggctggttgccgcagctttgggatgctgaagggatcagcttcagtgtcttcagctttgggatgctgaagggatcagcttcagtgtcttcagctttgggatgctggagcttgctacacatgctggaaatctgccactgggccaaggaatgcccacagcacggtattcctcctaagccacgtcccatctgtgtgggaccccaccgaaaatcggactgttcatctcacctggcagccactcccagagcccctggaactctggcccaaggctctctgactgaatccttcccagatcttctcggcttagcagctgaagactgacactgcccgatcgcctcagaagcctcttagtctgggtagacactttcactagatgggtagaggcctttcctacagggtctgacaaggccaccacggtcatttcttcccttctgtcagacataattccttggtttggccttcccacctctatacagt

SEQ ID NO: 27968 - DNA, 817 bp, Homo sapiens
  SIMILAR (616)..(539): 731254mologous to Homo sapiens Human secreted protein, SEQ ID NO: 5576,accession number G01495,Smith-Waterman Score=91.
tcagcttgcagggaggtgtggagggagaggtgccagcaggaaccagggctgtgcgccgcgcttgcgggccagctggagttccgggtaggcgtgggcttggcgggccccacactcggagcaaccggctggccctgccggcctgggcagtgagtggcttagcacccgggccagtggctgcagagggtgtactgggtcccccagcagtgccagcccactggcgctgtgctcgatttctcgcccggccttagctgccttcccgtggggcacggctcgggacctgcagcctgtcatgcctgagcctcccacccactccatgggctcctgtgcggcccgagcctcccccatgagcgccgccccctgctccacggcgcccagtcccatcgaccagccaagggctgaggagtgcgtgcacacggcgtgggactggcaggcagctccacctgcagcccccatgcaggatccagtgggtgaagccagctgggctcctgagtctggcagccactcccagagcccctggaactctggcccaaggctctctgagtgactccttcccagatgttcttggcttagcggctgaagaccgatgctgcccgatcgccttggaagccccctcaatgcgttctccaaatgcatgaattacaaccaggaaaaaaagaaggttttgatatcctgaactctttgctggtttaacatgtatgtttctgtcacatgtttcaggtgggacagggacagtacccgtgtaacgcagaagaggagcaccaggatggagaaactctagcctcaccgactgtttaggttgtgagagcacacggggcat

SEQ ID NO: 27969 - DNA, 1652 bp, Homo sapiens
  SIMILAR (1253)..(1648): 711254mologous to Homo sapiens neutral protease large subunit,accession number M27826,Smith-Waterman Score=463.
ggggcttccgaggcgatcaggcagcatcagtcttcagccactaagccaagaagatctgggaaggagtcagtcagagagcctcgggccagagttccaggggctctggcagtggctgtcagactttcaaacttaacaccagtggtttgtcagtggctttcaagccttcagcgacagactgaaggctgcattgtcagcttccctacttttgaggtttggggactcagactggcttcctagctcttcagcttgcaaatgtcttatgctgggacttcactttgtgattgtaggtaacatctgtgctacactcaaggagaaatactcctcaatgctccatttagatgtgaccatgaagaaaaatggggagaaaagaacaaggctccaaaaaagaaagaagggaatgcctccacatccggcttatgaggacctaaacatagctgccatcactctccctgccaatgttgtccttcatcagccaagtggcttcagaacttcagggcagctggaccccgtttggtggtctcttgacacggacgcgcatgaaatttggtgccaagacccgggacttggatcaggggacttcccttgggagatcactcccctgtcctcctactctttgctccatgagaaagatccacctacgacctcaggtcctcagaccgaccagcccaagaaacatctcaccaatttcaaatccaagacaaaggagacaggttttatccatggacccaaaactccggcaccggtcacggactgggaaggcagccttcccttggtgtttaatcattgcagggacacctctctgattattcacccatgtttcaagggtgtcagaccacgcagggatgcctgccttggtccttcacccttagcggcaagtcccgcttttctggagaaggggcaagatttaattaacctcgccttcaaggtgtacaataatagaaaaaagttgcaattccttgcctccactgtgagacaaaccgcagccacatctccagcacacaagaacttccaaatgcctgaaccgcagcggccaggcgttcctccagaacctcctcccacaggagcttgctacatgtgccggaaatctggccactgggccaagcgaatgcccgcagcccgggattcctcctaagccgcgtcccatctgtgtaggaccccaccgaaaatcggactgttcaacttacctggcagccactcccagagcccctggaactctggcccaaggctctctgactgactccttcccagatcttctgggcttagcagcttgaagactgacactgcacgatcgcctcggaagccccctagaccattcacggacgccgagcttcgggtaactttcacagtggaaggtaagcccgtccccttcttaatcaatacagaggctactcactccacattaccctcttttcaagggcctctttcccttgcctccataactgttgtgggtattgatggccaggcttctaaacctcttaaaactccccaactctggtgccaacttagacaatactcttttaagcactcctttttagttatccccacctgcccagttcccttattagcctgagacactttaactaaattatctgcttccctgactattcctggactacagctatatctcactgccgcccttcttccctcgtgcc

SEQ ID NO: 27970 - DNA, 1212 bp, Homo sapiens
  SIMILAR (478)..(1194): 771254mologous to Homo sapiens CGI-67 protein,accession number AF151825,Smith-Waterman Score=1020.
atgcacgggcgggcggtcgggagccatggagcgcggccctggggcccgggggcgcgggccggggtggccttcccacggcacgacatggagacctgtggttgcgaggctccctggggcggcttggaccgcgatggggctgggccctggcctcctaatggggctgccgtctggggctctcacccctgcccgcgactcggagcacccccacccctcccctgcccggccaggccgggcggcgttgttggcgggggccccggtggaggcccggcccgggaggcgcctgccatgaacgggctgtcgctgagtgagctctgctgccttttctgctacccgccctgccccggccgcatcgctgccaagctcgccttcctgccgccggaggccacctactccctggtgcctgagcccgggcctggtggggccggggcctggtggggccggggccgcccccttggggaccctgcgggcctcctcgggcgctggaagctgcacctgacggagctcgccgacttccagtacagccagcgcgagctggacaccatcgaggtcttccccactaagagcgcccacggcaaccgcgtctcctgcatgtatgttcgctgcgtgcctggtgccaggtacacggtcttcttctcgcacggcaacgcggtggacctgggccagatgagcagcttctatactgggctgaactcccgcctccactgcaacatcatctacgactactccggctacggtgccagcgcgggcaggccttccgagtggaacctctatgccgacatcgacgccgcctggcaggccctgcgcaccaggtacggcatcagcccggacagcatcatcctgtacgggcagagcatcggcacggtgcccaccgtggacctggcctcgcgctacgagtgtgccgcggtggtgctgcactcgccgctcacctcgggcatgcgcgtcgccttccccgacaccaagacctactgcttcgacgccttccctaacatcgagaaggtgtccaagatcacgtcgcccgtgctcatcatccacggcatggaggacgaggtgatcgacttctcacacgggctggcgctctacgagcgctgccccaaggcggtggagccgctgtgggtggagggcgccgggcacaacgacatcgagctctacagccagtacctggagcgcctgcgtcgcttcatctcccaggagctgcccagccagcgcgcctag

SEQ ID NO: 27971 - DNA, 766 bp, Homo sapiens
  SIMILAR (161)..(739): 951254mologous to Mus musculus claudin-19,accession number AF249889,Smith-Waterman Score=973.
tctgcctctgaccctccttctcgctgctccctttgcccatctgctcctcccacctggccatgaccaaagcccgtgctggcaccctggcccagctctgagtcctgggaccctcggtcctctctcctgggccatggccaactcaggcctccagctcctgggctacttcttggccctgggtggctgggtgggcatcattgctagcacagccctgccacagtggaagcagtcttcctacgcaggcgacgccatcatcactgccgtgggcctctatgaagggctctggatgtcctgcgcctcccagagcactgggcaagtgcagtgcaagctctacgactcgctgctcgccctggacggtcacatccaatcagcgcgggccctgatggtggtggccgtgctcctgggcttcgtggccatggtcctcagcgtagttggcatgaagtgtacgcgggtgggagacagcaaccccattgccaagggccgtgttgccatcgccgggggagccctcttcatcctggcaggcctctgcactttgactgctgtctcgtggtatgccaccctggtgacccaggagttcttcaacccaagcacacctgtcaatgccaggtatgaatttggcccagccctgttcgtgggctgggcctcagctggcctggccgtgctgggcggctccttcctctgctgcacatgcccggagccagagagacccaacagcagcccacagccctatcggcctggaccctctgctgctgcccgagagtacgtctga

SEQ ID NO: 27972 - DNA, 806 bp, Homo sapiens
  SIMILAR (69)..(770): 401254mologous to Homo sapiens keratin associated protein 4.7,accession number AJ406939,Smith-Waterman Score=487.
cactcactcactcacacacctcccccagctcaccgcctccccactccagcatggccgcctccaccatgtccatctgctccagcgcctgcactgactcttggcgggtagacgactgcccagagagctgctgcgagccctgctgctgtgccccagcccccagcttgaccctggtctgcaccccagtgagctgtgtgtccagcccctgctgccagacggcctgtgagcccagcgcctgccaatcaggctacaccagctcctgcacacccccatgctaccagcagtctagctgccagccggagtgctgcacctcctccccctgccagcaggcctgctgtgtgcctgtctgctgtgtgcccgtctgctgcgtgcccgtctgtaacaagcctgtgtgcttcgtgcctacctgctccgagtcttccccttcatgctgccagcagtctagctgccagccaacttgctgcacctcctccccatgccagcaggcctgctgtgtgcctgtctgctctaagtccgtctgctatgtgcctgtgtgctctggggcttccacttcatgctgccagcagtctagctgccagcctgcttgctgcaccgcctcctgctgcagaccctcctcctccgtgtccctcctctgccaccctgtgtgcaagtccacctgctgcgtgcccgtcccctcctgcggtgcctctgcctcctcctgccagcccagctgctgccgcacggcctcctgtgtttccctcctctgccgccccgtgtgctcccgccctgcctgctacagcctctgctctggccagaagtccagctgctga

SEQ ID NO: 27973 - DNA, 861 bp, Homo sapiens
  SIMILAR (454)..(711): 901254mologous to Homo sapiens NAG13,accession number AF194537,Smith-Waterman Score=399.
atggtttggctctttaagatgctgcttctggcccgcaaagaagacattgcacatgcatgtttccgaggacacatacatggatgcataagagctatgaagatgaatcataggctgatagacattcgaatttggagggagcattttgactatgcaatgccagtaccaagtgaaattgtttctaagagcaactggcagaccaagagattctctcctgtgcctggctcggtgggacccatgcccacggagccttactcactgctagcgcagcagtctgagatcaacctgcgacgctgcagcctggattgcagctcctcgccagcaacagaacaaagcgggatggagaatgactttgacgagttgacagaagtaggcttcagaaggtcagtaataacaaacttctctgagctaaaggagcatgttctaacccattgcaaggaagctaaaaaccttgaaaaaaggtacaaggaggagctgtcaccattccttctgaaactattccaatcaatagaaaaagagggaatcctccctaactcattttatgaggccagcgtcatcctgataccaaagcctggcagacatacaacaaaaaaagagaattttagacaaatatccctgatgaacatcgatgcaaaaatcctcaataaaatgctggcaaagcgaatagagcagcacatcaaaaagcttatccaccatgatcaagtgggcttcatccgcagcattgttaaagaaaataattttcaacccagaatttcatatccagccaaactaaacttcataagtgaaggagaaataaaatcctttacagacaagcaaatgctgagagatttgtcaccaccaggccttccttacaagagcccctga

SEQ ID NO: 27974 - DNA, 1602 bp, Homo sapiens
  SIMILAR (583)..(852): 581254mologous to Homo sapiens PRO2221,accession number AF116695,Smith-Waterman Score=251.
atgtgtatgggctttggctacacagaaaccctgaaaactgtggcagtcgcagtaactgtgggaaaacttacattgcccatagttgccaggcccccagtccaggctgccccaatccgaacttctgtagatgggtcttgggcatcacgaaagggcagacaaaggaaccagagtacagaggtattaataattcagctcaaatctctcagctggaatgtggaaaagccaacattcactcacagctcttggtttgacccaaagctgcctgcaattccctactatgtgatctacaaatacaaagactgcagacagcataacattctcctgtttgagaaatatagcagcagcctgggccttcttacacgttgcagacatatgcagcatgaaaggagaacagctttcataaccaacaacaagtgttccaaaatacacaccttggagcagctgcctcctatagttacaggaagtggctggttgggccttctagaagctgcccacgattcttggctcattgctgcctttatctgtaaagccagcaatggtggtcaccaacatcaaagaccaaaggtacataaaaccgcaaagatagggagaaaccagagcagaaaacctgaaaattctaaaaaccggagcacctcttctcttccaaatgatcgcagctcctcgccagcagcagaacaaagctggacggagaatgactttgatgagttgacagaagtaggcttcagaaggtcggtaataacaaacttctctgagctaaatgagcatgttctaacccatcacaaggaagctacaaacattgaaaaaagtccctgctattggcagaacctggagttagcagtagacaaatctgttcttcacagtcctggctctatgcaggtgagggtagagggtggcttggagccaggagatgatggccagagggagaacagccccgaatggaccagagttgatggtggagatggaaggtctgaagagcgaaaggaaagatcagggtcatcagatgccagggctggagccccagaggagggacactctgaaagctggaatcctgcagcagcagatggcctaaatgtgaagcctataactatgcgacttctggaaacagtattggagaaaatgttcgtgaccttgggtcaagtcaaggtttctgatgatgcacatccaacaaaatttcagtactaccaggaagctctgtctatggccttgtgccctgcccatcagcttcctcatgagcttgaatgtggggtttccagctgttctaaaatgagagccagtgaaggaaggggctcaggggatcgtggcaaagagaacagcacacaggatcccctagaccatcttccatctgatacgactagtcccccacctaataccctcaacccatctcctcaggcccagcctaagtctcactctccaaaagggctccaagctcttaattcgccaggtggcttttgccgggctagcaacatcaaggatccaccgcaacatgttgtcagtgccgtcccgcccatagtgcgcccccacggcaggcaaagcccatgctcctgcccccgggctggtccagggtcccggcaccatatcgacgggccgcagcctatgccctga

SEQ ID NO: 27975 - DNA, 715 bp, Homo sapiens
  SIMILAR (299)..(592): 981254mologous to Homo sapiens keratin associated protein 3.3,accession number AJ406933,Smith-Waterman Score=593.
ttaagaaagtttatgaatttgtgttgtgctgcattcaatgcctttctgggccacaggttgaacaagcttgctgtaagatgttgctaaatctccccaagtatgtttcataaagcactgacctatagagctaatctctcccattgccatgtattgctgtgctctccgctcctgcagcgtccccaccggccctgccaccaccttctgctcatttgataaaagctgccgctgtggagtctgcctacccagcacctcagaatcctcatctaagaaactgaaagctaaccagacgcccattgccatggattgctgtgcctctcgcagctgcagtgtccccaccgggcctgccaccaccatctgctcctctgacaaatcctgccgctgtggagtctgcctgcccagcacctgcccacacacagtttggttactggagcccacctgctgtgacaactgtcccccaccctgccacattcctcagccctgtgtgcccacctgcttcctgctcaactcctgccagccaactccaggcctggagaccctcaacctcaccaccttcactcagccctgctgtgagccctgcctcccaagaggctgctaatggatggctactttgctcagtgcctgagattgaaaaagtcaacatagaagctttagcattcacctatctcagtacctacaactaatgtactctgctttagaaattggaacaaggatggag

SEQ ID NO: 27976 - DNA, 576 bp, Homo sapiens
  SIMILAR (91)..(357): 741254mologous to Gallus gallus Wnt-14 protein,accession number AF031168,Smith-Waterman Score=362.
atggacttttatcatgttggccaggctggtctcgaactcctggtctcaagtgatctgccagcctcagtctcccagggtgctggcattacaggcttcaaagagacagctttcctgtacgcggtgtcctctgccgccctcacccacaccctggcccgggcctgcagcgctgggcgcatggagcgctgcacctgtgatgactctccggggctggagagccggcaggcctggcagtggggcgtgtgcggtgacaacctcaagtacagcaccaagtttctgagcaacttcctggggtccaagagaggaaacaaggacctgcgggcacgggcagacgcccacaatacccacgtgggcatcaagagatgtggccgccatctggctgccaatgaaagaaccatattgaagcctgccatgctgggagcaggggaagacaggccacatccccagggtcagcacctgcaccttccggagactcagtgcctcccaggggcctccgtgcctcactctggccctaacctgaaagtcccattcacctccaacagaaagctcacctgggactgccctcataccccactctga

SEQ ID NO: 27977 - DNA, 764 bp, Homo sapiens
  SIMILAR (763)..(716): 681254mologous to Oryza sativa similar to RING-H2 finger protein RHA1a (AF078683),accession number AP000616,Smith-Waterman Score=74.
gactcttcagggacacagcagtcactgcgctgcagggacagtccccaagtgccaaggcacagcctaaaggggcctgttcccaccatggcatccgtgacaagaaccaggagccagaatgcaggtttctgggacttgtcagctcccttctgagtgccctgttgaggattcctagaagtccagacacctcacccccctaacctggatggaccacgcagagccaataggaatacttttctgtggacgtgccatgttggaatcccagatctccctgccctgccagcccctgccagcttcctggggacccaactgaccctgaagaaagcctctgatgggcctagaacagagaaggtgacccaggaccttgcccagcctttctggacaactggaagacagttacgcttcgtcctccacctctccctccaacaaaaggatcttagcaagtgttggagaggtgctgaagtcgtattaggaccaaccagactttttctttgaggatactcagaaggagtgaaggagaatggaacagggggtgtgaataaatgagctttctccatgtgtgattcaaagtggtttaacccatgcctcaccttctagaacacccgtggccctctctagccatgagaagtgtcaccactagccatcaaaatgctcccaaaagtccaacctttgaccaaactacatttcagattttcatttcagattttcttaaattctggagaaaaaagaaaataaagtaaaagaataaataaaaaaaaaaaaaaaaa

SEQ ID NO: 27978 - DNA, 405 bp, Homo sapiens
  SIMILAR (359)..(147): 361254mologous to Drosophila melanogaster fc proteins,accession number X76230,Smith-Waterman Score=93.
cttccccaccaattgatataggtttatgcctgcagtaaatgggatagttataaagctaatgcttcataccaatgcaactagtgcatgaagtgggttaggccagctttcctgtaactgaatatgggtatcagccagactggctatgtccccagcactagcccaggctcagggtcaagtacacacagctgtgcatcctctgaagcgctggagggagagaaagaagttccatctggggaagcgggtggagctgaggcaggggaccaccttggggagggtgggttggcccaagcgccgtctctcccagggatcagcaggctgctttccagctgggttagctcattccccacctcatcttgcagaagctccaggttcaggcttctgcacagctttgttcttgtggttgag

SEQ ID NO: 27979 - DNA, 1561 bp, Homo sapiens
  SIMILAR (539)..(784): 911254mologous to Cloning vector pCMVLacI lac repressor,accession number U64448,Smith-Waterman Score=359.
ccccctggaagtacaatcacccttaaaggatgaggatggtgaagagtttggagaaggagcagcatttaggaaagagtgtatacccgcttctcgcattcaactaactgcactgtgttcagcagtacagtacaaggtagggcttccaggtacttgtatcctgattgatgctgtcactctcactggaaaacaattggaaggtaagaaccatggcttccacctctctggattccagtaccctacaccaaatctggcttattataggtgctcaacagaatttgtagttccctttaaagatgatgcttggaataacccacttccagcaagagtggacagcagcaagaagactttgtttcatccttcagctgagtcgcggggcttcctttggaggaagaagaagcggaaatgtcatgctctggacccacctggtaaagagaggttgaccgtggcagtgagtactcggggcacctggggccagctgacccttgtgcttcagacacaggtgttgggctcggtgggaagggattttgccgatttcggaaccaccatcaaacaggattttcgcctgctggggcaaaccagcgtggaccgcttgctgcaactctctcagggccaggcggtgaagggcaatcagctgttgcccgtctcactggtgaaaagaaaaaccaccctggcgcccaatacgcaaaccgcctctccccgcgcgttggccgattcattaatgcagctggcacgacaggtttcccgactggaaagcgggcaaccccagcagagcaccccacgagaagtgtgggagattaagggggcccatggttccaagctggatgaggggccagctcctctcggactcctcctcagtgtcctcgtaggggaaatgggaatgctaataatggcctacttcacagaactgtggtggggatcctctagagtcaaccgcgaggtagggcttccaggtacttgtatcctgattgatgctgtcactctcactggaaaacaattggaaggtaagaaccatggcttccacctctctggattccagtaccctacaccaaatctggcttattataggtgctcaacagggctttccagcttcaagtcaaatgctacagaccgtgactctcccacgttcctgaggggacaacagaagacccacaagctaatgggtgtgcccctggaggaggtcactagatcaacagaaagagaggaacttcagaagagaaagaatctgctgcgaccgctcgagtaccaagaacgcttgagcagcagctcagcagcaccaggcagactctggcttggctcctcgtcctttgtttctgaccagctgcggccaatgcctacaggcttgagacctagttccagaaggcggccagcacctggaactgtggagcctccatcagtaaagcccaggatcaccagcacccagatttcccagggctaccaaagtctagggccactgtctccaatagtcattagcaggaccagggaatcctctggcattgcagcccccagcgctcccttctccgaagccctgttgcgtcagggcgtccccacgcccccaccttaa

SEQ ID NO: 27980 - DNA, 1771 bp, Homo sapiens
  SIMILAR (433)..(1269): 611254mologous to Gallus gallus Wnt-14 protein,accession number AF031168,Smith-Waterman Score=907.
atgaatgtggacatcttccagtgtgattcagaagagaccctgaagaaagcctctgatgggcctagaacagagaaggtgacccaggaccttgcccagcctttctggacaactggaagacagttacgcttcgtcctccacctctccctccaacggtctctggccaaccaagatgccctgaccacacagactgtatgctgggcgaagggtgtgggccatccgtggggcctgcaggagaacaagtggaatctgcagcatgggacatctctgcctagagcctgtgcaaacaatggcactgtcctcatcattgagggggtcacgcacaaggcattccccagaggcctggcccttccagggcccaagcccagcctgagcctgcctgtgcgtgggaagagggtgatcggagcccagggtgcattcaagaacctgtcaagcctgaccgggcgggaagtcctgacgcccttcccaggattgggcactgcggcagccccggcacagggcggggcccacctgaagcagtgtgacctgctgaagctgtcccggcggcagaagcagctctgccggagggagcccggcctggctgagaccctgagggatgctgcgcacctcggcctgcttgagtgccagtttcagttccggcatgagcgctggaactgtagcctggagggcaggatgggcctgctcaagagaggcttcaaagagacagctttcctgtacgcggtgtcctctgccgccctcacccacaccctggcccgggcctgcagcgctgggcgcatggagcgctgcacctgtgatgactctccggggctggagagccggcaggcctggcagtggggcgtgtgcggtgacaacctcaagtacagcaccaagtttctgagcaacttcctggggtccaagagaggaaacaaggacctgcgggcacgggcagacgcccacaatacccacgtgggcatcaaggctgtgaagagtggcctcaggaccacgtgtaagtgccatggcgtatcaggctcctgtgccgtgcgcacctgctggaagcagctctccccgttccgtgagacgggccaggtgctgaaactgcgctatgactcggctgtcaaggtgtccagtgccaccaatgaggccttgggccgcctagagctgtgggcccctgccaggcagggcagcctcaccaaaggcctggccccaaggtctggggacctggtgtacatggaggactcacccagcttctgccggcccagcaagtactcacctggcacagcagatggggagaaagcacaggtggtagaagccatccgttcagagaaaggagagctttctgtgcttgagtggacccgagtgagatctgtgccctggagccctgtgtccttgatttggcttttcaaatatgcctccgctgaggcctcattcttgtctcgagagctgggttatgcacactcacccagccgtgctcaaaactaccaccagtgcagcctgatgacagaggcccagggtttggtaaatgaagttgctgctctgccagtgctgacaacagccacagtagttgttttgcgcaggcttcatacagaatccctggctgcctcaaccacaagaacaaagctgtgcagaagcctgaacctggagcttctgcaagatgaggtagggcttccaggtacttgtatcctgattgatgctgtcactctcactggaaaacaattggaaggtaagaaccatggcttccacctctctggattccagtaccctacaccaaatctggcttattataggtgctcaacag

SEQ ID NO: 27981 - DNA, 698 bp, Homo sapiens
  SIMILAR (125)..(697): 1001254mologous to Homo sapiens Human membrane channel protein-2 (MECHP-2),accession number Y70452,Smith-Waterman Score= 1010.
acgcacgaccccctgcctcttcttccagaagccaatgggcacagaagcaccaattctcccacaataggttcacctgctattgtttcccccacccaggacagtcggcccaatatgtcaagactctctgatcactagatcccctgcatctccactgaacaaccaaggcatccctactccagcacaactcacaaaatccaatgcgcctgtccacattgatgtgggcggccacatgtacaccagcagcctggccaccctcaccaaataccctgaatccagaatcggaagactttttgatggtacagagcccattgttttggacagtctcaaacagcactatttcattgacagagatggacagatgttcagatatatcttgaattttctacgaacatccaaactcctcattcctgatgatttcaaggactacactttgttatatgaagaggcaaaatattttcagcttcagcccatgttgttggagatggaaagatggaagcaggacagagaaactggtcgattttcaaggccctgtgagtgcctcgtcgtgcgtgtggccccagacctcggagaaaggatcacgctaagcggtgacaaatccttgatagaagaagtatttccagagatcggcgacgtgatgtgtaactctgtcaatgcaggctggaatcacgactcgacgcacgtcatcaggtttccactaa

SEQ ID NO: 27982 - DNA, 1263 bp, Homo sapiens
  SIMILAR (154)..(363): 751254mologous to Homo sapiens Human potassium channel K+ Hnov27,accession number Y34125,Smith-Waterman Score=254.
atgtccaagcaagactgtgaatgcacatgctttctgaagctcaacatctactgtgaatggggtggtgactgggcctttacgaacagctctgagctcaagcgcagcaagcagatggtgcactgggcacaggagaggcagccccgtgtccctgcagtgttctcgcagtctttgccttataaaactcatgcattcaatgaagagcggctgcaagaaatcggaagactttttgatggtacagagcccattgttttggacagtctcaaacagcactatttcattgacagagatggacagatgttcagatatatcttgaattttctacgaacatccaaactcctcattcctgatgatttcaagccttttatctttaacatcatctttggcctgcacagagctgccggtgtggcagtcacggtccaggctggaagaggaggtctgggtttcacctggtccctggacaccacgcagggggcggatgcagggcagaacccggcagaggagcagctgcctgcgccctctccccaccccacctctcctgtttccgccctggcgcacaggccacgtgtcaggccacatcttctcacagctcagaaacgtggtcatggagatcaggaggataaatacattcattctccacctcagcgtgggatgggaatctgtgatttgactggaggacccacagctgccatatccatagaccaagagcctgaggagccgcctccagcactctttcttcacctctggttgtccttctccactcctcctctggccacacgcacagttcacacatacatcaccctttatccaatggagtcagagatttccctggatgtagctcaggtggaaaacctgcttggaaaggaaaagagaaggctgttcgtactccgtgggagggtagtttttgagtcttccatggagtcttctacacattccagtggaaatggcagtgccagccccctgaccccagttgggagggaccctgggatcattgactgggcctcaccatctggagaagagattctggaaaagttgtctctggacagtttgccagaaacactcctcctggacctaggtgacatctggcattcactgggatctttgtcctcagaagatatagaccaattctcttctggctgttgggctgtccagttcttagttacattcgtcctatttggaccaatagtgcctgcagctgaactgccagacctggtattagcacaggagatttgtttcttggaatattttggagaggatagtggttga

SEQ ID NO: 27983 - DNA, 534 bp, Homo sapiens
  SIMILAR (135)..(278): 461254mologous to Mus sp. SmD homolog {Gly-Arg repeat},accession number S71494,Smith-Waterman Score=85.
ttaaagccggatttcgcttagtcccgtgaaagcgaaggagcaccagcgcttcctgattccgcacagttctctcggcagagacggcccgtcctctccaagaaccggaagccggacagcgtcaggacgttttattcttctcacctgggattcagagaggcagcggccaaggacagggcccccgccgaggccaccgggcagcgtccaggtctcggcctttgggaggggagcagcgggggaggggcacggggaggggcgaggacggtgtcttatcatttgtatgttaccagaaacctgtgctatgacttttaactagaaaaacaacaagggatgatggatctttctttggtcacattagcctctgtaagttactcaagacagctgcaatgaactgacaacaatatccacaaacaaggcaaaaggaacttctcatggcagggaactgaatctggatgttattctcagttctgtcattttccagatacctttagaaagaatgagctgcagtttgtgttgttgttttccttgagacaaggt

SEQ ID NO: 27984 - DNA, 485 bp, Homo sapiens
  SIMILAR (7)..(192): 651254mologous to Oryctolagus cuniculus keratin,accession number M95718,Smith-Waterman Score=233.
ataagctactacggcagctactatggaggcctgggctatggctgtggaggctttggtggcctgggctatggctatggctgtggatgtggcagcttccgcagactgggttctggctgtggctatggaggctacggatatggctctggctttggaggctatggatatggctctggcttcggaggctacggatatggctgctaccgcccatcatactatggaggatatggattctctggattctattaaactacttgccccagcaacacaatgtgtgaaattataagaggactttcccagaggctgaccttcaatcagttgtgacaacaaaagatcatgctggagctattttgcacaaagagaatttaacatctcagaatttcaggcaattttttttctctgtatacccacatctctataataatcctagtattctctagttttgcttttaaagctgattgaattatctgtttatcttccaataaaac

SEQ ID NO: 27985 - DNA, 658 bp, Homo sapiens
  SIMILAR (38)..(289): 591254mologous to Mus musculus high-glycine tyrosine keratin type II.4,accession number D89902,Smith-Waterman Score=237.
ctgaacaacaaaccaactcaccactcctgacaccatgagtcactacggcagctactacggaggcctgggctacagctgtggaggcttcggtggcctgggctatggctatggctgtggatgtggcagcttctgcagacggggttctggctgtggctatggaggctacggatatggctctggctttggaagctacggatatggctctggctttggaggctacggatatggctctggctttggaggctatggatatggctgctgccgcccatcgtacaatggaggatacgggattctctggcttttattaaatgaattgctgaaattggaagcagaggagaaacctccaaatgtgtttggtcctgtcccgtgctttcattccaaaaatccattctattgccttcagcatcaatggagagatatttagctatgttaaatctttaaaatagatttaagctgcttctgtgaatatttgttgtctttttactttcggagtccgtcacctgaaatcatattcatgtataactactctaggttgttcttctaaatttgctttatttttcttaccaccattaccttgatgttatctatcaagatcctagcaaaaacttgtattttgcttttatctaataaatgaagtaaagtataaatattttaaaaa

SEQ ID NO: 27986 - DNA, 1373 bp, Homo sapiens
  SIMILAR (42)..(245): 1001254mologous to Homo sapiens Human secreted protein, SEQ ID NO: 4418,accession number G00337,Smith-Waterman Score=362.
ccagtgtccaggctatcagcagagaaagacaggtgggcagcatggctccgggcgaaaaggaaagcggggagggcccagccaagagcgccctccggaagatacgcacagccaccctggtcatcagcttggcccgaggttggcagcagtgggcgaatgagaacagcatcaggcaggcccaggagcctacaggctggctgccgggagggacccaggactcacctcaagctcctaaaccaatcacaccccctacttcacaccagaaagctcagagtgccccaaagtcgccaccccgcctgccagaaggacatggagatggacaaagctcagagaaagcccctgaggtttctcacatcaaaaagaaagaggtgtccaaaacggtggtcagcaagacttatgagagaggaggggacgtgagccacctcagccacaggtacgagagggatgctggtgtgcttgaacctgggcagccagagaatgacattgacagaatcctccacagccacggctccccaacgcggaggagaaaatgtgccaacctggtgtctgagctaaccaagggctggagagtgatggagcaggaggagcccacatggaggagtgacagcgtagacacagaggacagcggctatggaggagaggctgaggagaggcccgagcaggatggagtgcaggtggctgtggtcaggatcaagcgccccttgccctcccaaggagggtgcctgcatgaggaggagaaatactccctctacaggaagatctatggagttggcagtgaaagcccattttcactttctccatacagatcggagacagaagagaaaatcatgcctttaggcgtcccatgcattttgaagctgcctttgggtaaccagatttcgggaagtgagtttggatgggtaaacagatttacagagaaactcaactgcaaagcccaacagaaatatagcccagtgggcaacttgaaagggagatggcagcagtgggctgatgaacacatacaatcccagaagctcaatcctttcagtgaagagtttgattacgagctggccatgtccacccgcctacacaaaggagatgagggctatggccgccccaaagaaggaaccaaaactgctgaaagggccaagcgtgctgaggagcacatctacagggaaatgatggacatgtgcttcattatctgcacaatggctcgccacagacgagatggcaagatccaggttacttttggagatctctttgacagatacgttcgtatttcagataaagtagtgggcattctcatgcgtgccaggaaacatggactggtagactttgaaggagagatgctatggcaaggccgagatgaccatgttgtgattacgctactcaagtga

SEQ ID NO: 27987 - DNA, 1656 bp, Homo sapiens
  SIMILAR (520)..(654): 641254mologous to Homo sapiens prostate-specific transglutaminase,accession number AF026689,Smith-Waterman Score= 137.
atgctgggacaagaagcccagttagagtcagggaggccgtacctgcagcagggactgctgcgaggagaatcctatccaacagaatcctcaacaacagaaaccaccaagatttcctccccaccatcccactatgtgccaggggccttaaaaccttatctccacccctcgcaatggctcctcgaggtcagtctggttatccacaattcacagagaagagggaagagattgatgcctcttctgttgcttagcaaagccatctctcctcctccacctgctcacctgtggagcacagccccagggacccctgtggaaggcaaagcccatggacaggccatgtccaagggaagaacaaaaactctgatcgaagtgaaaagaaatgcctcttcgggcaagaagaggagcggaggggctggggaaagaggagaaggaagaagaggagaaacaaagacgggcagaaagggagaagggggagaaaatgaagaggaggaggaggaggacgaaggctcaaaaacagaaggcaagatggggtctcactgcattgcccaggctggagtgaagtggctgttcacaggcacaatcatagctctctgtagcctcaaactcctgagctcaagttatattcccacgtcagcctcccacgtagctggaactacagtacagaagatggcctacactgacttagaaaagggcagtagagttacctgcagtcaactgcagtcagaaaacagagccataattatccctgatgtgcaagccgtgctccgcccttatgagtgtatttatttttattgcatcctctgcattaaggaggacaaagggtatatatttggaaaccaattgttcagagacacccccttgaaacttgtaactatcacctacttctccaacacatggcatgaaaaaattattttacaactacatccaccatgtacttatggccctctgtcagtatggcagaatgttgtactccatgatattactcaacaggctaaacagcacattatcacattgactctgaaaatgaggaatgctatgtccaagatggccctcaacagattggatgatggcccacctggattgctgaaggctgggccgaaacctagccacaagactcaagggttggggggctgcaatcagggtagagcagaacttgatctggacattcctatcttgacaacggcactggggatcttccgtctgaaaagagagttggccaaggtacgcgttgttggccaagagtttccatctgggcatgctgctgcaatgaccgatgaactgaaggcagttcagacttcagacatccatgtcctgtcatcagtcaacttcaggaaatttttcgaaattgctgcccaatctgcaaggacaggaggtagaggaaatggaaaaagaggccagaaagaagaattcagggaccaacagcagctgaacagcttggctgacccgcacgctgggcgtctgattccaggacaactctccaaggaaagggaggaggtggaaggaggactggcacagtgtctggccaatgagagggacttggtcacagcagaggaaatgtctataaggattttcctagaaaagccagataaatgttacatgaaaatcaataacatgcagcatattgtctctagcaccttggatgctgctgttggaccctaa

SEQ ID NO: 27988 - DNA, 987 bp, Homo sapiens
  SIMILAR (553)..(759): 411254mologous to Canis familiaris brain-specific synapse associated protein, Bassoon,accession number AJ012166,Smith- Waterman Score=98.
tcagcagcattcatccccatggtattcaggccactttccaagaaccagcccctccttgtacttaagtttacagccctcacctttgtgcttagatggactgtggccagcgggacctccaggcctggctgggtcaggagagttttgcttaaccagatctgtttgatccttgaaccaaaaagcggggagccagagagatcctttgagaactgatgactgctgctgggtcctgcccagccatttgcattttataaaggtctttggcagcggccaaggccttctcattatgtggtgtttttccacttcgggatgaaccggagtggtttgtgcagccacctgatagctctttgcaccagcttaatgggtttatcaggacatccattgttaaggagcacttgtagtcttccgtggttgatcctatttggggatctttgagattcagaaatctggatgtccatttccctccaacaattgcagtgactgtgctggtgtctgaggcatggaacatgcacagtagccacagagctaggctctggagcatgcacgtgattgtgggaaggaggtagtggctttggccctggtcgttgatgttctgcagggcttctttgcccgaggccctccggatctccaccttccggcccgattcaacagatggctctccgccggcgcgccggccctgccgcgagtacggcggctgcgggtccgggcccaagtgggcgacgtcccgctgctgagccaccacctgccccgagccccggcccaccgacagcgagtcgaagtcgatggtcttgttctccgaggacccttccaccgggcagaacatgccacagaatttctgccggggcttggggctgccggagcccaggtttttaaaaaaagcagggacctcttcgtcctctgccgccttcccggattgctttctctcggccatggctcgggggctcgggtagggtcctcgccgtccgtccgtccgtctgccagtccctaagt

SEQ ID NO: 27989 - DNA, 1413 bp, Homo sapiens
  SIMILAR (316)..(1410): 961254mologous to Homo sapiens dJ321O10.1 (similar to EEF1A1 (eukaryotic translation elongation factor 1 alpha 1)),accession number AL109752,Smith-Waterman Score=1858.
atgacttcaccaaatgaactaaataaggcaccatggaccaattgtggagaaacaggatggattaaagacttaaatggaaaacccaaaactattaaaatcctggaagacaacctagtcaataccatcctggacataggaacgggcaaagatttcatgacaaagacaccaaaggcaatcgcaacaaaagcaaaaattgacaagtggaatctaattaaatttaagagcttctgcacagcaaaagaaactatcaacagcataaacagacaacctacagaatgggagaaaatattcacaaactatgcatttgataaaggttttgatctgctaacacctgtaatgactactgtatccattaagaacgtgattacagggacatctcaggttgactgtgctgtcctgattgttgctgctggtgttggtgaatttgaagctggtatctccaagaatgggcagaccagtgagcatgcccttctggcttacacactggatgtgaaacaactaattgttggtgttaacaaaatggattccactgagccaccctgcagccagaagagatatgaggaaatcgttaaggaagtcagcacttacattaagaaaattggctacaaccccaacacagtagcatttgtgccaatttctggttggaatgatgacaacatgctggaggcaactgctaacgtgccttcgttcaagggatggaaagtcacctgtaaagatggcaatgccagtggaaccacgctgcttgaggctctggactacatcctaccaccatctggtccaactgacaagcccttgcgcctgcctctccaggatgtccacaaaattggtggcattggtactgtacttggtggtcaagtgaagactggtgttctcaaacccggtatggtggtctcctttgctgcagtcgatgttacaactgaaataaactttattcctgggaacaatgagggcttcaatatcaagaatgtgtctgtcaaggatgttcgttgtggcaacattgctggtgacagcaaaaatggcccaccaatgaaagcagccggcatcactgctcaggtgatcatcctgaaccatccaggccaaatcagtgctggctatactcctgtactggattgccacatggctcacactgcatgcaagtttgctgtactgaaggaaaagattgatcaccgttctggtaagaagctggaagatggctctaaattcttgaagtccggtgatgctgccatcattgatatggttcctggcaacctcatgtgtattgagagcttctcagactatcctcctctgggtcactttggtgtttgtgatatgagacagacagttgctgtgggtgtcatcaaggcagtggatcagaaggctgctggagctggcaaggtcaccaagtctgcccagaaagctcagaaggctaaatga

SEQ ID NO: 27990 - DNA, 1756 bp, Homo sapiens
  SIMILAR (76)..(993): 511254mologous to Rattus norvegicus elongation factor-1 alpha,accession number L10339,Smith-Waterman Score=622.
atggacataaagaagggaataacagacatcagcgcctctttgagagtggagagtggatgggaagccagaacgagaaaggaaaagactcatatcaacactgtgatcatcggacacgtagattcgggcaagtccaccactactggccatctgatctacaaatgcggtggcgtcgacaaaagaaccatcgaaaaatttgagaaggaggctgctgagatgggaaagtgctccttcaagtatgcctgggtcttggataaactgaaagctgagcgtgaacatggtatcaccattgatatctctttgtggaatatttgagaccagcaagtactatgtgactatcattggtgccccaggacacagagactttatcaaaaacaatgattacagggaacatctcaggcctgactggtgctgtcctgattgttgctgctggtgttggtgaatttgaaagctggtattctccaagaaatgggcagacccgagagcatgcccttcttggcttacacactgggttgttgaaacaaactaattgtcggtgtttaacaaaatggattccacatgagccaccctatagccatgaagagatatgaggaaattgttaaggaaggcagcacttacattaagaaaaattggctacaacccgagcacagtagcatttgtgcccaatttctggttgggaatggttgacaacattgcttggaggccaagtggttaacatgcccttggtttcaaggggatggaaaagtcaccccgtaaggattggcaattgccagttgggaaccacggctgctttggagggctctggcactgcaatcctacccaccaactcgtccaactgaccaagcccctttgcgccctgcctctccaaggatgtcttaccaaaaattgggtggtattgtcaacgttgcaacagaagtaaaatctgttgaaatgcaccatgaagctttgagtgaagttcttcctggggacaatgtggggctttcaatgtcaagaatgtgtctgtcaaggatgttcgtcgtggcaacgttgctggtgacagcaaaaatgacccaccaatggaagcagctggcttcactgctcaggtgattatcctgaaccatccaggccaaataagcgccggctatgcccctgtattggattgccacacggctcacattgcatgcaagtttgctgagctgaaggaaaagattgatcgccgttctggtaaaaagctggaagatggccctaaattcttgaagtctggtgatgctgccattgttgatatggttcctggcaagcccatgtgtgttgagagcttctcagactatccacctttgggtcgctttgctgttcgtgatatgagacagaccagttgcggtgggtgtcatcaaaagcagtggacaagaaaggctgctggagctggcaaggtcaccaaagtctgcccagaaagctcagaaggctaaatgaattattatcccctaatacctgccaccccactcttaatcagtggtggaagaacggtctcagaactgtttgtttcaattggccatttaagttttgtaagtaaaagactggttaatgataacaatgcatcgtaaaaccttcagaaggaaaggagaatgttttgtggaccactttggttttctttttttgcgtgtggcagttttaagttattagtttttaaaatcagtactttttaatggaaacaacttgaccaaaaatttgtcacagaattttgagacccattaaaaaagttaaatgagaaaaaaaaaaaaaaaaa

SEQ ID NO: 27991 - DNA, 897 bp, Homo sapiens
  SIMILAR (306)..(374): 571254mologous to Homo sapiens Human secreted protein, SEQ ID NO: 6812,accession number G02731,Smith-Waterman Score=71.
atggggggccagggagatcttcctggagaaactcaggagctccgacccagaggcggtttttcagctccagatgtgactaaaaagggccaacctatggttcaggtccttgcttcagagagtgtaagctccaagccttggtggcttacagatggtgttgagcctgcaggtacacagaagtcaagaactgaggtttgggaacctccacctagatttcagaggatatatggacatgcctgggtatctaggcaaaagtttgctgcaggggcagagcctttatggagaacctctgttagggcagtgcagaagggaaatgtggggtggaagcccccacacagagtccccactggggcactgcctagtggagctgtgagaagagggccaccgtcctccagatcccagaatgataaatccaccaacagcttgcaccatgtgcctggaaaagctgcagacactcaacaccagccagtgaaagcagtcaggagggggcctgtatcctgtgaagccacaggagtggagctgcccaaggccatgggagcccacctcttgcaacagcattccatggatgccaaatttcctaaatgggcctggcctcttaaacagagatgttggcagcgaaattgtcttccagggacctggcagcttgttttggccctgacatgcaaaacccatcactattctgggagagaagtgggcagcaaaggcttggctgcctctgctgagaaccagtacaagccttccacgtctcacagcttccagagcaaaactcagcatcctattgtatcagtcaatgtgacacggcatcctgtctacaacacccaccacctgccacgggaagtgcagccaatcggctgcacggatcctacagtatgtggcatgcgacttcttgtggggacatga

SEQ ID NO: 27992 - DNA, 905 bp, Homo sapiens
  SIMILAR (180)..(545): 1001254mologous to Homo sapiens bA311P8.3 (probable uracil phosphoribosyltranferase),accession number AL137013,Smith-Waterman Score=628.
  misc_feature (1)...(905): n = a,t,c or g
ngtgccagaccaggttatgacgcacagcgtggcaattcttttaagaggactgcgaactctcccgcaagatcggggcccagcttaagttgctgcctataaatatcagatacggaggttacagnccatcatccgggacaagacagccagtagagtgncttcatgttttctgcggatcgtttggtgaggcaatggaacaaggtttacgagactgctgtcgatccatacgaattggaaagatcctgattcagagtgatgaggagacacaaagagccaaagtatattatgccaaattccccccagacatttaccggagaaaagtccttctgatgtatccaattctcagcactggaaatactgtaattgaagctgtaaaggttcttatagaacatggagttcaacccagtgttatcatcctactcagtctgttctccactcctcatggtgccaaatcaatcattcaggagtttccagagatcacaattttaactactgaagttcatcctgttgcacctacacattttggacagaaatactttggaacagactaagttatttaagtaaaataattgtcttatgtaatattacaatcatgttttgattttctatttgttttactgattcacttgagggtggcagagaaaaatgtgttaaaatgctttttagttttggaagtgggtatatttgaggttatatctcatttagttatttgtttactgttggcaccgaattcaacaatgaagtatatgcaactcttacaaaacataaattttaataatattctaatgcaaattactgaaccctcagtgcattaaaattatttcctaatttatgagcctcttagtttggaggttgcttgaagccacaaataaaactcaaaggaanggtcaatcaaaangggtcggcct

SEQ ID NO: 27993 - DNA, 920 bp, Homo sapiens
  SIMILAR (549)..(917): 991254mologous to Homo sapiens bA311P8.3 (probable uracil phosphoribosyltranferase),accession number AL137013,Smith-Waterman Score=629.
atgcccccactgacagccccgagtctgtttccaggtggagggccagaggggcttgaaaagttgtctgagactatccgcctcccagctgccacagaaaagggtgttagcttttccccacctgtgaagtctgcatatccgattcgcgccctcccccaagttctggccaggggggcttcttgcccctttcaaatcattacagagttcaccaagagaagtgcttctacctgtggagttttaccccctgctcctcaggccaccctcacgatggatccctgtggtgccaaccaggaatgggctgcttggggacccagcaagcttccagggcctttctgctgctttctctacccctgtatttcactcggctctctaaattgactcagctccaggtcctgcaggagcaatctgcttccttaagagggtctgtgggtcctctcctctgtcctattttgaatgttcacattgaatgcagctttgaggtgcagatcagacttgttgtggaagagggattgaatcagctgccatataaagaatgcatggtgaccactccaacaggtgaggcaatggaacaaggtttacgagactgctgtcgatccatacgaattggaaagatcctgattcagagtgatgaggagacacaaagagccaaagtatattatgccaaattccccccagacatttaccggagaaaagtccttctgatgtatccaattctcagcactggaaatactgtaattgaagctgtaaaggttcttatagaacatggagttcaacccagtgttatcatcctactcagtctgttctccactcctcatggtgccaaatcaatcattcaggagtttccagagatcacaattttaactactgaagttcatcctgttgcacctacacattttggacagaaatactttggaacagactaa

SEQ ID NO: 27994 - DNA, 983 bp, Homo sapiens
  SIMILAR (211)..(513): 931254mologous to Homo sapiens bA311P8.3 (probable uracil phosphoribosyltranferase),accession number AL137013,Smith-Waterman Score=493.
ctcaactcagagggcaacagtggtagtggggacagtatcagctatgacgcaccagctggcaactccttcctagaggactgcgaactctcccggcagatcggggcgcagcttaagctgctgcctatgaatgatcagatacgggagctacagaccatcatccgggacaagacagccagtagaggtgacttcatgttttctgcggatcgtttgatcacacttgttgtggaagagggattgaatcagctgccatataaagaatgcatggtgaccactccaacagggtacaagtatgaaggagtgaaatttgagaagggaaattgtggggtcagcataatgagaagcggcgaggcaatggaacaaggtttacgagactgctgtcgatccatacgaattggaaagatcctgattcagagtggaggggagacacacagagcccaagtatattatgcccaattccccccagacatttaccggagaaaagtccttctgatgtatccaattctccagactgggaaatactgaatttgaggctgtaaaggtcctataagaccatggagttcaccccagtgtaatcatccaactcagtccgttcctcattccccatggtggccaattcaatcattcagaggtttccagagttcccaatttaaccaactgaagttcatcctgttgcacctacacattttggacagaaatactttggaacagactaagttatttaattaaaataattgtcttatgtaatattacaatcatgttttgattttctatttgttttactgattcacttgagggtggcagagaaaaatgtgttaaaatgctttttagttttggaagtgggtatatttgagggtatatctcatttagctatttgcttactgttggcaccgaattcaacaatgaaggatatgcaactcttaccatacataaattctaatagtattctaaagcaaattactgaaccctcactgcattagtattat

SEQ ID NO: 27995 - DNA, 716 bp, Homo sapiens
  SIMILAR (110)..(418): 1001254mologous to Homo sapiens alpha-2- macroglobulin,accession number M36501,Smith-Waterman Score=544.
ggaattcgctctgccatgcaaaacacacaaaatcttctccagatgccctatggctgtggagagcagaatatggtcctctttgctcctaacatctatggactggatgagtctaaatgaaacacagcagcttactccagagatcaagtccaaggccattggctatctcaacactggttaccagagacagttgaactacaaacactatgatggctcctacagcacctttggggagcgatatggcaggaaccagggcaacacctggctcacagcctttgttctgaagacttttgcccaagctcgagcctacatcttcatcgatgaagcacacattacccaagccctcatatggctctcccagaggcagaaggacaatggctgtttcaggagctctgggtcactgctcaacaatgccataaaggtgaatcattctggagctagttttgatttgtccattatgatatctgcaaggatgaggataggaagtgataatgtgaaaaattctaagggaaagcctcagaggaaaataaaacctggatggcaccaaaaaagaggggatagaacaaaagttgattgtgatactttgtcctatagggatggatatgggtaaggatgaattccatgacacagcagaatagaaagaattaatcaatagcattctcagaagttgaattattcaaatctctctctcgtattcacagggaggaagaaaagatgaa

SEQ ID NO: 27996 - DNA, 4629 bp, Homo sapiens
  SIMILAR (1)..(1593): 941254mologous to Homo sapiens pregnancy zone protein,accession number X54380,Smith-Waterman Score=2531.
atgcggaaagacagacttcttcatttatgtcttgtgctacttcttatcctgctttctgccagtgactcaaactctacagaaccgcagtatatggtgctggtcccctccctgctccacactgaggcccctaagaagggctgtgtccttctgagccacctgaatgagacagtgactgtaagtgcttccttggagtctggcagggaaaacaggagcctcttcactgacctggtggcggagaaggacttattccactgtgtctccttcactctcccaaggatctcagcctcttcagaggtggcattccttagcatccagataaaggggcctacgcaagatttcaggaagaggaacacagttctggtactgaacacccaaagtctggtctttgtccagacagacaaacccatgtataaaccaggacagacagcctcctgtcttattacccaaattacctgctttatcatgtctgaatcttatcggagaactacttttccagtaagattccgtgttgtctccgtggatgaaaattttcgccctcgaaatgaactgaacccaagaagaaatcgaattgcacaatggcagagtctcaagctagaagctggcatcaatcagttgtcctttcccctctcatcagagcccattcagggctcctacagggtggtggtacagacagaatcaggtggaaggatacagcaccccttcaccgtggaggaatttgtgcttcccaagtttgaggtcaaagttcaggtgccaaagataatcagtatcatggatgaaaaagtgaacataacagtctgtggagaatacacttatgggaagcctgtcccaggacttgcaactgtgagcctgtgtagaaaattatctcgtgttcttaattgtgacaagcaggaggtctgtgaggaattcagtcaacagcttaacagcaatggctgcatcacccaacaagtacacaccaaaatgctccagattacaaatacgggctttgaaatgaagcttagagtggaagccaggatcagagaagaggggacagacctggaagtcactgcaaacaggatcagtgaaatcacaaacattgtatccaaactcaaattcgtgaaagtggattcacactttagacaaggaatccccttttttgcacaggtgcttctggtggatggaaaaggtgtgcccatccccaataaactcttcttcatctctgtgaatgacgccaattattactccaatgcaaccaccaatgagcagggtcttgcacagttttcaatcaatactaccagtatctcggttaataaactttttgtccgggttttcactgtgcatcccaacttgtgttttcactattcatgggtagcagaagaccaccagggtgctcagcacactgcaaatcgtgttttctccttaagtggaagttacattcacctggagcctgtggctggtaccctgccctgtggccacacggagactatcacggcacactatacactgaatagacaggccatgggagagttatcggagctcagtttccattacctgatcatggctaagggagtcatcgtcagatctggaacccacactctgcctgtggagtcaggagacagcattcatagcaatgatcatggcagtatgactcaggggattgggggatccccactagcaactgtgcatgcatttgcactgacggtggtgttagcatgggggtggggcactgtgaaaggcagttttgccttatccttccctgtggagtcagacgttgcccccattgcacgaatgttcatctttgccattttaccagatggagaagttgttggagactctgaaaaatttgagattgaaaactgtctagccaacaaggtggatttgagcttcagcccagcacaaagtcccccagcctcacatgcccacctgcaagtagcagctgctccgcagtccctctgtgcccttcgtgctgtggaccaaagtgtgctgctcatgaagcctgaggctgagctctctgtgtcctcagtatataatctgctaactgtgaaggatctcaccaattttcctgacaatgtggaccagcaggaggaagaacaaggacactgtccccgtcctttcttcattcataatggagccatctatgttcccttatcaagtaatgaagcagatatttatagcttcctcaaggggatgggattgaaggtgttcactaactcaaaaatccgaaaaccaaagtcgtgttcagtcatcccttccgtgtctgcaggagcagtaggtcaaggatactatggaggtctaggagtagtagagagaccatatgttcctcaattaggcacatataatgtgatacccttaaataatgaacaaagttcagggccagtccctgaaacggtgcgaagctattttcctgagacttggatctgggagttggtggcagtgaactcatcaggtgtggctgaggtaggagtaacagtccctgacaccatcaccgagtggaaggcaggggccttctgcctgtccgaagatgctggacttggtatctcttccactgcctctctccgagccttccagcccttctttgtggagctcacaatgccttactctgtgattcgtggagaggtcttcacactcaaggccacggtcctaaactaccttcccaaatgcatccgggtaaggaaaatgagggtgaacaggaaagggaatgtgaacttctcagtgagtgcagaggcaatgcagtccttagaactctgtggaaatgaggttgttgaggtccctgagattaaaagaaaagacacagtcatcaaaaccctgttggtggaggctgaaggtattgagcaagaaaagactttcagttctatgacctgtgcctcaggtgctaatgtgtctgagcagttgtccttgaagctcccatcaaatgtggtcaaagaatctgccagagcttctttctcagttctgggtgacatattaggttctgctatgcaaaatatacaaaatctcctccagatgccatatggctgtggagaacagaacatggtcctatttgctcctaacatctatgtcttgaactatctgaatgaaacccagcagctgacgcaggagatcaaggccaaggccgttggctatctcatcactggttaccagagacagctgaactacaaacaccaagatggctcctacagcacctttggggaacgatatggcaggaaccagggcaacacttggctcacagcttttgtactgaagactttcgcccaggctcgatcctacatcttcattgatgaagcacacattacccaatctctcacgtggctctcccagatgcagaaggacaatggctgtttcaggagctctgggtcactgctcaacaatgccataaagggaggtgtagaagatgaagcgaccctctccgcctatgttactattgcccttctggaaattcctctcccagtcactaaccctattgttcgcaatgccctgttctgcctggagtcagcctggaatgtagcaaaggaggggacccatgggagccatgtctacaccaaggcattgctggcctatgctttttccctactgggaaagcaaaatcagaatagagaaatactgaactcacttgataaggaagctgtgaaagaagatccagagatggaggaaggactgtgcctggaggtggaggggaagatggtcagtaggacaaagggtgacattgatgactcgcttattggtggagatgccttcactgaagtttcccaaagcgaagacaacctcgtccattgggagcgccctcagagacccaaggcaccagtggggcatctttaccaaacccaggctccctctgctgaggtggagatgacatcctatgtgctcctcgcttatctcacggcccagccagcccccacctcaggggacctgacctctgcaactaacattgtgaagtggatcatgaagcagcagaacgcccaaggtggtttctcctccacccaggacacagtggtggctctccatgccctgtccaggtatggagcagccactttcaccagaactgagaaaactgcacaggtcaccgttcaggattcacagaccttttctacaaatttccaagtagacaacaacaacctcctattactgcagcagatctcattgccagagctccctggagaatatgtcataacagtaactggggaaagatgtgtgtatcttcagacatccatgaaatacaatattcttccagagaaagaggactccccatttgctttaaaagtgcagactgtgccccaaacttgcgatggacacaaagcccacaccagctttcagatctcactgaccatcagttacacaggaaaccgtcctgcttccaatatggtgattgttgatgtaaagatggtatctggttttattcccctgaaaccaacagtaaaaatgcttgaaagatctagctctgtgagccggacagaagtgagcaacaaccatgtcctcatttatgtggaacaggtgacaaatcagacgctaagtttttccttcatggttctgcaagacatcccagtaggagacttgaagccagcaattgttaaagtctatgattactatgagacagatgagtctgtggttgctgagtatatcgccccctgcagcacagatacagagcatggaaatgtttga

SEQ ID NO: 27997 - DNA, 4615 bp, Homo sapiens
  SIMILAR (30)..(4475): 1001254mologous to Homo sapiens pregnancy zone protein,accession number X54380,Smith-Waterman Score=7597.
ggacacaaccctgagatttatccctcacaatgcggaaagacagacttcttcatttatgtcttgtgctacttcttatcctgctttctgccagtgactcaaactctacagaaccgcagtatatggtgctggtcccctccctgctccacactgaggcccctaagaagggctgtgtccttctgagccacctgaatgagacagtgactgtaagtgcttccttggagtctggcagggaaaacaggagcctcttcactgacctggtggcggagaaggacttattccactgtgtctccttcactctcccaaggatctcagcctcttcagaggtggcattccttagcatccagataaaggggcctacgcaagatttcaggaagaggaacacagttctggtactgaacacccaaagtctggtctttgtccagacagacaaacccatgtataaaccaggacagacagtaagattccgtgttgtctccgtggatgaaaattttcgccctcgaaatgaactgattccactgatataccttgagaacccaagaagaaatcgaattgcacaatggcagagtctcaagctagaagctggcatcaatcagttgtcctttcccctctcatcagagcccattcagggctcctacagggtggtggtacagacagaatcaggtggaaggatacagcaccccttcaccgtggaggaatttgtgcttcccaagtttgaggtcaaagttcaggtgccaaagataatcagtatcatggatgaaaaagtgaacataacagtctgtggagaatacacttatgggaagcctgtcccaggacttgcaactgtgagcctgtgtagaaaattatctcgtgttcttaattgtgacaagcaggaggtctgtgaggaattcagtcaacagcttaacagcaatggctgcatcacccaacaagtacacaccaaaatgctccagattacaaatacgggctttgaaatgaagcttagagtggaagccaggatcagagaagaggggacagacctggaagtcactgcaaacaggatcagtgaaatcacaaacattgtatccaaactcaaattcgtgaaagtggattcacactttagacaaggaatccccttttttgcacaggtgcttctggtggatggaaaaggtgtgcccatccccaataaactcttcttcatctctgtgaatgacgccaattattactccaatgcaaccaccaatgagcagggtcttgcacagttttcaatcaatactaccagtatctcggttaataaactttttgtccgggttttcactgtgcatcccaacttgtgttttcactattcatgggtagcagaagaccaccagggcgctcagcacactgcaaatcgtgttttctccttaagtggaagttacattcacctggagcctgtggctggtaccctgccctgtggccacacggagactatcacggcacactatacactgaatagacaggccatgggagagttatcggagctcagtttccattacctgatcatggctaagggagtcatcgtcagatctggaacccacactctgcctgtggagtcaggagacatgaaaggcagttttgccttatccttccctgtggagtcagacgttgcccccattgcacgaatgttcatctttgccattttaccagatggagaagttgttggagactctgaaaaatttgagattgaaaactgtctagccaacaaggtggatttgagcttcagcccagcacaaagtcccccagcctcacatgcccacctgcaagtagcagctgctccgcagtccctctgtgcccttcgtgctgtggaccaaagtgtgctgctcatgaagcctgaggctgagctctctgtgtcctcagtatataatctgctaactgtgaaggatctcaccaattttcctgacaatgtggaccagcaggaggaagaacaaggacactgtccccgtcctttcttcattcataatggagccatctatgttcccttatcaagtaatgaagcagatatttatagcttcctcaaggggatgggattgaaggtgttcactaactcaaaaatccgaaaaccaaagtcgtgttcagtcatcccttccgtgtctgcaggagcagtaggtcaaggatactatggagcaggtctaggagtagtagagagaccatatgttcctcaattaggcacatataatgtgatacccttaaataatgaacaaagttcagggccagtccctgaaacggtgcgaagctattttcctgagacttggatctgggagttggtggcagtgaactcatcaggtgtggctgaggtaggagtaacagtccctgacaccatcaccgagtggaaggcaggggccttctgcctgtctgaagatgctggacttggtatctcttccactgcctctctccgagccttccagcccttctttgtggagctcacaatgccttactctgtgattcgtggagaggtcttcacactcaaggccacggtcctaaactaccttcccaaatgcatccgggtcagtgtgcagctgaaagcctctccagccttcctagcttcccaaaatacaaagggagaagaatcctattgtatctgtggaagtgagagacaaaccttgtcttggacagtgactcctaaaactctggggaatgtgaacttctcagtgagtgcagaggcaatgcagtccttagaactctgtggaaatgaggttgttgaggtccctgagattaaaagaaaagacacagtcatcaaaaccctgttggtggaggctgaaggtattgagcaagaaaagactttcagttccatgacctgtgcctcaggtgctaatgtgtctgagcagttgtccttgaagctcccatcaaatgtggtcaaagaatctgccagagcttctttctcagttctgggtgacatattaggttctgctatgcaaaatatacaaaatctcctccagatgccatatggctgtggagaacagaacatggtcctatttgctcctaacatctatgtcttgaactatctgaatgaaacccagcagctgacgcaggagatcaaggccaaggccgttggctatctcatcactggttaccagagacagctgaactacaaacaccaagatggctcctacagcacctttggggaacgatatggcaggaaccagggcaacacttggctcacagcttttgtactgaagactttcgcccaggctcgatcctacatcttcattgatgaagcacacattacccaatctctcacgtggctctcccagatgcagaaggacaatggctgtttcaggagctctgggtcactgctcaacaatgccataaagggaggtgtagaagatgaagcgaccctctccgcctatgttactattgcccttctggaaattcctctcccagtcactaaccctattgttcgcaatgccctgttctgcctggagtcagcctggaatgtagcaaaggaggggacccatgggagccatgtctacaccaaggcattgctggcctatgctttttccctactgggaaagcaaaatcagaatagagaaatactgaactcacttgataaggaagctgtgaaagaagacaacctcgtccattgggagcgccctcagagacccaaggcaccagtggggcatctttaccaaacccaggctccctctgctgaggtggagatgacatcctatgtgctcctcgcttatctcacggcccagccagcccccacctcaggggacctgacctctgcaactaacattgtgaagtggatcatgaagcagcagaacgcccaaggtggtttctcctccacccaggacacagtggtggctctccatgccctgtccaggtatggagcagccactttcaccagaactgagaaaactgcacaggtcaccgttcaggattcacagaccttttctacaaatttccaagtagacaacaacaacctcctattactgcagcagatctcattgccagagctccctggagaatatgtcataacagtaactggggaaagatgtgtgtatcttcagacatccatgaaatacaatattcttccagagaaagaggactccccatttgctttaaaagtgcagactgtgccccagacttgcgatggacacaaagcccacaccagctttcagatctcactgaccatcagttacacaggaaaccgtcctgcttccaatatggtgattgttgatgtaaagatggtatctggttttattcccctgaaaccaacagtaaaaatgcttgaaagatctagctctgtgagccggacagaagtgagcaacaaccatgtcctcatttatgtggaacaggtgacaaatcagacgctaagtttttccttcatggttctgcaagacatcccagtaggagacttgaagccagcaattgttaaagtctatgattactatgagacagatgagtctgtggttgctgagtatatcgccccctgcagcacagatacagagcatggaaatgtttgaggaccatacaggctgtatattttggtggattctctgtcctatacatttacttagaaggaatggagttatttgtctctataaaatagacactaaaaatatttgctgaataaatatgtacttctggtcaaactaaaaaa

SEQ ID NO: 27998 - DNA, 855 bp, Homo sapiens
  SIMILAR (259)..(498): 911254mologous to Homo sapiens Human secreted protein, SEQ ID NO: 6075,accession number G01994,Smith-Waterman Score=384.
tttcgtcccaaatcccgcctttccccctacctgctttcacccctgctgccttagtccctggatctggggctcactggcaggcagagtcctgccctccggaagttggtgtggggccctcctgggtctggtcctgttcgaccccctctgaggcccacctggaggagcggcagttgagtttctatgctaattgttccaataataggagccgccttttactgcggagtctttgtgtgccaggcgctgtgcttaggctagtatgatgtagtggcctatgttgaagtgtggtcatccaatggaacagaaaattattcaaagacatttacaacacagcttgtggatatgggggcaaaggtttcaaaaacttttaacaaacaagtaactcacgttatcttcaaagatggctaccagagcacttgggacaaagctcagaagagaggcgtaaagctcgtttcggtgctctgggtggaaaagtgtactgtggaaagtgctggagtgaatcggctctctggggagaataagctcatcacagcacggcttcccgaggagaacgttgctgctttgatttctgttggctctgaggcagcagcagaggcagctcctttcacacttgtggctgcttctgcagataagctgttcggtgacctccatatttctaaatactgtggccgtattgctgtttcggtttttcagtttcagtccccaactgcctttgctgaatctttagcgtctcctgccacagttattgcagtattccctgactggcctcctcctcctggaccagtgatctgcccacgacccctccctcacacctgtccccatgccccagacccacaggacagggtccaagctcattag

SEQ ID NO: 27999 - DNA, 405 bp, Homo sapiens
  SIMILAR (309)..(1): 621254mologous to Homo sapiens BCL-6 corepressor,accession number AF317391,Smith-Waterman Score=323.
tgagcttttgtgtttcctttccagttggaggatggggctgtgcatcacatccatagctacctggtcggcagctggctcacctacaggctgcctttccattaaatacttctctacaggaagatcttcatcctttagggctttaaaggaattgtgctgtttgtttccaggactatgcttgcatctctcacagttattctggctggcaatatcctcctccagaagacattttggctttttgtcctgatttcctttccacctctctgagtcagctgtgctgaatttgtatggcttggcgtccttggtttttggtcctcgtagagtaggaggattcccaaagcgatcttctaccacccgagcccgaaagctaagtgtcagaattgcctacaaatccgaccgtccacgaaa

SEQ ID NO: 28000 - DNA, 912 bp, Homo sapiens
  SIMILAR (642)..(788): 381254mologous to Human herpesvirus 4 Epstein-Barr nuclear antigen,accession number X53316,Smith-Waterman Score=82.
atgaggacttctgtgaaagaaaactgcttagaagagagccttgagattaacgacagacgaggttcactccaaactcaccactctgatgtttctagttcttgttctgatcctgatcccagagataaccaaatccaagaagcatacgggactcctgacaaatttattgcaaaaggatcaccaaggaatttagtcttaaggatatttaaatccaacaacagaactacacacactgcaacacatggaattgcctccaaagagcatcaagcagattcaaaccagactagagatacagctacagatcaaaccttaatggcagttcaaaacaagtcccatacgggtcagcttcaccagagacatcataagcaaaagaatgctgccatttcttatagatttctgtgcagtttatcagccctctcccagaattttctccttgggttaaaaagaaagcatgattcctatagcccatttcctcaactagaaatcaagtttgttcaaacctctaggactgattgctacactcggcaaaagcaggagctgatctaccctggacacgttgaggttttggcaatgtgcgaaatggctccgctgtgcgacccagcagttagcggcaggagggacagagggatgatgtcaactcgttttgccagccgagcacgccgtcgtggcccggcagccctggtctgcgggccagccctccgcaaagtaggaggattcccaaagcgatcttctaccaaccgagcccgggagctcggtgtcagaattgcctacaaatccgaccgtccagtcctacccgcggcgcgcatgcaaagtgcaccgcaagttcgcgctctctcggaagtgtctatagcttccggaagggggaaggagagggagcaaggcagaaggaggctgcctaaaaaaaataaaaagtaa

SEQ ID NO: 28001 - DNA, 393 bp, Homo sapiens
  SIMILAR (4)..(366): 891254mologous to Homo sapiens density regulated protein drp1,accession number AF038554,Smith-Waterman Score=587.
  misc_feature (1)...(393): n = a,t,c or g
tttcgtcgagttgcatgtgttggttcagctggcgatagcggcgggagcggagccggcggggcctgtgcgaccgcctgggtttgtgaaatggctgctgacatttctgaatccagcggggctgactgcaaaggagacccaaggaacagtgccaagttagatgccgattacccacttcgagtcctttattgtggagagtactgtgaatatatgcctgatgttgctaaatgtagacaatggttagagaagaattttccaaatgaatttgcaaaacttactgtagaaaattcacccaaacaagaagctggaattagtgagggtcaaggaacagcaggggaagaagaggagaagaaaaaacagaagagaggtaagacctaaattcacatcttgatttgn

SEQ ID NO: 28002 - DNA, 2482 bp, Homo sapiens
  SIMILAR (1)..(663): 961254mologous to Homo sapiens density regulated protein drp1,accession number AF038554,Smith-Waterman Score=1112.
ttgtctcgcgggagcgctgctggcggtcgggcgctcgggcggccctggggcgcgagacgagttgcatgtgttggttcagctggcgatagcggcgggagcggagccggcggggcctgtgcgaccgcctgggtttgtgaaatggctgctgacatttctgaatccagcggggctgactgcaaaggagacccaaggaacagtgccaagttagatgccgattacccacttcgagtcctttattgtggagtctgttcattaccaacagagtactgtgaatatatgcctgatgttgctaaatgtagacaatggttagagaagaattttccaaatgaatttgcaaaacttactgtagaaaattcacccaaacaagaagctggaattagtgagggtcaaggaacagcaggggaagaagaggagaagaaaaaacagaagagaggtggaaggggtcaaataaaacaaaaaaagaagaccgtaccacaaaaggttactatagccaaaattcccagagcaaagaagaaatatgtgacaagagtatgtggccttgcaacttttgaaattgatcttaaagaagcacaaagattttttgctcaaaaattctcctgtggtgcctcagtaacaggggaggatgaaattatcattcagggagattttacagatgccataatttgatgtcattcaggaaaaatggccagaggtaggatgatgacagcccctcgaagatcttgggaggaagtaaagaagtgaatttgaaaatttgtctgtatttaatggcctgaactgagagttgatatggccaaagggagagaggccttttaaaatatatatatatatacacatatatatgtatatatacacatatatgtatgtatacacatatacacatgtatatatacatgtgtgtatgtatacatgtatatacatatatacatacacatatatgtatacatatatacacatatatgtatacatatatacacatatatgtatacatatatacacatatatgtatacatatatacacatatatgtatacatatatatatattctacagtaaaactgtagactgtcctcgtccttggcattttcactgttctgtacaaggctgcttgtttttttattgccaaagtcaaataaacgggagactgtcatgctcatgcatgaatagaatttagtcaaataaaaaattttggtcatttggtactgactttctctctctctctctctctctttttttttttgacagagtctcgcactgttgcctgggctggaatgcagtggtgcgatctcggctcactgcaacctccgctcccgggttcaagtgattctcctgcctcagcctcccaagtaggtgggattacaggcgcccgcaccacgcccagctaatttttgtatttttagtagagatggggtttcactatgttggccaggctggtctcgaactcctgacctcgtgattggcccacctcagcctcccaaagtgtggtattacagatgtgagccaccgcacccagcctgagtttctctttctctctttttaactttattttttgaaaaacccggtagactttgtggggagcatttttgttgataattttactgatctaaagctgagtgattttttaaaagaatttgaatttggcttcctcaccagtaatatgtctccttgcttctttgatgtgatagttttgagatgggtgagaatctaatagatctgtggttgaatttgctgtgttgttatgaagtccaccctgtgggcacaataacataactgttggtaggagttgtttgagctattctggagattatttggtaaagtatactaaaagccttaaaaccatgtatgtgcgctgtttgaaccagtaagccacttctttgacattagaagacattagaagaaataatcagccttgcataaaacttatggatgaaagtattcatcacaatattatttataataaaaaattgcaaatgttataaatgaacaattgggaaatggttaaagaagtgatggtgcattgtgtggtagaatatatgcatatgtttaaagaatcatattttctaagattatttggaagcatgtttggtaatgtcaagtggagtaccccagatacattttagacatttatcgtcatcatctgctctgagtggaaggccgttcagagaggctagaggttcttattctggctataaattatgtgagtaaaattgtgctaaccagttaaaagtactgtacacccatgctcaatatatagtcctggaaatagcaattgaaacatgtcttctcacaagagaaaatgacagttttaatgatgtatttgatgaatttaaactttaagtcaggtgctgcaaattggaaagaagacttgtggtgttttaagttgctgtggacacttttaagaaacttagaacccatggaacccttgtttatcgccatgcaaattacaatcttgaatgagtgttttttaaaaataaagtattagaaaa

SEQ ID NO: 28003 - DNA, 2299 bp, Homo sapiens
  SIMILAR (812)..(1969): 991254mologous to Homo sapiens testis-specific protein TSP- NY,accession number AY009105,Smith-Waterman Score=2025.
ggctggcgtcacgtgtcccccccgcggggggcgcccttgagggcggcgcttccggtcggcggagcctggtggccgcagcggcggtggcgacgacggccgagacgtggggatggcgggcgccgggagcgaagcccggttcgccggtctgtcgctggtgcagctcaacgagctgctggaggacgagggccagctgacggagatggtgcagaagatggaggagatttgcagtgtgtgctccctttctctcaacccatttggactcattctcggaaagtctgatcttttgggtctggttctcctccaggcaggcgcgctgatggcgtttttgaggtgacgccgcccacaccgggcttctccgggggcggaggaaacacctatgaaccctccggcagccttccttgccgggcgccagaacatcgggtcagaagttgagatttccactatcgagaaacaacggaaggagctgcagttgctcattggagaattaaaagatcgagataaagagctcaatgacatggttgcagtgcaccagcaacagcttctttcatgggaagaggatcggcagaaagtgttgacactggaagaacgttgcagcaaattagaaggtgaactacataaaagaactgaaataatcaggtcactcacgaagaaggctagaaacgaaactctcagcaacacgttagtggaactttctgcccaggtaggacagctacaagctcgagaacaagctcttacgacaatgataaagctaaaggacaaagatattattgaggcagttaatcacattgcagattgttcgggtaaatttaaaatgctagagcatgccctacgtgatgccaagatggcggagacttgtattgtgaaagaaaagcaagattataagcagaaattgaaggcacttaagattgaagtcaacaaactaaaagaggacctcaatgaaaagacgacagaaaataatgagcaacgagaagagatcattcgcctcaagcaagagaaaagttgcctgcacgatgaattgctttttactgtagagagagaaaagaggaaagatgaattgcttaatattgcgaagtcaaagcaagaacgcacaaattcagaactgcacaatctgagacagatttatgtaaaacaacagagtgatctgcagtttcttaatttcaatgtggaaaattctcaggaattaatacagatgtatgactcaaagatggaggaatcaaaggctctggactccagcagagacatgtgtttatcagaccttgaaaataaccacccaaaagtcgatattaagagggaaaaaaatcagaagtcactgtttaaggaccagaaatttgaagccatgttggttcagcaaaataggtcagacaagagctcttgcgatgaatgcaaagagaagaaacaacagatcgatactgtgtttggggagaaaagtgtaattacgctgtcatccatattcaccaaagacttagtagagaaacacaacctcccttggtctctgggaggaaaaacccagattgaacccgaaaacaaaattacattgtgcaagatccacacaaaatcaccaaaatgtcatggcactggggttcagaacgaaggaaaacaaccctcagaaacacccactttatctgatgagaagcagtggcatgatgtcagtgtttacctgggcctgaccaactgtccaagttcaaaacatccagaaaagctggatgtagaatgtcaagatcagatggaaaggtccgaaatctcatgctgccagaaaaatgaagcctgtctgggcgaaagtggcatgtgtgactccaagtgctgccacccgagtaacttcataattgaagccccaggccacatgtctgacgtggagtggatgagtattttcaagccttccaaaatgcagagaattgtccgcctcaaatctgggtgcacctgttcagaaagcatctgtggcacacaacatgactccccggcaagaaacttgaattgtttaaaagtcatgcagatagtcattctgccagttgcaaattattttaaaaagtcggtcatcacgctaaatgtcatctattcatatttggtctttaaagatctttggataattgcaaaaaattcacccaaacaagaagctggaattagtgagggtcaaggaacagcaggggaagaagaggagaagaaaaaacagaagagagtaacaggggaggatgaaattatcattcagggagattttacagatgacataattgatgtcattcaggaaaaatggccagaggtagatgatgacagcatcgaagatcttggagaagtaaagaagtga

SEQ ID NO: 28004 - DNA, 463 bp, Homo sapiens
  SIMILAR (318)..(461): 661254mologous to Homo sapiens Partial seqeunce of the clone 9 protein,accession number W42400,Smith-Waterman Score=124.
atgatgatgatcatattgatgatggtggtggtggtgggtggagaagtcaaccctgacaaaaagaagggcaaccagaatgtccaaatctggacacaccctctcctcacctacacctgctcatcctctgcaccacggaacagtaccaccatcgagcaagccagaaacagagcctgcatcagcttatggtccgttctctccaacagagaccgcaggatgtgccgaggcagggaacagtcctcagccctggctgaacaaaagatgcccccctcggaagcctggagaacgggacaggaccagaggaccacgttctcccagatcctggacttcggtacagtgtggaagccagctctccaggccacggaagtcctctgagcagcctgttaccttctgcctcagtgccagagtccatgacaattagtgaactgcgccaggccactgtggccatgatgaacaggaaggatga

SEQ ID NO: 28005 - DNA, 684 bp, Homo sapiens
  SIMILAR (334)..(681): 931254mologous to Homo sapiens RNA polymerase II elongation factor-like protein,accession number Z47087,Smith-Waterman Score= 583.
atggagccctggggcctgcaaggcagcaactgctcccagctgtgccggactgcgccaggctggtcagataaggagcatgagccagaggaggaagtggaaaggaagcgggccgggcaaaaggagacaatcccagtgtccaagggcctagaaatagtctgttttgtgggagtaaaggccaccagggactgtgaaagtggccaccggacatgtgagaaatccttcgtgtctgacgatgggttcttatcgagggcaaatgaccacaaactcatccttgctccccagtgtgctctctttgctcattctgtgaacacccaggttttcctggcaaaggagcctttggtggtggatgtcttcatggcacatgtcattcagtggtgcacccaccacaaggatgaccctcctcctcctgaagatgatgagaacaaagaaaagcgaacagatgatatccctgtttgggaccaagaattcctgaaagttgaccaaggaacactttttgaactcattctggctgcaaactacttagacatcaaaggtttgcttgatgttacatgcaagactgttgccaatatgatcaaggggaaaactcctgaggagattcgcaagaccttcaatatcaaaaatgactttactgaagaggaggaagcccaggtacgcaaagagaaccagtggtgtgaagagaagtga

SEQ ID NO: 28006 - DNA, 1671 bp, Homo sapiens
  SIMILAR (199)..(651): 941254mologous to Homo sapiens Human Tcf-1B protein,accession number W76822,Smith-Waterman Score=747.
atggaggatggggcaagagccgcaacagcgccgcggagttccaacgctgccggttccctggggtacgagcacagcctcaagcagcctcaagccctaggaagcccccagttcaaagcacagggcgcattggagcctgggcacgatacagttcacaccacggctgcgatgcgccccgcgctccggcgggcggagcgcaccatgccgcagctggactccggcgggggcggcgcgggcggcggcgacgacctcggcgcgccggacgagctggtggccttccaggatgaaggcgaggagcaggacgacaagagccgcgacagcgccgccggtcccgagcgcgacctggccgagctcaagtcgtcgctcgtgaacgagtccgagggcgcggccggcggcgcagggatcccgggggtcccggggacaggcgccggggccccaggcgagacagaggctctcgggcgggaacacgctgcgcagagactcttcccggacaaacttccagagcccctggaggacggcctgaaggccccggagtgcaccagcggcatgtacaaagagaccgtctactccgccttcaatctgctcatgcattacccacccccctcgggagcagggcagcacccccagccgcagcccccgctgcaaaagccaaacatgtccaagtatcggacctggaccgagatgataaaatccgtgtgcgtcctccacggagccaaagactccaatggtttgatggaggcagaggaactgcatggttgggaaggggatggagacctcctcatgcccacaaggcggcaatgtctacaaggtaccactgacaccttgccactggctaaggacatctgcattgtcttttccaactgggatgaaatcacagtcacctctctccctgcaattcctggctgtgtccacaacagtatcagactatggaagaaggaggcaatttctctgacccactgggatgggggcatcttcaaggcttctttggccctgggtatcaaaggtctgctgagagaggaggtggaaggcagcctttctgctgacaactggaccttggttctaatctcactccccttcccccacacaccagagaagaatcctacagcatctggcagctcttcttcccaggccaagctctcaccactggccaatcagagaagaaagcagtgggctcaggcccctttatctgatgtcaaggccaggcggtgggtggactggccacacgcacctagcagagctctgtgcaactgtggcaacagccttgtgccagcaggtgagaagcaggcaacttctgagctgagcaaaatcaattcacaaaagtacatgcagcatcagaccgcagcggtctgctcgcaggctgtgtgcacgctgacagcccttgccaccgccagcagagaaactccctcgcctctgacggttgactctgaaaacccccaaatgcttgagccccacaacactttcccagcgaagaaagttgctgtttcctctggcctcaagcctgtggggggtccctcaagcagagggctgctcctgaagcctggtctggagctgggagaggccttggggaaaagcccatggaaggaagggcagatctccaccttgagccttgtgctacctccagagcagaggctgaccagacagaacgagaagctccaatgtgactccaaagaatag

SEQ ID NO: 28007 - DNA, 1590 bp, Homo sapiens
  SIMILAR (445)..(846): 591254mologous to Homo sapiens Human Tcf-1E protein,accession number W76823,Smith-Waterman Score=351.
atgcgcccagacccagctgaggagcccactggtcaacttttctcagtggctaccacaggactccatggaaaacccaaagccgcagactacagaatctctgagcaccaggaggggctgcctccaagcttcggctggtcctcaaccacacatgcgcctcttccagtcactaccaccgaagacactacaccacgggaaattccatcaaaggcgaagtggacttcagtgcttcaggagcatcttcctggactcctccgtcttgctcatgactgggtcccctgggcagagccaggtcctggcagagagcagatatccagtaaatacctcttggccctaagaatgactgggaacactcatgtagcgagaacaccttcctgtgtgttatctcatctcatcctcacagcagcccagagagcaggcctgaggggcccccagggtggacctagctcagagggcagcatctcgggcagagggcacccttataaactggagattcttgttcctgttctaagcggagctttggtgcctctcgccctgcacgctctcgggcgggaacacgctgcgcagagactcttcccggacaaacttccagagcccctggaggacggcctgaaggccccggagtgcaccagcggcatgtacaaagagaccgtctactccgccttcaatctgctcatgcattacccacccccctcgggagcagggcagcacccccagccgcagcccccgctggctctaccaggttccaccaagccagtttccacggcagcacacgggaatattcataccagcactgccacctcctcagctactctgagactcaaccatacagtcacacccctcacaccttgtgactggtgcttcctgctgctgtgtacaaacaaggctctggtggaggaaacaggtgttttatcaggtcacaggggcccccacccccaatggtacagtgcacagatcctcctgctgcaggcccctttatctgatgtcaaggccaggcggtgggtggactggccacacgcacctagcagagctctgtgcaactgtggcaacagccttgtgccagcaggcttgaggccagaggaaacagcaactttcttcgctgggaaagtgttgtggggctcaagcatttgggggttttcagagtcaaccgtcagaggcgagggagtttctctgctggcggtggcaagggctgtcagcgtgcacacagcctgcgagcagaccgctgcggtctacagggaaaatgccgactgtgtttatttttcacctgagcctgcaggaagttgggggctgtgccggactgcgccaggctggtcagataaggagcatgagccagaggaggaagtggaaaggaagcgggtgactcaaccctctgggagggcccctcaggagtttgatatggaagaaactctgtcgtcgttccgctacctgggctggaccctgatgggaagacagacaaggcagggcagatatccatcaggcactccctctgactgcccaggtacactgaatcaaaaaggaaaacagaaaaaacagaacaagaaacaccccaatgggttgcagcttatggatggtgcctgcagcattgtgagctga

SEQ ID NO: 28008 - DNA, 687 bp, Homo sapiens
  SIMILAR (441)..(295): 1001254mologous to Homo sapiens RNA-binding protein regulatory subunit,accession number AF021819,Smith-Waterman Score= 259.
  misc_feature (1)...(687): n = a,t,c or g
gccctgtttattctgcaaacaaggcttaaaaatgtatagacacaatttgtaggctgagaaatctctgtgtagttgggacttccatacttccgcaaaagtagtaaggacagcgacttctgaacacattaacctaccactgttttgtttagagcgaacacagggagaatggattcctaacggcctgtttctttaagggatcggcgcagttcgctgctctagtctttaagaacaagtggagccttcacttgagccgccacctccttgccattcagggcttcaacaattgcaagcgcaaactcgattctcagagtaggtgtaatgacctccattcatcattttgtctttagcaagagggtgtgttgtaactttacttccaaaacctatttcatgagccaacagagcagtaggacctgcacagatggcggctatcaggcccttccgttttcctgctcctcagtatctccttcacagcagcagactcagataaaatctgtgcgcccagattaccttctggtagaaccaccacatcatatgggtccctctttttttgcatcttcaggcctgcatcangaccaatgaccacatcacnggctacacttgtactgggtcttttcagccaggccctggaacggtgaccttaatnccagctcggctcatgacatctaacacgaatgaccgctccatttc

SEQ ID NO: 28009 - DNA, 507 bp, Homo sapiens
  SIMILAR (119)..(292): 411254mologous to Hylomys suillus dorsalis cytochrome b,accession number AF298572,Smith-Waterman Score=72.
atgcccatttccatctacacgaactcattctttctgaatcataaatgccacaccctcagttgcacataaaactttgccatattatgtatacatcagtgtgtacgaagacaagttgtggcttagaagcagtccatttacagtttctggaactgtttctcgtctcacttctccataactgattctaggtctgaaaggtttccttctaaaatctgatagcctgattttgaggatatgttttcaatgccttttctggttgcaaatcctgatgttggcaggtctttttcctgtaagcatgaagaccacccaagacaaggtacactgtgctgttaatcaaagtggcacagaacaactatgtgacaggtcatagccaggagtgtaatgtaacatggatatggagggccacaaagagtcccatagccctcctgcaacacatctgaaaatctcctgaaattcagaataaacccattactgaaaaacaaaagtgtttattggcataccagacggttt

SEQ ID NO: 28010 - DNA, 1543 bp, Homo sapiens
  SIMILAR (764)..(1327): 691254mologous to Plasmodium lophurae histidine-rich protein,accession number X01469,Smith-Waterman Score=996.
tttcgttgagaggtacccaacgggccggggcgccgcgtccgcaggaagaggcgcggtgtgcaggcttgtaaacatataacataaaaatggcttccaaaagagctctggtcatcctggctaaaggagcagaggaaatggagacggtcatccctgtagatgtcatgaggcgagctgggattaagggcaccgttgcaggcctggctggaaaagacccagtacagtgtagccgtgatgtggtcatttgtcctgatgccagccttgaagatgcaaaaaaagagggaccatatgatgtggtggttctaccaggaggtaatctgggcgcacagaatttatctgagtctgctgctgtgaaggagatactgaaggagcaggaaaaccggaagggcctgatagccgccatctgtgcaggtgacgtgcaggggcagcctgtgttgcagcgtcattggtgggtggggtagcctttcattcgatggtttgacaaaatgatgaatggaggtaagtatatgcttgtttttgtttgtttgtttgttttttgagatggagtctcgctccatcgcccaggcaccagcttcgagtttgcgcttgcaattgttgaagccctgaatggcaaggaggtggcggctcaagtgaaggctccacttgttcttaaagactagagcagcgaactgcgacgatcacttagagaaacaggccgccaggtgagctcagtcagtccacgagactccatccgagggtctcatagctgctggagtggccaagaggatatcatcaacatccccactgttgtcaccaccaccaccatcactatcaccatcattaccatcaccatcaccatcatcaccatcactaccaccgtcatcaccatcaccctcaccaccctcaccatcaccctcaccactatcaccacactcaccaccaccaccatcaccaccatcattaccaccagcatcaccctcaccaccatcaccatcaccaccaccatcaccttcaccaccaccaccaccatcaccaccagcatcaccctcaccatcaccctcaccaccaccatcaccacactcaccaccaccatcaccatcaccaccagcatcaccctcaccaccaccatcaccatcaccaccaccatcaccttcaccaccaccaccatcaccaccagcatcaccttcaccatcaccctcaccaccaccatcaccactaccaacaccatcaccctcaccactaccatcatcaccatcaccaccaccatcaccatcaccctcaccaccaccatcaccatcagcatcaccaccaccaccaccaccgtcaccatcattatcaccaccatcatcatctttttcacttcttgcagcttgcaggttcccaaacaagtcccggaccagctgatcagatgggatctccccacagggctgcatacctgctgggcctatcaaattttagaaggaaacctttcagacctagaatcagttatggagaagtgagatgataaacagttccagaaactgtaaatggactgcttctaagccacaacttgtcttcgtacacactg

SEQ ID NO: 28011 - DNA, 649 bp, Homo sapiens
  SIMILAR (77)..(175): 631254mologous to Homo sapiens RNA-binding protein regulatory subunit,accession number AF021819,Smith-Waterman Score=87.
  misc_feature (1)...(649): n = a,t,c or g
ctagggatccccccgggcctgcaggaattcgggcacgaacggaaaggnccctgatagccgcccatctgtgcaggcccctactgccctgtggccccatgaaataggtttgggaagtaaagtnacaacacacccctcttgcctaaagacaaaatgatgaaatgggaggtcattaacacccctacctctgagaatccgtgtggaaaaaagacggccctgaattccttaacaaagccggggggcctgggacccagcttccgaagtttgccgccttgccaattgttgaaagcccctgaatggccaaggaggtggcaggctcaaagtgaaggctcccacttgttccttaaagactagaagcagcgaactgccgacgatcacttagagaaacaggcccgttaggaattccattctcactgtgttcgcctctaaacaaaacaattggtaggttaatgtgttcagaagtcgctgtccttactacttttggcggaagtatggaagtcacaactaaacgagagaattcatcaactaccgaatgagggtatacattactgaaccttggatgcagaatagacagggccctttaacaaactactgattgtttcttgttttgtctctcatttcttttgtgaaattaaattccgtatcaccttca

SEQ ID NO: 28012 - DNA, 390 bp, Homo sapiens; identical to SEQ ID NO: 21647
  SIMILAR (2)..(352): 951254mologous to Homo sapiens transformation upregulated nuclear protein,accession number X72727,Smith-Waterman Score=590.

SEQ ID NO: 28013 - DNA, 428 bp, Homo sapiens
  SIMILAR (238)..(426): 1001254mologous to Homo sapiens transformation upregulated nuclear protein,accession number X72727,Smith-Waterman Score=334.
gaccatcattacgcctagcttggcacgaggcggcacgaggtacgcattctgcttcagagcaagaatgctggggcagtgattggaaaaggaggcaagaatattaaggctctccgtacagactacaatgccagtgtttcagtcccagacagcagtggccccgagcgcatattgagtatcagtgctgatattgaaacaattggagaaattctgaagaaaatcatccctaccttggaagagtaccaacactataaaggaagtgactttgactgcgagttgaggctgttgattcatcagagtctagcaggaggaattattggggtcaaaggtgctaaaatcaaagaacttcgagagaacactcaaaccaccatcaagcttttccaggaatgctgtcctcattccactgacagagttgttcttattggaggaaa

SEQ ID NO: 28014 - DNA, 2118 bp, Homo sapiens; identical to SEQ ID NO: 24939
  SIMILAR (1)..(660): 971254mologous to synthetic construct aceB,accession number A31765,Smith-Waterman Score=1140.

SEQ ID NO: 28015 - DNA, 1827 bp, Homo sapiens; identical to SEQ ID NO: 21651
  SIMILAR (1012)..(1824): 881254mologous to Rattus norvegicus dC-stretch binding protein (CSBP),accession number D17711,Smith-Waterman Score=1292.

SEQ ID NO: 28016 - DNA, 2360 bp, Homo sapiens
  SIMILAR (156)..(1550): 931254mologous to Rattus norvegicus dC-stretch binding protein (CSBP),accession number D17711,Smith-Waterman Score=2242.
tttcgtggctgaggcggcgcggcagcggatggacggcagtctcgcacggctactgcagcactggggtgtcagttgttggtccgacccagaacgcttcagttgtgctctgcaaggatatataataactgattggtgtgcccgtttaataaaagaatatggaaactgaacagccagaagaaaccttccctaacactgaaaccaatggtgaatttggtaaacgccctgcagaagatatggaagaggaacaagcatttaaaagatctagaaacactgatgagatggttgaattacgcattctgcttcagagcaagaatgctggggcagtgattggaaaaggaggcaagaatattaaggctctccgtacagactacaatgccagtgtttcagtcccagacagcagtggccccgagcgcatattgagtatcagtgctgatattgaaacaattggagaaattctgaagaaaatcatccctaccttggaagagggcctgcagttgccatcacccactgcaaccagccagctcccgctcgaatctgatgctgtggaatgcttaaattaccaacactataaaggaagtgactttgactgcgagttgaggctgttgattcatcagagtctagcaggaggaattattggggtcaaaggtgctaaaatcaaagaacttcgagagaacactcaaaccaccatcaagcttttccaggaatgctgtcctcattccactgacagagttgttcttattggaggaaaacccgataggtttgttagagtgcataaagatcatccttgatcttatatctgagtctcccatcaaaggacggtgcacagccttatgatcccaatttttacggatggaaacctatggattatgggtggttttacaatgatgtttgatgaccgtcgcggacgcccagtgggatttcccatgcggggaagaggtggttttgacagaatgcctcctggtcggggtgggcgtcccatgcctccatctagaagagattatgatgatatgagccctcgtcgaggaccacctccccctcctcccggacgaggcggccggagtggtagcagagctcggaatcttcctcttcctccaccaccaccacctagagggggagacctcatggcctatgacagaagagggagacctggagaccgttacgacggcatggttggtttcagtgctgatgaaacttgggactctgcaatagatacatggagcccatcagaatggcagatggcttatgaaccacagggtggctccggatatgattattcctatgcagggggtcgtggctcatatggtgatcttggtggacctattattactacacaagtaactattcccaaagatttggctggatctattattggcaaaggtggtcagcggattaaacaaatccgtcatgagtcgggagcttcgatcaaaattgatgagcctttagaaggatccgaagatcggatcattaccattacaggaacacaggaccagatacagaatgcacagtatttgctgcagaacagtgtgaagcagtattctggaaagtttttctaagactagtgaagaactgaaggagtccctgcatcttttttttttttatctgcttctgtttaaaaagccaacattcctctgcttcataggtgttctgcatttgaggtgtagtgaaatctttgctgttcaccagatgtaatgttttacgttccttacaaacagggttgggggggggaagggcgtgcaaaaactaacattgaaattttgaaacagcagcagagtgagtggattttatttttcgttattgttggtggtttaaaaaattccccccatgtaattattgtgaacaccttgctttgtggtcactgtaacatttggggggtgggacagggaggaaaagtaacaatagtccacatgtccctggcatctgttcagagcagtgtgcagaatgtaatgctcttttgtaagaaacgttttatgatttttaaaataaatttagtgaacctatttttggtggtcattttttttttaagacagtcattttaaaatggtggctgaatttcccaacccacccccaaactaaacactaagtttaattttcagctcctctgttggacatataagtgcatctcttgttggacataggcaaaataacttggcaaacttagttctggtgatttcttgatggtttggaagtctattgctgggaagaaattccatcatacatattcatgcttataataagctggggattttttgtttgtttttgcaaatgcttgcccctacttttcaacaattttctatgttagttgtgaagaactaaggtggggagcagtactacaagttgagtaatggtatgagtatatacca

SEQ ID NO: 28017 - DNA, 2866 bp, Homo sapiens
  SIMILAR (227)..(1126): 991254mologous to Homo sapiens heterogeneous nuclear ribonucleoprotein K,accession number BC000355,Smith-Waterman Score= 1582.
gtgaacgagaaaggaggagggcgctccaggcgacagcattgcagacgccattatcctctgtttctctgctgcaccgacctcgacgtcttgcctgtgtcccacttgttcgcggcctataggctactgcagcactggggtgtcagttgttggtccgacccagaacgcttcagttgtgctctgcaaggatatataataactgattggtgtgcccgtttaataaaagaatatggaaactgaacagccagaagaaaccttccctaacactgaaaccaatggtgaatttggtaaacgccctgcagaagatatggaagaggaacaagcatttaaaagatctagaaacactgatgagatggttgaattacgcattctgcttcagagcaagaatgctggggcagtgattggaaaaggaggcaagaatattaaggctctccgtacagactacaatgccagtgtttcagtcccagacagcagtggccccgagcgcatattgagtatcagtgctgatattgaaacaattggagaaattctgaagaaaatcatccctaccttggaagagggcctgcagttgccatcacccactgcaaccagccagctcccgctcgaatctgatgctgtggaatgcttaaattaccaacactataaaggaagtgactttgactgcgagttgaggctgttgattcatcagagtctagcaggaggaattattggggtcaaaggtgctaaaattaaagaacttcgagagaacactcaaaccaccatcaagcttttccaggaatgctgtcctcattccactgacagagttgttcttattggaggaaaacccgatagggttgtagagtgcataaagatcatccttgatcttatatctgagtctcccatcaaaggacgtgcacagccttatgatcccaatttttacgatgaaacctatgattatggtggttttacaatgatgtttgatgaccgtcgcggacgcccagtgggatttcccatgcggggaagaggtggttttgacagaatgcctcctggtcggggtgggcgtcccatgcctccatctagaagagattatgatgatatgagccctcgtcgaggaccacctccccctcctcccggacgaggcggaccggggtggtagcagagctcggaatcttcctcttcctccaccaccaccacctagagggggagacctcatggcctatgacagaagagggagacctggagaccgttacgacggcatggttggtttcagtgctgatgaaacttgggactctgcaatagatacatggagcccattcagaatggcagatggcttatgaaccacagggtgggctccggcatatgattattcctatgacaggggggtcgtggctcatatggtgatcttggtggacctattattactacacaagtaactattcccaaagatttggctgggatctatttattggcaaaggtggtcagcgggattaaacaaatccgtcatgagtcggggagctttcgatcaaaattgatgagcctttaggaaggatccgaagatcggatcattaccattacagggaacacaggaccagatacaggaatgcacagtatttgctgcaggaacagtgtgaagcagtatgcagatgttgaaggattctaatgcaagatattttttcttttttatagtgttgaagcagtattctggaaagtttttctaagactagtgaagaactgaaggaattctggcatcttttttttttttatctgcttttgtttaaaaaaccaacattcctttgcttcataggtgttttgcatttgaggggtagtgaaatttttgctgttccccaaatgtaatgttttagttccttacaaacagggttgggggggggaagggggtgcaaaaactaacattcaaattttgaaacagcagcagagtgagtggattttatttttcgttattgtggtggtttaaaaaattccccccatgtaattattgtgaacaccttgctttgtggtcactgtaacatttggggggtgggccagggaggaaaagtaacaatagtccacatgtccctggcatctgttcagagcagtgtgcagaatgtaatgctcttttgtaagaaacgttttatgatttttaaaataaatttagtgaacctatttttggtggtcattttttttttaagacagtcattttaaaatggtggctgaatttcccaacccacccccaaactaaacactaagtttaattttcagctcctctgttggacatataagtgcatctcttgttggacataggcaaaataacttggcaaacttagttctggtgatttcttgatggtttggaagtctattgctgggaagaaattccatcatacatattcatgcttataataagctggggattttttgtttgtttttgcaaatgcttgcccctacttttcaacaattttctatgttagttgtgaagaactaaggtggggagcagtactacaagttgagtaatggtatgagtatataccagaattctgattggcagcaagtttattaatcagaataacacttggttatggaagtgactaatgctgaaaaaattgattatttttattagataatttctcacctatagacttaaactgtcaatttgctctagtgtcttattagttaaactttgtaaaatatatatatacttgtttttccattgtatgcaaattgaaagaaaaagatgtaccatttctctgttgtatgttggattatgtaggaatgtttgtgtacaattcaaaaaaaaaaaagatgaaaaaagttcctgtggatgttttgtgtagtatcttggcatttgtattgatagttaaaattcacttccaaataaataaaacacccatgatgctag

SEQ ID NO: 28018 - DNA, 988 bp, Homo sapiens
  SIMILAR (866)..(988): 681254mologous to Homo sapiens Human secreted protein, SEQ ID NO: 7420,accession number G03339,Smith-Waterman Score=128.
ttcttttaagtttgatttaatttaacagttccaaaatccctgttttccaggtaaagaaactgaggccagcagcaagggcaggtctagcatccaggttccctcttaagtacctctgattctgaagcggaacctgcttacagaacatcacgggcggcttcagggtctatataagaaaaacagatgcccaagcgggaaggagactaggaggccgtgttgagaaaaccagacccagccactggccttgaagtccggatggaagcttggcgcttgcctcgcctcgtcttccttccgccctggtgctgagcggctagtccagagccggcaggatctgcgcttccggtttccgggttctccgggtgtagccgcctctgccccgggggatcccctctcctccagcaggccggggaggcctacgtgggcggcttcgttgcagccagcttgccgttgtcacggaaatctcctccggcgtctccagggaccacagcgggagaggaaatagccaccaacgagatagcgggggtgtgctcctcctgaattccatttcgatgcaggcaccgctgtctactgtaagaggagcggcccttgggtgggggagagtggaagaggaactgtcgttggcagagaagacttcaggagaaatccggtccctggctttcgcttctgcagggccaggccgagtggggttcaggcagcgatgggagctcaggagaagaagggcttttcctgggcccctttgtgccctggctggagctggaatggccaggatgcagggagcaatgtcccaagctatgtaggacagcagggccctgggtctggcccatgaaaccattctttcctccttggcctctgggcctttcctccagttcccaataagtttgccatttccatctaagacctcagaagcctggacttcattttccatatcactatcaccattttggtcacaatcatttaacccatctctaagaagttccaaactttccctcat

SEQ ID NO: 28019 - DNA, 439 bp, Homo sapiens; identical to SEQ ID NO: 18593
  SIMILAR (293)..(436): 771254mologous to Homo sapiens neutral protease large subunit,accession number M27826,Smith-Waterman Score=186.
  misc_feature (1)...(439): n = a,t,c or g

SEQ ID NO: 28020 - DNA, 1059 bp, Homo sapiens; identical to SEQ ID NO: 806
  SIMILAR (328)..(459): 881254mologous to Homo sapiens calbindin D28K,accession number S46006,Smith-Waterman Score=211.

SEQ ID NO: 28021 - DNA, 933 bp, Homo sapiens
  SIMILAR (219)..(82): 511254mologous to Human T-cell lymphotropic virus type 2 gag protein,accession number X89270,Smith-Waterman Score=147.
ctaagccaagaagatctgggaaggagtcagagagccttgggccagagttccaggggctctgggagtggctgccaggtgagttggacagtccgatttccagtggggtcccacacagatgggatgtggcttaggaggaatcctgggctgcaggcattccttggcccggtggccagatttctggaacttgtagcaagctcctcggggaggaggttctggaggaacacctggctgctgcagttcaggcgtttggaagttcttgtgtgctggagatgtggctggggtttgtctcacagtggaggcaaggaactgcaacttttttctattattgtacaccttgaaggtgaggttaattaaatccttgactatgcctttagctccagccacctttttaagagtaaattgctgggcaggagggggagggctagtcatggaaggaaactgtaagccggaccaggtgtgaggaggggaggcgataaaaggattatagggtggaggagcggaggctgaggaagaattgggacctagctcggtctggcgaggagcagctggccccttccccagaaaagtgggacttgccgctaagggtgaaggaccaaggcaggcgtccctgcgtggtctgacacctctgaagcctgggtgaataatcagagaggtgtccctggaatgattaaacaccaagggaaggctgccttcccagtccgtgactggcgccggagttttgggtccacggataaaacgtgtctcctttgtctcggatttgaaattggtgagatgtttcttgggctggtcggtctgaggacctgaggtcgtaggtggatctttaggatcctggttctccttttgcttctccattctttttctttccccatctcttccctcttccctcctcctcttcctcttccttctccttttcctctcctccttctcctccat

SEQ ID NO: 28022 - DNA, 270 bp, Homo sapiens
  SIMILAR (192)..(85): 521254mologous to Gibbon ape leukemia virus pol polyprotein,accession number M26927,Smith-Waterman Score=108.
ttagtcggacatgatcggcagggagagcacgtgtgtttttatgagaattatgctgagataggtaacagataaggaagaaatttgggcttgactgaagtaacgggggctgtctgtgaagccttgcggcagtacagcccaggtaatttgctgagcctgatgggtgtcagggtcagtccaagtgaaagcgaagagacgcagatttgaaattggtgagatgtttcttgggctggttggtctgaggacctgaggttgtaagtggatctttctcat

SEQ ID NO: 28023 - DNA, 930 bp, Homo sapiens; identical to SEQ ID NO: 9694
  SIMILAR (226)..(384): 791254mologous to Homo sapiens Human secreted protein, SEQ ID NO: 5210,accession number G01129,Smith-Waterman Score=220.

SEQ ID NO: 28024 - DNA, 233 bp, Homo sapiens
  SIMILAR (233)..(117): 791254mologous to Homo sapiens Human secreted protein, SEQ ID NO: 5576,accession number G01495,Smith-Waterman Score=151.
ctctctcactatccctcaaccactttctcctttcaatcttggcgtcacccttcaatctctcccttctcttaatttcagttcctttccttttctggtagagaacggagacgcgttttatctggcagccactctcagagcccctggaactgtggcccaaggctctctgactccttcccagatcttctcggcttagtggctgaagactgatcctgcccaatcgcctcggaagcccc

SEQ ID NO: 28025 - DNA, 357 bp, Homo sapiens; identical to SEQ ID NO: 443
  SIMILAR (148)..(279): 481254mologous to Human T-cell lymphotropic virus type 1 Gag,accession number S74562,Smith-Waterman Score=143.

SEQ ID NO: 28026 - DNA, 909 bp, Homo sapiens; identical to SEQ ID NO: 810
  SIMILAR (353)..(391): 761254mologous to Homo sapiens calbindin D28K,accession number S46006,Smith-Waterman Score=45.

SEQ ID NO: 28027 - DNA, 525 bp, Homo sapiens; identical to SEQ ID NO: 2009
  SIMILAR (316)..(447): 511254mologous to Human T-cell lymphotropic virus type 1 Gag,accession number S74562,Smith-Waterman Score=146.

SEQ ID NO: 28028 - DNA, 522 bp, Homo sapiens; identical to SEQ ID NO: 257
  SIMILAR (135)..(287): 601254mologous to porcine endogenous type C retrovirus reverse transcriptase,accession number AF033260,Smith-Waterman Score=163.

SEQ ID NO: 28029 - DNA, 534 bp, Homo sapiens; identical to SEQ ID NO: 8291
  SIMILAR (213)..(284): 831254mologous to Homo sapiens Human secreted protein, SEQ ID NO: 5576,accession number G01495,Smith-Waterman Score=93.

SEQ ID NO: 28030 - DNA, 420 bp, Homo sapiens; identical to SEQ ID NO: 448
  SIMILAR (106)..(219): 841254mologous to Homo sapiens Human secreted protein, SEQ ID NO: 5576,accession number G01495,Smith-Waterman Score=161.

SEQ ID NO: 28031 - DNA, 552 bp, Homo sapiens
  SIMILAR (69)..(173): 401254mologous to Gibbon ape leukemia virus pol polyprotein,accession number M26927,Smith-Waterman Score=64.
  misc_feature (1)...(552): n = a,t,c or g
atggatagatatngactgntcttgggcctctccctttttccctttctccttgctgcctacattgccaagggaagcgactatgtggtcaccatgaggaagcaagaaggaggaaaaatgtcagcattccaagaaaggaagctggaatcattcactgcaaaggccatcaaaaaggcatcagatcccatcgctcaggacaatgcttatgctgataagttagctaaaaaagcagctagcgttccaacttctgtccctcacgggatttctcaggccccccctcccctccctacgcatcaagctcggtactggcaaattgactttactcacatgcctcgagtcaggaaactaaaatacctcttggtctgggtagacaccttcactggatgggtagaggcctttcccacagggtctaagaaggccactgcggtcatttcttcccttttgtcagacataattcctcagtttagccttcccacctctatacactccgatagcagactggcctttattagtcaaatcacccaagcagtttctcaggctcttggtattaagtga

SEQ ID NO: 28032 - DNA, 1135 bp, Homo sapiens
  SIMILAR (123)..(278): 821254mologous to Homo sapiens Human secreted protein, SEQ ID NO: 5210,accession number G01129,Smith-Waterman Score=232.
taaaacggccccacccttatctccctttgctgactctcttttcggactcagcccacctgcacccaggtgaaataaacaaccatgttgctcacacaaggcctgtttggtggtctcttcacacggacgtgcatgaaatttggtgccgtgactcggatcgggggacctcccttgggagatcaatcccctgtcctcctgtcctttgctccgtgagaaagatccacctacaacctcaggtcctcagaccgaccagcccaaggaacatctcaccaattttaaatcaggtaagcggcctcttcttactctcttctccaacctctctcactgtccctcaacctctttctcctttcaatcttggcgccacacttcaatctctcccttctcttaatttcaattcctttcattttctggtagagacaaaggagacacgttttatccgtggagccaaaattccggcgcctgtcacagactagggaaggcagcctttccttggtgtttaatcattgcagggacacctctctgattattcagccaggcttcagaggtgtcagaccacgcagggacgcctgacttggtccttcacccttagtggcaagtcccgcttttctgggggaaggggcaagtaccccaaccccttctctctgtgtctctaccccttctccgcctttctggggggcaagaaacacccaaccccttctccttcaccctgagtggcaagtccgcttttctagaggagcaagtaccccaacctcgtatctctgtgccccagtcccttatttccacgccccgacctcttatctctgtggcccaatcccttatttctgcaccccaacctcttatatctctgtgccccaatcccttatttccatgccccgacctcttatctctgcaccccaaccccttatttccacgacccaacccctttcccgcttttctggaaggagcttgctacaagtgccagaaatctggccaccaggccaaggaatgcctgcagcccgggattcctcctaagctgcgtcccatctgtgcgggaccccactggaaatcggactgtccaactcacctggcagccactcccagagcccctggaactctggcccaaggctctctgactgcttcccagatcttcttggcttag

SEQ ID NO: 28033 - DNA, 1902 bp, Homo sapiens
  SIMILAR (162)..(275): 811254mologous to Homo sapiens Human secreted protein, SEQ ID NO: 5576,accession number G01495,Smith-Waterman Score=151.
cttctgaaggtgaagcaaaaggcagcattaccttgaccgtctgtactgcgctttatctcaaacttactttattccacaaaactggtgtctttggtcccctgcgatttccagtagttaataccctcaatccatcaccctttcatgatgggaccagagagctgggggcttccgaggcgattgggcagtgtcagtcttcagccgctaagctgagaagatctgggaaggagtcagagagccttgggccagagttccaggggctctggaagtggctaccaggatctagccagtgctttgcacgtgagagcttggaggagaagctgagcctgtgcttccgcccctcggatccgggcgccgagcccccgaggacggccgtgcggcccatcacggagcgcagcctcctgcagggggacgaatattgctgtgctttaggtcaaggggtccccaacccctggtccacagaccggtactggaactgggccacactacaggagataggaccatctagttgcaggaaaacaagctcagggctcccattgattctacgttatggccatgtcagagaccttcatggcagctcctcccatcacaggcctggaggcccaaaaaggaacaagtggtttcgtgagctgggcctagggtctgcctgctgtatgcggcctagggacttggtgccctgtgtaccagctgctccagctgtggctgaaaggggcgagagtacagctcaggctgtggcttcagagggtgcaagccccaagccttggcagcttccaggaggtgttgggcccgtgggtgctcagaaatcaagaattgaggtttgggaacctttgcctatatttcgcaggatgtatggaaaagcctgtatgtccaggcagaagtttgctgcaggggcagggttttcctggtatgttcctgtggcagttgttggagcaaaagttcacgatgtgaacctccatatgctgtcctttccatccaagtggaagctgcacacatgcatgaaatttggtgccgtgactcagatcgtgacctcccttgggaggtcctcctgttctttgctccttgagaaagatccacctatggtcctcagaccgaccagcccaagaaacatctcaccaatttcaaatctgacaaaggagacacgttttatccgtggacccaaaactccggcgccggtcacggactgggaaggcagccttcccttggtgtttaatcattgcagggacgcctctctgattattcacccaggttttagaggtgtcagaccacgcagggacgcctgccttagtccttcacccttagcgaatttaattaacctcaccttcaaggtgtacaataatagaaaaaagttgcaattccttgccttcactgtgagacaaacctcagccatgtctccagcacacaagaacttccaaacgcctgaacctcagcggccaggcattcctccagaacctcctcccccaggagcttgctacaagtgccagaaatccggccaccaggccaaggaatgcctgcagcccaggattcctcctaagccacgtcccatctgtgcgggaccccactggaaattggactgtccaactcacctggcatccactcccagagcccctggaactctggcccaaggctctctgactgcttcccagatcttcttggcttagcggctgaagaccgatgctgcccgatcgccttggaagccccctcaatgcgttctccaaatgcatgaattacaaccaggaaaaaaagaaggttttgatatcctgaactctttgctggtttaacatgtatgtttctgtcacatgtttcaggtgggacagggacagtacccgtgtaacgcagaagaggagcaccaggatggagaaactctagcctcaccgactgtttaggttgtgagagcacacggggcat

SEQ ID NO: 28034 - DNA, 1556 bp, Homo sapiens
  SIMILAR (142)..(843): 851254mologous to Mus musculus protocadherin,accession number AF281899,Smith-Waterman Score=1033.
atgcagaaacgactttggaactgggtaacaggcagagattggaacagtttgcagggctctgtagaagataggaagatgcgagaaagtttggaactctctagagacttaccgaatggctttgaccaaaatgctgataatgatattaatgatgaaaaccaggctgaggtggtctcagatagagatgaggaacttgttggtaactggagcaaagggactcctgaggattacccacgatttttccatatgcatcctaggacagcagaacttagtctcctggagccagtaaacagagactttcaccagaaatttgatttggttattaaggctgaacaagacaatggtcatcctcttcctgcctttgccggtctacacattgaaatactggatgaaaacaatcaaagtccatattttacaatgcccagttatcaaggctatatcctggaatctgccccagtgggagcaaccatttcggacagtctcaatttgacttcacctttaagaatagtagctctggacaaggacatagaagatacaaaagacccagagcttcacctttttctgaatgactacacctcagtcttcaccgtcacacagactggtattactcgctacctcaccttacttcaaccagtggacagggaagaacagcaaacttacaccttttcgataacagcatttgatggtgtacaagaaagtgagccagtcatcgtcaatattcaagtgatggatgcaaatgataacacgccaaccttccctgaaatatcctatgatgtgtatgtttatacagacatgagacctggggacagtgtcatacagctgctgatggcaacaaaagacactggggactactatggagggagagagggagaagagacaattgaaaaattaactattgtgtactatactcagtatctgggtgacagaatcaatcataccccaaacctcaacatcatgcaatatacccagggggcttccgaggcgatcaagcagtgtcagtcttcagccgctaagccgagaagatctgggaaggagtcagtcagagagccttgggccagagttccaggggctctgggagtggctgccaggtgagtcgaacagtccgatttccagtggggtcccgcacagatgggacgcggcttaggaggaatcccgggctgcgggcattccttggcccagtggccagatttccggcacgtgtagcaagctcctgtgggaggaggttctggaggaacgccttgccgctgcggttcaggcatttggaagttcttttgtgctggagatgtggctggggtttgtctcacagtggaggcaaggaattgcaacatttttctattattgtacaccttgaaggtgaggttaattaaatccttgactatgcctttagctccagccacctttttaagagtaaattgctgggcaggagggggagggctagtcatggaaggaaactgtaagccggaccaggtgtgaggaggggaggcgataaaaggattatagggtggaggagcggaggctgaggaagaattgggacctagctcggtctggcgaggagcagc

SEQ ID NO: 28035 - DNA, 1008 bp, Homo sapiens; identical to SEQ ID NO: 2004
  SIMILAR (64)..(195): 811254mologous to Homo sapiens Human secreted protein, SEQ ID NO: 5576,accession number G01495,Smith-Waterman Score=176.

SEQ ID NO: 28036 - DNA, 2910 bp, Homo sapiens
  SIMILAR (913)..(2145): 861254mologous to Homo sapiens unknown,accession number AF149422,Smith-Waterman Score=1862.
  misc_feature (1)...(2910): n = a,t,c or g
atgggagactttaacaccccactgtcaacattagacagatcaacgagacagaaagtcaacaaggatacccaggaattgaactcagctctgcaccaaccagacctaatagacatctacggaactctccaccccaaatcaacagaatatacatttttttcagcaccacaccacacctattccaaaattgaccacatacttggaagtaaagctctcctcagcaaatgtaaaagaacagaaattataacaagctatctctcagaccacagtgcaatcaaactagaactcaggattcagaatctcactcaaaaccactcaactacatggaaactgaacaacctgctcctgaatgactactggttacataacgaaatgaaggcagaaataaagatgttctttgaaaccaacgagaacaaagacacaacataccagaatctctgggatgccttcaaagcagtgtgtagagggaaatttatagcactaaatgcccacaagagaaagcaggaaagatccaaaactaacaccctaacatcgatcaacaaaattgatagaccactagcaaggctaataaagaaaaaaagagagaagactcaaatagatgcaataaaaaatgataaaggggatatcaccaccgatcccacagaaatgcaaactaccatcagagaatactacaaacacctctatgcaaataaactagaaaatctagaagaaatggataaattcctcaacacatacactctcccaagactaaaccaggaagaagttgaatctctgaatagaccaataacaggagctgaaattgtggcaataatcaatagcttaccaaccaaaaagagtccaggaccagatggattcacagccgaattctaccagagttgcttcaaagagaataaaatacctaggaatccaacttacaaggatgtgaaggacctcttcaaggagaactacaaaccactgctcaatgaaataaaagaggatacaaacaaatggaagaacattccatgctcatggataggaagaatcaatatcgtgaaaatggccatactgcccaaggtaatttacagattcaatgccatccccataaagctaccaatgactttcttcacagaagtggaaaaaactactttaaagttcatatggaaccaaaaaagagcccgcatcgccaagtcaatcctaagccaaaagaacaaagctggaggcatcatgctatctgacttcaaactatactacaaggctacagtaaccaaaacagcatggtactggtaccaaaacagagatatagatcaatggaaaagaacagagccctcagaaataatgccgcatatctacaactatctaatctttgacaaacctgagaaaaacaagcaatggggaaaggattccttatttaataaatggtgctgggaaaactggctagccatatgtagaaagctgaaactggatcccttccttacaccttatacaaaaatcaattcaagatggattaaagacttaaacattagacctaaaaccataaaaaccctagaagaaaacctaggcattaccattcaggacataggcacgggcaaggacttcatgtctaaaacaccaaaagcaatggcaacaaaagccaaaattgacaaatgggatctaattaaactaaagaacttctgcacagcaaaagaaactaccatcagagtgaacaggcaacctacaaattgggagaaaatttttgcaacctacccatctgaccaagggctaataaccagaatctacaatgaactcaaacaaatttacaagaaaaaaacaaacaaccccatcaaaaagtgggcaaaggacatgaacagacacttctcaaaagaagacatttatgcagccaaaaaacacatgaaaaaatgctcagcatcactggccatcagagaaatgcaaatcaaaaccacaatgagataccatctcacaccagttagaatggcaatcattaaaaagtcaggaaataacaggtcctcaatggattggatgatgtccagctgtttaggtgaaataaacagccatgttgctcacacaaagcctgtttggtggtctcttcatacagacgtgcatgaagtttggtgtcgtgactcggattgggggacctcccttgggagatcaatcccccgtcctcctgctctttgctccgtgagaaagatccgcctacgacctcaggtcctcagacctaccagcccaagaaacatctcaccaatttcaaatccgcatgctttgaaaggattaaagcctgttatcactcgcctgctaaagcatggccttttaaagcctataaactctccttacaattcccccattttacctgtcttaaaaccagacaagccttacaagttagttcaggatctatgccttatcaaccaaatggttttgcctatccaccccatggtgccaaacccatatactctcctatcctcaatacctccctccacaatccattattctgttctggatctcaaacgtgctttctttactattcctttgcacccgtcatcccagcctctcttcgctttcacttgcactgaccctgacacccatcaggctcagcaaattacctgggctgcactgccgcaaggcttcacagacaacccccattacttcagtcaagcccaaatttcatcctcatctgttacctatctcaacataattctcgtaaaaacacacgtgctgtccctgctgatcatgtccgactgatctctcaaaccccagcaccttctacaaaacaacaactcctttccttcctaggcatggttagcgtggtcagaattcttacacaagagccaggaccgcaccctgtagcctttctgtccaaacaacttgaccttactgttttagcctagccctcatgtctgcgtgcagcggctgccgtnttttaatacttttagagggcctcaa

SEQ ID NO: 28037 - DNA, 1490 bp, Homo sapiens
  SIMILAR (876)..(1034): 751254mologous to Homo sapiens Human secreted protein, SEQ ID NO: 5576,accession number G01495,Smith-Waterman Score=198.
ctaagccaagaagatctgggaagcagtcagagagccttgggccagagttccaggggctctgggagtggctgccaggtgagttggacagtccgatttccagtggggtccggcacagatgggacgtggcttaggaggaatcctgggctgcaggcattccttggcctggtggccacgtttctggcacttgtagcaagctcctgggggaggaggttctggaggaacacctggccgctgcggttcaggcgtttggaagttcttgtgtgctggagatgcggctggggtttgtctcacagtggggacaaggaattgcaacttttttctattattgtacaccttgaaggcgaggttagttaaatcttgcccctccctcagaaaagcgggacttgccgctaaaggtgaaggaccaaggcaggcgtccctgcgtggtctgacacccgtgaaacgtgggtgtataatcagagaggtgtccctgcaatgattaaacaccaagggaaggctgccttcccagtccgtgaccggcaccggagttttgggtccacggataaaacgtgtctcctttgtctctcccagaaaatgaaaggaattgaaattaagagaagggagagattgaagagtggaaaggagaaagtggttgagggacagtgagagaggctgcatgctccctcccatgaggggtggaacatagcaggtcagagtgcatggagttcgctcctgccagtgccaaagcagccagctggttccagcactcgtgtactccagtttctgccttgtcgactcgcaaactccctctgtcctttcccctgctctatattccatcacttcactagaatttaaactgcctccactgtgagagttacctaagctcagcgtccgtgatggtctatggggcttccaaggcgatcgggcagcatcagtcttcagccgctaagccaagaagatctgggaaggagtcagagagccttgggccagagttccagggactctgggagtggctgccagactcaggagcccagctggcttcacccactggatcctgcatgggggctgcaggtggagctgcctgccagtcccacgccgtgtgcacgcactcctcagcccttggctggtcgatgggactgggcgccgtggagcagggggcggcgctcatgggggaggctcgggccgcacaggagcccatggagtgggtgggaggctcaggcatgacaggctgcaggtcccgagccgtgccccacgggaaggcagctaaggccgggcgagaaatcgagcacagcgccagtgggctggcactgctgggggacccagtacaccctctgcagccactggcccgggtgctaagccactcactgcccaggccggcagggccagccggttgctccgagtgtggggcccgccaagcccacgcctacccggaactccagctggcccgcaagcgcggcgcacagccctggttcctgctggcacctctccctccacacctccctgcaagctga

SEQ ID NO: 28038 - DNA, 560 bp, Homo sapiens
  SIMILAR (46)..(162): 791254mologous to Homo sapiens calbindin D28K,accession number S46006,Smith-Waterman Score=172.
atggacgccgagcttcaggtaactctcacagtggaaggatcgggggacctcccttgggagatcaatcccccgtcctcctacactttgctctgtgagaaagatccacctacaacctcaggtcctcagaccaaccagcccaagaaacattctcaccaatttcaaatccgagacaaaggagacacgttttatccgtggacccacaactccggcgccagtcacggactgggaaggcagccttccttggtgttaagagcttgctacaagtgccagaaatctgacccccaggccaaggactgccggcagcccaggattcctcttaagccacgtcccatctgtgtgggaccccactgcaaatcggactgttcaactcacctggcagccactcccagagcccctggaactctggcccaaggctctctgactgactccttcccagatcttctcagcttagcggctgaagactgacactgcctgatcgcctcggaagcccccctgacaccagttaggctcagcaaattacctgggctgtactgctgcaaggcttcacagacagcccccat

SEQ ID NO: 28039 - DNA, 1677 bp, Homo sapiens
  SIMILAR (949)..(1623): 331254mologous to Caenorhabditis elegans Hypothetical protein T02H6.3,accession number AC006684,Smith-Waterman Score=399.
atgatcattacacacaatatcgtggaggactctcaaaagcattttgctaagcgaaagatatcagtcacaaaatacgaattcggtcttattcatttaagcttccataaagtgccaacaggcaactttctcaggttgtcaccctatttaaaagttccgagaaaatccacagcattagacatgtctcttgtcaatctggaacatgggattccgtgtgggaaagtacatgctaaaaggaaattagaagatctgtaccaagaaaagaatagcagcaccatgagagaaccgggacttgggagacagcaatgtcagcattcccatagattcgattctactgataaggactttgattatgcacccatgttcacagcaaccttattcacaatagccaaaaggtggaaacaactcaagggtccatggacaagtgaatgggtaaacaaaacgtggtgcatacatatcgcagaatattatttaaccttaagaaggaaggaaatcctggcacatgtcgcaacatggatgaattttgtggacagtgtgcatggtgaagtaagccagacacagaaggaaaaatcctgtatgattccaatcataatgaagtacctggagaagtcaaactcgcagagacagaaagtagaatggtggttgccagaggctagggtcgaggccaaaggcctaagcaccagcgtggctggtggtgtaagtcctggagtccgaaggctcaagaaccaggagctccaatctgctgcctggagatgcatgaccacctgggaagcagatcctgaaggtgtcaggaaccaggctggagacaacgctgcaaaggagctagttcttgcctgtgtttatttatcttgtaaaacctccctaacgcagcgaggtcgagcaacacagatccacactctggcaccacggctccgggtttggtcggtacacgttgtctgcctctcaggttatcacagggcacagtcttccaaacatttcactcacagggcacagtcttccaaacatttcactcacagggcacagtcttccaaacatttcactcacaggggacagtcttccaaacgtttcactcacagggcacagtcttgcaaacatttcactcacagggcacagtcttccaaacgtttcactcacagggcacagtcttccaaacgtttcactcacaggggacagtattccaaacgtttcactcacagggcacagtcttccaaacgtttcactcacagggcacagtcttgcaaacgtttcactcacagggcacagtcttgcaaacgtttcactcacagggcacagtcttccaaacgtttcactcacagggcacagtcttccaaacgtttcactcacagggcacagtcttgcaaacgtttcactcacagggcacagtcttgcaaacgtttcactcacagggcacagtcttgcaaacgtttcactcacaggggacagtattccaaacgtttcactcacaggggacagtattccaaacgtttcactcacaggggacagtattccaaacgtttcactcacaggggacagtattccaaacgtttcactcacagggcacagtcttccaaacgtttcactcacagggcacagtcttccaaacgtttcactcacaggggacagtcttgcaaacatttccccgcgcataacaaggctcactggttccctaccctgaaataa

SEQ ID NO: 28040 - DNA, 879 bp, Homo sapiens; identical to SEQ ID NO: 21073
  SIMILAR (616)..(876): 961254mologous to Homo sapiens putative ribosomal protein (AA 1-184),accession number X53777,Smith-Waterman Score=423.

SEQ ID NO: 28041 - DNA, 807 bp, Homo sapiens
  SIMILAR (142)..(552): 421254mologous to Homo sapiens putative ribosomal protein (AA 1-184),accession number X53777,Smith-Waterman Score=135.
aggacacctttggattaataatgaaccacactctcttctgaagcaagctgttcgaatcatctgatatttatactgaatgagttactgtaagtacgtattgacagaattacactgtactttcctctagggtgatctgtgaaaatggttcgctattcacttgacccggagaactcctatgaaatcatgcaaaatcaaagaggttccaatcttcgtgttccctttaaggaccactcgtgaaaactgcctcaggcccatcaaagggtatgccatatacgaaaaagccccacgaagtatcctgaaagatgtccaccttaccagaaaccagtgtgtccccattcccgaccgttacaatgggtgacagttgggccaggtgtgccgcaggcccaagcaaatggggcctgggaccaccaagggtcgggtggccccaaaaaggagtgctgaaatttttgcctgcacatgccttaaaaaccgcagagatgtaatgctgaactctaagggttttggatgtagattctctggtcattgagcatatcccaagtgaacaaagcaccctaagatgccgccgccggacctacagagctcatggtcggattaacccatacatgagctctccctgccacgattgagatgactccttacggaaaaggaacagattgttcctaaaccagaagaggaggttgcccagaagaaaaagatatccccagaagaaactgaaagaaacaccaactttatggcacggggagtaaatttcagcattaaaataaatgtaaataaaaggaaaaaaaaaaaaaaaaaaaaagtcgacgc

SEQ ID NO: 28042 - DNA, 710 bp, Homo sapiens
  SIMILAR (9)..(461): 831254mologous to Mus musculus fatso protein,accession number AJ237917,Smith-Waterman Score=712.
tttcgtatgtctctttgaaatcctttgagcctgcagttttgaaacaaggagaagaaattcataatgaggtcgagtttgagtggctgaggcagttttggtttcaaggcaatcgatacagaaagtgcactgactggtggtgtcaacccatggctcaactggaagcactgtggaagaagatggagggtgtgacaaatgctgtgcttcatgaagttaaaagagaggggctccccgtggaacaaaggaatgaaatcttgactgccatccttgcctcgctcactgcacgccagaacctgaggagagaatggcatgccaggtgccagtcacgaattgcccgaacattacctgctgatcaaaagccagaatgtcggccatactgggaaaaggatgatgcttcgatgcctctgccgtttgacctcacagacatcgtttcagaactcagaggtcagcttctggaagcaaaaccctagaaggagcacaagtctcaggcggaggagaaaaagaagatccggctttttctccttcaacgtttgtcatggggcttaagcaagagcagtggagacttctcttggcccctagattgtagcacccgggtcccaatccaaaacagctaggaaatggtgcccatgaagttttaaatgttttaaaatgaccctgtgttatagtctgatttggtgttaaccaggcccttcttcccccaaaattgtccagat

SEQ ID NO: 28043 - DNA, 2775 bp, Homo sapiens
  SIMILAR (1885)..(2013): 811254mologous to Mus musculus fatso protein,accession number AJ237917,Smith-Waterman Score=206.
atggttggtagatgtgagtcataccctgggcccagctgcgtccaccaacagaatacttctaaggagcaccaggaagataaagacatcagcccaaaacgctctaatatgttgctgaagactcattcccacggcctcttcctgtgggtgacacagtgccctggacatgggtggtactgtgtggttgacatagggcctgaagctattttacaacccacagcattcgatttttattttgccaagaacacgttggtaatgggatgtaaatctcccggtgcacacctgattaaacaggcctgtatacgtgaattaaaaaagagggtgagccccttgccatcacggggtgacagggaagcacgccagataaccggagctcagttggctgaagggagctcggtggctgtttttattaacttgagagctaaggtcatgcggcttcttggggccttggtgaggaaatgcatttgcaaagtgtatgggctgtcatacagaaatagagtggatgtttggaagaagagtatcaggtgtagctcaggaccagtaggaaaggtgtccctgccagtggggacagagagcaaaagcaacgggacaaacattgaaggcacaatactgcactgtagaggcctcccatctctgcagccccagcttggatcacaagggaagttactgcacagccaagtatgctgcatttgcaaagatataactggggcttgctgctttcataggaatttttggttggactatcttctaaatttgtctttttcaatacctgcctgtgtgctaccttcagcttgcacaattaaccacccaatgccagcagcaaagaacacatccctggctttgagaagcttccccacggtcctctgggctaacaagaacaggtatggcaagggtacaaagaagccaacttgtagaggggagagagaagaggtaactgacagagtcagagcacgttggaaagtgatacgagaacaggggcttatggttacagccctaccccctttccaaagaaggcgattagatattatttcagatagtttctcactgtgtcctaatttcattttccagcaaccctgtggcagtcctgttctagtcttttccaaggacaaatgtgtttctagagatggagttcatcctgatatttgggggctggcctacgtacagattgctataccagaaggagcagtttgggggagacagtcagattccacagagcatgttttgaaggctattcacgtgatcaaccctaggccatactgcaagcctaaggcggtctctttggcaactcatccttcttttccgaggctccagtgggctttattcagtggcggcattgctagcagcaccgcaaaaacttcagtcggaggacttcagaatttggcctgctctctattgaactacgatgttttaaaactcctttctaaccaagtcatttcagaagcaaaccttgcactgactcagaaggcctgttcagtcttccgtggctctcagcatataggattaccctccttcctcagcctgaattcacggcaccaaaaagaaaaagaacagcataaattggatggtgagcaaataagccggtctgactggagcacagtgaacaatgggatgagtgcaaggagagggcagagaatcggggtcaggaaagggtccatcatggagggccctgtggaccactataagaaactgaggctcagcgaggtaacaaaacctgcccaagacgtcatgcccctggagagcagcaattccggcaatcaagagaacacactctttaccaccatgctgcagtctccctgcttcccatctttggaaattaagatccaagaaggaagaatgagtgacctgagcaaaagaaatgaaaccctaaagggggacagatgtgccttccagtgccagtcacgaattgcccgaacattacctgctgatcagaagccagaatgtcggccatactgggaaaaggatgatgcttcgatgcctctgccgtttgacctcacagacatcgtttcagaactcagagttagggctgattttaccactgggcaaattgcatacatttggatccatgccacgctaaaaactgtttattttggagatctgtcagaggcaagcacatggaagacaaggggattctggtttgaaaaggcaattctcatccagacagattcagatggagaggagcggtgtggattaaaatgcgccgaagtgcctccgagagaaggagagagggtccacaagccagatccatccccatccacacagggaattcggctttccacgttggaaccagaacagttaaccttcaaacccccaaggcttgcaagagatgaatcagtttctcagacagccaaagccgtggcttataactcatccaacccagaaaactggaccgctgacggcagattcgcagggaagcaggccgagcctgatcttttctccgctagaactgctcaacaggtgaagaatctttttccagcactcctgagcccttcgggtcgcggaacagtgcgaagattattccaatgcctcattcggagagggtgtgccgtcgccctgagccccgccgtccatggaggcactgtcccagggtgtgccgtcgccctgagccccgccgtccatggaggcactgtcccagggtgtgccgtcgccctgagccccgccgtccatggaggcactgtcccacgggaccctggggaggaccgcctgcaaggatggcagagatgccacggcaaactcattcttaaactatccaagaagctacaaaggagggttttggagtga

SEQ ID NO: 28044 - DNA, 1356 bp, Homo sapiens; identical to SEQ ID NO: 2089
  SIMILAR (403)..(1353): 951254mologous to Homo sapiens p40,accession number U93564,Smith-Waterman Score=1552.

SEQ ID NO: 28045 - DNA, 374 bp, Homo sapiens
  SIMILAR (344)..(192): 321254mologous to Staphylococcus epidermidis tetracycline resistance protein,accession number U35229,Smith-Waterman Score=66.
aagcccttaaccattgctgttctaagcaccgtagtaatcagtcgtttgataattctgtttttttgtatttaactacaaacctgttcgtttttcctatttacctgtcaatgttgtaagacttgtttctgaaccccctgtttaaaacaataaggttccccctgctctgaggaagctggaacacttaggagacgtaagatatacacttgttgtatccagttggtggaatcgggggatttgcagaaagaaatagcgtctgagatcataggattactgatgctggaggtaagatggcaaacaaaaacttttatttgggggtaggtttttgagggtttgtaatttgttgagggaaggaaaacttaagtgcccaacctagc

SEQ ID NO: 28046 - DNA, 1101 bp, Homo sapiens
  SIMILAR (1069)..(980): 761254mologous to Mus musculus mitochondrial DNA polymerase gamma; POL gamma,accession number AF268975,Smith-Waterman Score= 108.
actgtctgtttacttgttctgatgtcggccgagaaagttttattatgaagaggactggctaatcaccaagcttaagggacaagtgagccaagaaagcttatcagaaaaggcctcttctcaggcaaccctaccaaatcagcctgttgagaaagctatcatcatgcaactgggaactctgcttacatttttacacgagctggtgccgacagctctgccatcaggcagctgtgtggacaccttgttaaaggacttgtgcaaaatgtacaccacacttacagcccttgtcagaattttatctccaggtgtgtcagagctccggaggaattccaaaaaatatggaacagctggtgaagctgtctggttctcatctgacccccctgtgttattctttcatttctttacgtacagaataagagtaagagcctgaactatacgggagagaaaaaggagaaacctgctgccgttgccacagccatggccagagttcttcgggaaaccaagccaatccctaacctcatctttgccatagaacagtatgaaaaatttctccatccacctgtctaagaagtccaaggtgaacctaatgcagcacatgaagctcaagcacctcacgagacttcaagatcaaaggaaacatcctagacatggttcttcgagaggatggtgaagatgaaaatgaagagggcactgcatcagagcatgggggacagaacaaagaaccagccaagaagaaaaggaaaaaataaatgaaatgcctgagttaatgtgaactttggggcttctgcttcatttttacccaacaagcaacaatgccccttgtcctgtagtccacaccgatgttggcatcttggttctgaacccactgaattcaactgcaccttcagttagaaggaatcttcttggcagggtctgctactgaaaaatggctggccttaggcaagcccttttgcaaaaagcacagctgaaaagcctgagtttgggagcctgcaccaccccgatgaagctccacgggagcaaatacagagcctccaggcagtgctatgggtcaggctggcttcgttttttcaaggagcctttggtgagttcaattatctggtaaat

SEQ ID NO: 28047 - DNA, 3422 bp, Homo sapiens
  SIMILAR (2440)..(2529): 461254mologous to Potato virus S 11k protein,accession number U74375,Smith-Waterman Score=67.
tttcgtcgaggtgactgcagagcggctcgcgagttccagatggaatcatgtggaagggcctgtggcagaaagaacttggagatttgaaggactggaagcaattctgcatggctggagcagagtgatgaaagggaggtaggcatgggtcagaacttgcaggacttattttatccttacttaagggttttggactgataaagcaatggaagccactgaagagctttaagatgaggatggcatggagggaagataagtcacataatcagttctgtgatatgagcaacaatggaccagaagattttatctctagcagcagaaaaaacagcagacaaaccgcaagaatttcttcaaaccctgagagaaggtgatttgactaatctccttcagaatcaagcagtgaaaggaaaagttgctggagcactcctgagagccatcttcaaaggttccccctgctctgaggaagctggaacacttaggagacgtaagatatacacttgttgtatccagttggtggaatcgggggatttgcagaaagaaatagcgtctgagatcataggattactgatgctggaggctcaccattttccaggaccattattggttgaattagccaatgagtttattagtgctgtcagagaaggcagcctagtgaatggaaaatctttggagttactacctatcattctcactgccctggctacgaaaaaggaaaatctggcttatggaaaaggtgtactgagtggggaagaatgtaagaaacagttgattaacaccctgtgttctggcagggatgtccctctgactgcagaagaggtggaatttgtggtggaaaaagcattgagcatgttctccaagatgaatcttcaagaaataccacctttggtctatcagcttctggttctctcctccaagggaagcagaaagagtgttttggaaggaatcatagccttcttcagtgcactagataagcagcacaatgaggaacagagtggtgacgagctattggatgttgtcactgtgccatcaggtgaacttcgtcatgtggaaggcaccattattctacacattgtgtttgccatcaaattggactatgaactaggcagagaactcgtgaaacacttaaaggtaggacagcaaggagattccaataataacttaagtcccttcagcattgctcttcttctgtctgtaacaagaatacaaagatttcaggaccagacttcggttgtaaagagctttaaggatcttcaactcctccaaggctcaaaatttcttcagaatctagttcctcatagatcttatgtttcaaccatgatcttggaagtagtgaagaatagcgttcatagctgggaccatgttactcagggcctcgtagaacttggtttcattttgatggattcatatgggccaaagaaggttcttgatggaaaaactattgaaaccagcccaagtctttctagaatgccaaaccagcatgcatgtaagctcggagctaatatcctgttggaaacttttaagactgtacaaaggctgcttaaggcagtgcaggttcatgtggatgttcacagccattacaattctgtcgccaatgaaactttttgccttgagatcatggatagtttgaggagatgcttaagccagcaagctgatgttcgactcatgctttatgaggggttttatgatgttcttcgaaggaactctcagctggctaattcagtcatgcaaactctgctctcacaggattatctgctgtgttgtattcagcattgtttggcctggtataagaatacagtcatacccttacagcagggagaggaggaagaggaggaggaagaggcattctacgaagacctagatgatatattggagtccattactaatagaatgattaagagtgagctggaagactttgaactggataaatcagcagatttttctcagagcaccagtattggcataaaaaataatatctctgcttttcttgtgatgggagtttgtgaggttttaatagaatacaatttctccataagtagtttcagtaagaatagggttggggacctccttccctttctttatgtgttatgtaatacctctcttacattcttaatgaaaaagcgggtaaagccaaaactaaaatggccaacaagacaagtgatagtcttttgtccatgaaatttgtgtccagtcttctcactgctcttttcagggatagtatccaaagccaccaagaaagcctttctgttctcaggtccagcaatgagtttatgcgctatgcagtgaatgtagctctgcagaaagtacagcagctaaaggaaacagggcatgtgagtggccctgatggccaaaacccagaaaagatctttcagaacctctgtgacttaactcgagtcttgctatggagatacacttcaattcctacttcagtggaagagtcgggaaagaaagagaaaggaaagagcatctcactgctgtgcttggagggtttacagaaaatattcagtgctgtgcaacagttctatcagcccaagattcagcagtttctcagagctctggatgtcacagataaggaaggagaagagagagaagatgcagatgtcagtgtcactcagagaacagcattccagatccggcaatttcagaggtccttgttgaatttacttagcagtcaagaggaagattttaatagcaaagaagccctcctgctagtcacggttcttaccagtttgtccaagttactggagccctcctctcctcaggatgtagaggtggagaaaacaaaccactttgcaatagtgaatttgagaacggctgcccccactgtctgtttacttgttctgagtcaggccgagaaggttctagaagaagtggactggctaatcaccaagcttaagggacaagtgagccaagaaaccttatcagaagaggcctcttctcaggcaaccctaccaaatcagcctgttgagaaagctatcatcatgcaactgggaactctgcttacatttttccacgagctggtgcagacagctctgccatcaggcagctgtgtggacaccttgttaaaggacttgtgcaaaatgtacaccacacttacagcccttgtcagatataataagagtaagagcctgaactatacgggagagaaaaaggagaaacctgctgccgttgccacagccatggccagagttcttcgggaaaccaagccaatccctaacctcatctttgccatagaacagtatgaaaaatttctcatccacctttctaagaagtccaaggtgaacctgatgcagcacatgaagctcagcacctcacgagacttcaagatcaaaggaaacatcctagacatggttcttcgagaggatggcgaagatgaaaatgaagaggtcagtgctggcttctgtctggagcccagccactcttcctag

SEQ ID NO: 28048 - DNA, 1396 bp, Homo sapiens
  SIMILAR (149)..(1396): 1001254mologous to Homo sapiens hypothetical protein,accession number AL080206,Smith-Waterman Score=2124.
gaggatttatagatcagaatctcagtccaacaaaaggcaacatttcatttgttgcatttccagtttccaataccaactcacctacaaagattttacccaaaaaccttaggaccaataaatgtgaatgttggaccccaaatggatgcaaccagaaggcatcatctttgaagcagagaataaaccctcaccaggcactgaatctgccggcactttcattttggacctctcagcaacctccagaacaattataagcacaccacagagactaaccagttcaggaagtgttctgattgggagtccatatacccctgcaccagcaatggttactcagacacacatagcagaagctactggctgggtccctggtgatagaaaacgggctagaaaatttatagactctgatttttcagaaagtaaacgaagcaaaaaaggagataaaaatgggaaaggcttgagacacttttcaatgaaagtgtgtgagaaagttcaacgaaaaggtacaacatcgtacaatgaagtcgctgatgagctggtgtcagagttcaccaattcaaataaccatttggctgctgattcggcttatgatcagaagaacattaggcgaagagtttatgatgctttaaatgtgctaatggcaatgaacataatttcaaaggaaaaaaaagaaatcaagtggattggcctgcctaccaattctgctcaggaatgtcagaatctggagatagagaagcagaggcggatagaacggataaagcagaagcgggcccagctgcaagaacttctcctacagcaaatcgctttcaaaaacctggtacagagaaatcgacaaaatgagcagcaaaaccagggcccgccggctctgaactctaccattcagctgccattcataatcatcaatacaagcagaaaaacagtcatagattgcagcatctccagtgacaagtttgagtatcttttcaattttgacaacacctttgagatccatgatgacatagaagtactaaagcggatgggaatgtcgtttggcctggagtcaggcaaatgctctctggaggatctgaaacttgcgaaatccctggtgccaaaggctttagaaggttatatcacagatatctccacaggaccttcttggttaaatcagggactacttctgaactctacccaatcagtttcaaatttagacctgaccactggtgccaccttaccccagtcaagtgtaaaccaagggttatgcttggatgcagaagtggccttagcaactgggcagttcctggccccaaacagtcaccagtccagcagtgcggcctctcactgctccgagtcccgaggcgagaccccctgttcgttcaatgatgaagatgaggaagatgatgaggaggattcctcctccccagaa

SEQ ID NO: 28049 - DNA, 1870 bp, Homo sapiens
  SIMILAR (494)..(616): 321254mologous to Homo sapiens Human secreted protein, SEQ ID NO: 7049,accession number G02968,Smith-Waterman Score=68.
atgcttagcgttccagtaatggaacacaggcataaatggaagctttacaaactttacaaaaatgtgcatcactgggaaagtaacaggacttgccttaccctgtgtgcaggctataaacgcaggccaatggtacatgtgcgtgacagcagcagaagagaagggcagacgttttgttactttagaagttatttacatggtggaatactgcattggtgattctgtcatatgtgagtttgagcaagcagatggcccagagtgccaaggcatgggggacagaactatcaaaagaggggcttcaggcgctaatgaaaccctggcaatcccttcctggcactgtgtcaagtctgctccccgaattttggcacagtgctccttagccattccaggtgtggctccagtaggcccaagtatagtggctgctcctctagagggcacaggtggtgaaccttggcagtgtctgagtgatgccatctccagtgggtgcagagtgtacaagctgcggggatgcaaccagaaggcatcatctttgaagcagagaataaaccctcaccaggcactgaatctgccggcactttcattttggacctctcagcaacctccagaacagaggtatccagaagaacgcattgttatcacaggaaatgacagctccatgtgtgttactgcccctgaagaccttccagtaggacaaaatgtggaggtggaggacagtgatattgatgatcttgacccccctaaaacagttcaccttgctggtggggagagaaagggtgcagcgtgcggggacctgggctggtgggaaaagcagtcgggttattgttcgtgtgctacaaaggatgaggaattcagtccccaggatccacgggaggagctggctgagaccctggggcccggccttcttcccaagagtccattttccccttggattaacttactttattgtttctaccgtcccatgacttctgagtttatgtgtagacaagtctcccggtgcgggcccagcaggcaggtgacagccgcccttgcgggagtcatccttaaccaagcagtttcagaaatgtttcttgagaaactgtttccggaagtcccggagcctgtgttgcccattgacaagccttgtcggtctcagaagacagactccgggggtctacatccagagacccggctgaggactgaagcccggggtttccaagcggctgccttctccgtcctgcagcaggatgctctcctgaaagcaagtttcagcaagaggctggaaaggcctctcagagagaaggctgagctggcagtgatcagggagcccccgggcatttggcagccgtccacagtaagaccggcagatggagccttcatctggcaagaaactggggaagctggcggtgtcgtcagacaattctgtgggcttgcaggtatcgcccctggtcagcggtgtattcagtcgctgtgccatcccccatgtggctacaagaacaaaagcaccttcttaagcccaagagatacagtggttactcccatgagtccttggacaccttcaccaaacggcactatggggcccacagaattaagtttaaggcttcacaaagataagggaggcctacacgagctacgtggcgagggatctataggagggaaagaaagcaaagattctagagaggacagaaatagttcactaaagcccccacaagttagggagggacaaaattttggagataatacctttagccttagagaagaaatatggaggtatccagaagaaggcattgtcatcacagaggacagccccatgcgtgttgctgcccctgaagaccttccagtggggcaagagatgaaggtggaagacggtgatactgatgattctgactctgtgtag

SEQ ID NO: 28050 - DNA, 396 bp, Homo sapiens; identical to SEQ ID NO: 16758
  SIMILAR (155)..(394): 861254mologous to Homo sapiens transcription initiation factor IA protein,accession number AJ272050,Smith-Waterman Score= 333.

SEQ ID NO: 28051 - DNA, 498 bp, Homo sapiens
  SIMILAR (120)..(365): 931254mologous to Homo sapiens RRN3,accession number AF227156,Smith-Waterman Score=397.
atgggattcgcagaggcatttctggaacatctttggaaaaacttgcaggatccaagtaatcctgccatcatcaggcaggctgctggaaattatattggaagctttttggcaagagctaaatttatttctcttatgattcgggaacaaaggcattctgcgatgttgctctccatggaccattttactcagcctgccaagctgtgttctacacctttgtttttagacacaagcagcttttgagcggaaacctgaaagaaggtttgcagtatcctcagagtctgaattttgagcggatagtgatgagccagctaaatcccctgaagatttgcctgccctcagtggttaacttttttgctgcaatcacaaagatgaagacttgtggatatggatggtggtgatggttgcacaacaatatcaatttattttataccactgaaccgtgcacttcaaaatggttaagatggtaagttttatgttgtgtattttaccataataaaa

SEQ ID NO: 28052 - DNA, 585 bp, Homo sapiens
  SIMILAR (369)..(46): 961254mologous to Homo sapiens transcription initiation factor IA protein,accession number AJ272050,Smith-Waterman Score= 514.
ttatttgcaaggctctgtgatatgtgtcaaaatttgcaggaagatcaatataatactgataagttgctcaaagtcttttgtcaagtacatgacagaagaacggaattctagcagccagttgatgatctggtcatcctttatgtctggatctaacagctggttcttcaacaactcaaagtcatttgtttcaccctttttgtacttcagcaagacttctgtcacagttccaccaaaccgaacagtttttcttgggggagaattgaaaaaatcattctctaatgcacgcatatttgaaatcccagtcctcgacgcgcccagcgtcttgactgcagaggacgaagcggccgcatctcccgacaaacaacgtgtgaagcagcggtgccgccattgggccgaactaacgcgaccgctgcgcctcaggccggatgcccagctccttccagccacagcctcctttttaggccgtttcctttttctgccctcaatctctgtgaactgaaccttgttaaagtcagtcaacaccagggtggatggtttgccgttgtcacctattttcaggacataacaccctgacttaggagccat

SEQ ID NO: 28053 - DNA, 469 bp, Homo sapiens; identical to SEQ ID NO: 23441
  SIMILAR (128)..(208): 731254mologous to Homo sapiens transcription initiation factor IA protein,accession number AJ272050,Smith-Waterman Score= 108.
  misc_feature (1)...(469): n = a,t,c or g

SEQ ID NO: 28054 - DNA, 2103 bp, Homo sapiens
  SIMILAR (129)..(1436): 251254mologous to Homo sapiens RNA binding protein,accession number AB016092,Smith-Waterman Score=212.
atgggcagggctaatgacgatggcagggcgacaagagggacagtgcgtagcgtggcaatctgcgtgctagaaaaccgagcaagcggggaaaagccggtgaaggcgagtatcacccacgaggagcggcaaaagaagaggagccgaagaaaagaacagacaagagaagaagaagggcagagaaaaagaaagaagagagaagagaagcgaaagacaaagggacagaagaagaagaaaggagcaaaggaaggaagagcaaagaagaagagcaagaacaaacgagaggaaaccaaggcaaacacaggcaaatggggccacctcgagctaaaaagcttctgcacagcaggccggcatgtgggggggctctccctgaacggatgcgacagcaatcaggcgtggaggtgctccttgcagcagccgtcggacatgcctgaaccaaggcacaatcgcaaccccatcaggacggcagacgacacggtgatgcggggtaaccagggctggcctccgagcacgatgccagtggacacggctgcctcagaaccggagcggggtaaccgtctgactcgacggaatctgtgtgccggcgacctcttgcgatgcatgtgcctacccatgagtctcacggacccgtattcacccgactggtgtcacatacctttcactgcggttgctaagctgcctgcggtgggtcggcccgtggcctgccggcccacatacagccccagcctctgccacaacccccaacgcccagcgcagttctggctcactcatctgctttgcaatgtgcacctctgtcctgggatccccagagatgtgcacctccatccccgcgtccccacagacgtggacccccgtccccacatccccacagacgtgcacccccatccccacatccccacagacgtgcaccaccacagcccgcacagacccaaccacgagcgccccgcccccccccaaacccagagacgcgcgacaagagagccagccacgaagcacacccgcaacgcacaccccagacgatccgcctgcaaccgaggaacacacacgcacccgcgccgccgtcggaccacagagaggacaacgcaccatgcacgaccacggaaccgaggacaggccacccccaacacgcggcagcccaccgcgggccgacacgaggagacggacggcgccacacggaggcgacagcacggccaaacgcgcggcgagggaggcccaggcgcggcagggcggccaaaacccggcagagagaaagacaagagcccccacacgacaacacgagacgcaccaggagacggccaaagcggcgagacaggacaggcgcaccagcaggaaccagaaaccgaacaagcggacacaaaaagaggcaaccagggacgcgagcaagcaccggaacagccccggcgagccaacaacagcagaccccgactgtcttgtcccgttgtatatcccgtttcggtgttttttacgggcctgatttctctgggggtatattccttctgttctttgcctcttatgtcggattcgacgttgtccacatacggaggacagagacgtggaagtcgcgtgcaaggaagacccaggatacgggagtgctctccccactccgtagagagcgttcctgtcctccagcccatggccgctttccaggactcttcctgtccacccaccggcaagttggcccagcagctttgcgtcctccagaattgtcctgtgagtgactcccgcaggatggagacttttgtgtctggcttccttcacttcgcagcaggcttcgcgggacccgtgtggtggcaccagcgtccagcccttgggagattggcaagtgacagccgtggctccttagccccagacccagtctccttccttgtcgcaatcacgggatgtggaaaaaaggcacaggggtcagcacccttccgtgggttctgtgtgactgatgaaagctgcgtagaggggaccctcaggggcgaagaggccgaagacagcaccgagacctcagtgtcgggcgcgggtgctcccaaagcgcagcgggcccacctcccccggcagaggatcgtgcggcagtcaaagtcgcacacggggcttctgagatgtgcggcccgggcctaa

SEQ ID NO: 28055 - DNA, 667 bp, Homo sapiens
  SIMILAR (3)..(254): 891254mologous to Homo sapiens transcription initiation factor IA protein,accession number AJ272050,Smith-Waterman Score= 384.
cgctgcttcacacgcgtttgccgggagatgcggccgcttcgccctctgcagtcaagatgctgggcgcgtcgaggactgggatttcaaatatgcgtgcattagagaatgattttttcaattctcccccaagaaaaactgttcagtttggtggaactgtgacagaagtcttgctgaagtacaaaacgggtgaaacaaatgactttgagttgttgaagaaccagctgttagatccagacataaaggtaattaattttgggtttgatcattagcaaaattattgccactttatacagacatagtttgctctttgggtcccattctgttctgcagaacttgctctctccatggtcctcccttactttaatctggtggttctcaaccagggacagttttaccccctagaagacatttggtgatggctgcagatatttttgtcacaactgggaggaaagggtgctactggcatctagtgggtgaatgacagagatgctgctaaacatctcacagtgcacagggcagcctcccataaccaagagtgatccagccccaaatgacaacagtgttgaggctgggaaaccctgctctaatgcttcctttctattagattactacctctttcctccatgctgcatgcaactcttttgtctctttaaagctaaaacaaacc

SEQ ID NO: 28056 - DNA, 807 bp, Homo sapiens
  SIMILAR (2)..(94): 771254mologous to Homo sapiens transcription initiation factor IA protein,accession number AJ272050,Smith-Waterman Score= 107.
tcacacgcgtttgccgggagatgcggccgcttcgccctctgcagtcaagatgctgggcgcgtcgaggactgggtaagattcaggccgcttccttctgtgcgtctgggaccaaagctcaggaccgctcttagaggagcagattgaaaggatgtggggcaaagctctcttcagcacacagggatcaaaggggaagaaggtgtccagtgggtttgtgcaggtctgcactgagtctcctccagtggtactcctaatgactggcagcatctggcgattgttcctctcaatgatggtgtagcagaagacgaggctggtacttactccttggattccataactattggcggtcctcaactttcctcgtgaggtgtactccaagttgtcccggtggttgctgtccccgttacgggatttatcctgtccgtagttgccccaggttgccaggtggtgtgtcccggtacgggagtatccactccggtagtggtgctcatggagtccgtcgtggtccccttggttaacctcggttactcctcgtctgtatgtggccctcatgtaagccgtggtgtgtcccgtagtaggaaaacagccgtagtgactccagtagccgtggtgtgtccgtagtaggataacaagccgtagtgactcagtagcgtggtgtgtcccgtagtatgggaaacacgacgtagtggactctagtagcgtggttgtcccgtagtaggaaaccaagcgtattgactcagtagccgtggtgtcccgtaagtaggaaacagcgtagtgaccagtagcgtggttgtccgtagtaggaaacat

SEQ ID NO: 28057 - DNA, 776 bp, Homo sapiens
  SIMILAR (263)..(775): 801254mologous to Homo sapiens transcription initiation factor IA protein,accession number AJ272050,Smith-Waterman Score= 666.
atggctcctaagtcagggtgttatgtcctgaaaataggtgacaacggcaaaccatccaccctggtgttgactgactttaacaaggttcagttcacagagattgagggcagaaaaaggaaacggcctaaaaaggaggctgtggctggaaggagctgggcatccggcctgaggcgcagcggtcgcgttagttcggcccaatggcggcaccgctgcttcacacgttgtttgtcgggagatgcggccgcttcgtcctctgcagtcaagacgctgttcgcgtcgtaggactgggatttcaaatatgcgtgcattagagaatgattttttcaattctcccccaagaaaaactgttcggtttggtggaactgtgacagaagtcttgctgaagtacaaaaagggtgaaacaaatgactttgagttgttgaagaaccagctgttagatccagacataaaggatgacccagatcatcaactgggctgctagaattccgttcttctgtcatgtacttgacaaaagactttgagcaacttatcagtattatattgagattgcctttggttgaatagaagtcaaacagtagtggaagagtatttggcttttcttggtaatcttgtatcagcacagactgttttcctcagaccgtgtctcagcatgattgcttcccattttgtgcctccccgagtgatcattaaggaaggcgatgtagatgtttcagattctgatgatgaagatgataatcttcctgcaaattttgacacatgtcacagagccttgcaat

SEQ ID NO: 28058 - DNA, 3175 bp, Homo sapiens
  SIMILAR (843)..(1085): 711254mologous to Homo sapiens RRN3,accession number AF227156,Smith-Waterman Score=282.
atggcggcaccgctgcttcacacgcgtttgccgggagatgcggccgcttcgccctctgcagtcaagatgctgggcgcgtcgaggactgggatttcaaatatgcgtgcattagagaatgattttttcaattctcccccaagaaaaactgttcagtttggtggaactgtgacagaagtcttgctgaagtacaaaacgggtgaaacaaatgactttgagttgttgaagaaccagctgttagatccagacataaaggtggtgtgccccgccatgccgatgatcctgagggaggggagggccattgtgggcgagtgtgcctttcatccccttcgtggctttcagttgtgctcaaaccagagtggcctcagcccgaaggttgctaagctgcctgcggtgggtcggcccgtggcctgccggcccacatacagccccagcctctgccacaacccccaacgcccagcgcagcttctggctcactcatctgctttgcaggacaccgtggtttctcatgccaatactggtggaaaaatttccatttgttcgaaaatcagagagaacactggaatgttacgttcataacttactaaggattagtgtatattttccaaccttgaggcatgaaattctggagcttattattgaaaaactactcaagttggatgtgaatgcatcccggcagggtattgaagatgctgaagaaacagcaaatcaaacttgtggtgggacagattccacggaaggattgtgtaatatggttagcagtttattaatgaaagtggagatgaagtttatcataatcaaagggtggaaacagctagtgctgctcatctttggattcgcagaggcatttttggaacctctttggaaaaaactgcagggatccaagtaatcctgccatcatcaggcaggctgctggacattatattgcaagctttttggcaagagctacatttatttctcttattactgtaaaaccatgcctagatcttttggttaactggctgcacatataccttaataaccaggattccgggaacaaaggcattctgcgatgttgcctctccatggacccattttactcagcctgcccaagctgtgttctacacctttgtttttagaacacaagcagcttttgagcggaaacctgaaagaaggcgtctggttcaaggtgtcctctcttctgagtctcagtgatagtaaaggattaggaaaaggcataaagagaccaataagcaacggcgaacagaggctcgtggtaacgcgtacagagatggtacatccctgtcctctcatcaaagtgattcctctcccttttgccaaacttccacagaagccaaataaacagtgtagacactccgtcactcgctacggccacggcggccactcggatcacactccgtcactcactgtggccacagtggccactcagatcacaccccgtcactcgggccacggcagccactgtgatcgcaacctgtcacttgctacagccacagcagccactctgatcacaccccatcacttgctatggccacgatggccccttggatcacactctgtcacttggtgtggccacggtggccactcggatcacactccatcacccactacggccacagcagtcactcggatcacatcccgtcacccactacggccacagcagtcactcggatcacatcccgtcactcactacagccatggcagccactctgattgcattcccgtcactcgctatgcccacggcggccactcagatcacactccatcacttgctatggccacggcagccactcagatggcactctgtcactcactatggccacggcagccacttggatacttggtcaataaaataagaagaaagcgttgtacggatggggtatcgccaagcggtaaggcaccggtttttgataccggcattccctggttcgaatccaggtaccccagccatcttcttcgagtaagcggttcaccgcccggttattggggtatcgccaagcgccaccaaattctgaatgtatcgaatatgttcggcaaattcaaaaccaatttgttggggtatcgccaagcggtaaggcaccggattctgattccggcattccgaggttcgaatcctcgtaccccagccaatttattcaagacgcttaccttgatttcaaatatgcgtgcattagagaatgattttttcaattctcccccaagaaaaactgttcagtttggtggaactgtgacagaagtcttgctgaagtacaaaacggcgattgaaaaacggctggaaaaactggcggttgatccacatcgcgaccgtgcgcagatgctgaaagtcgaaaacgtccagcaggcgtggcagcaatggatcaacaaactgccgcccgcacgtcgtgaggatgaagacgtgaaagagatccgttggatgatagaagagttgcgcgttagttacttcgctcaacaacttggcaagaactctcgggcagaatccatgctgtggtccttccataaagcggctatagaagcggcacgcaccaatatcattcaggcgcaaacccgcgtcgaagcggcacaagccactgaacggcgcattgccgcagatatcgatgacagcgaactgaaagccccgcgtgacggacgcgtgcagtatcgggttgccaagccaggcgaagtgctggcggcaggcggtcgggtgctgaatatggtcgatctcagcgacgtctatatgactttcttcctgccaaccgaacaggcgggcacgctgaaactgggcggtgaagcccggctgatcctcgatgccgcgccagatctgcgtattcctgcaaccatcagttttgtcgccagtgtcgcccagttcacgccaaaaaccgtcgaaaccagcgatgaacggctgaaactgatgttccgcgtcaaagcgcgtatcccaccggaattactccagcagcatctggaatatgtcaaaaccggtttgccgggcgtagcgtggtcattcctgtattccatcaaccagacaatctgcttgcggttggatagcattgaagccaaattgcaagccctggaggctacttgtaaatccttagaagaaaagctggatctggtcacgaacaagcagcacagccccatccaggttcccatggttgccggctcccctctcaggacaacccagatgtgcaacaaagtgcgatggtaa

SEQ ID NO: 28059 - DNA, 2410 bp, Homo sapiens
  SIMILAR (1)..(684): 671254mologous to Homo sapiens RRN3,accession number AF227156,Smith-Waterman Score=714.
gatcttttggttaactggctgcacatataccttaataaccaggattcgggaacaaaggcattctgcgatgttgctctccatggaccattttactcagcctgccaagctgtgttctacacctttgtttttagacacaagcagcttttgagcggaaacctgaaagaaggtttgcagtatcttcagagtctgaattttgagtggatagtgatgagccagctaaatcccctgaagatatggcttgccctcagtggttaacttttttgctgcaatcacaaataagtaccagctcgtcttctgctacaccatcatcgagaggaacaatcgccagatgctgccagtcattaggagtaccactggaggagactcagtgcagacctgcacaaacccactggacaccttcttcccctttggatccctgtgtgctgaagaggtcaaagaaattccattgatcctattttatccaggtatggggaagacatgagtgctgaagagctacaggagttcaagaaacccatgaaaaaggacatagtggaagatgaagatgatgactttctgaaaggcgaagtgccccagaatgataccgtgattgggatcacaccaagctcctttgacacgcatttccgaagtccttcaagtagtgtgggctccccacccgtgttgtacactgcaacccagtcccctctgacggcagaaatttgcgactgagatgtgacatttgggattccccatcacttgtcatgccctcagcacccagcttgtgccattgggcattgatggcattgaactaaagcgagtgcctgcctcggctgtggcaacttccaggttcgactgaatcaagcatctgaagactgggtttttttgttgatgttgctccccttaccgaccaaatgaagactatcatgtgcaatcttttacagaggggttgatgatacatttggaaggatttgcttggtcaatatgaacattttttggggtaacagctttttgacacaattactgggcaaattctaatataggcagcagactgttttacgggttgctgttttaacatgggtttttgtcagatccatggtcttaggacttgactgatgagctttcagtgaagaatcctctaagataaaacttctatttaaagactttaactaggaaagtgtttattttgggctacattgttcaccttctgctgtattggtatttgtctgttggggatttcaaggggagtgtaggagaagacagaagggaaagctgaggagctgggcccgacatggtctgggacacagagttggagctggcactgaagatctccaagggacttcagagaccaataaaagcccatagggaagagagagaggatatagggaaacacgaatcccgatgtgtaatatactttggcacagcgaaaaaatggattttaaaagacaaaaatgggaggtcccgggtagatgttatttcacacagactgaaagtgagttcgggcttgtgtaaaacacatgagattggatttgaccccttggctctcaagtgtccccttagatctagaactgctccttggtggccattagatcgagtcagttttgatctgcatcacttagttattgggaatttctttgttggaaacaggaaaatttttttagattatttggtgtacggttttgctcacaacaataggtggaagttgctagtgcagtcttggtctgatggctgtgtgcatcgcacattcggcttggtgaaatccttctctaaagcctctttttgtatttttataactaaacagaggaagtcttcagaagacctcgctttaaaacaaatttgtgcaaacactgctagagtcattttgaagctcaagcattttcactttgtttcttacatgtgtacttttttgtttacttatgaaaatggccatctttaagcatatttattttctgccactttatttaaaggcaagcaatattttcttgatcataaatattttgtaatgaaatacttcctcttttccagggctttgtatgcacttgtataattacattgatggcaatgtagagtttgaatttcagtctgtaaatacttttttggaaaatagaaatttttattgctttaaagttttggatatgggtggttttcttttccgggtttggtggaaagtaatttgagaactttaaggttgtctttttaactgctggcaaaatgttgattttttaatattagataaaacgagtaaacgaaattccccagaaattagtagtaagtggggtctttgtgggttgggaagtagttttaatgtagaaagacatttacatataagtctgtttaatttcaaaggagtttgtgaaaaaaaatccatggtgaaaatgaaacaatgacatggttaatctggaacttacgttcttataccaataaaaggtacctcaat

SEQ ID NO: 28060 - DNA, 1139 bp, Homo sapiens; identical to SEQ ID NO: 8648
  SIMILAR (486)..(1136): 951254mologous to Homo sapiens putative p150,accession number U93563,Smith-Waterman Score=1045.

SEQ ID NO: 28061 - DNA, 2361 bp, Homo sapiens; identical to SEQ ID NO: 6252
  SIMILAR (1402)..(2358): 891254mologous to Homo sapiens putative p150,accession number U93568,Smith-Waterman Score=1439.

SEQ ID NO: 28062 - DNA, 2664 bp, Homo sapiens; identical to SEQ ID NO: 17307
  SIMILAR (4)..(1221): 731254mologous to Homo sapiens putative p150,accession number U93569,Smith-Waterman Score=1466.

SEQ ID NO: 28063 - DNA, 969 bp, Homo sapiens
  SIMILAR (488)..(787): 511254mologous to Homo sapiens p40,accession number U93569,Smith-Waterman Score=226.
atgatcaaaaccctcagcaaaataggcatagaagggacataccttaaggtaataaaagccatctatgacaaacccacagccaacattatactgaatggggaaaagttgaaagcattcctcctgagaactggaacaacacaaggatgcccattttcaccatttctattcaacacattatcagaagttctagcgagagcaatcaaacaagagaaagaaatcaagggcatccaaatgggtaaagaggaagtcaaactgttgctttttgctgaagatatgaccgtatacctagaaaaccctaaagactcatccaaaaaactcctagaactgcctctgctgctgatacccaggcaaacagggtctggagtggacctccagcaagctccaacagacctgcagctgagggtcctgactgttagaaggaaaactaacaaacagaaaggacatccacagcaaaaccccatctgtacgtcaccatcatcaaagaccaaaggatattatccaggagaacttccccaacctagcaagacaggccagcattcaaattcaggaaatacacagaatgccacaaagatactcctcgagaagagcaactccaagacacataattgtcagattcaccaagttgaaatgaaggaaaaaattttaagggcagccagagagaaaggtcgggttacccacaaagggaagcccatcagactaacagcggatctctcagcagaaactctacaagtcagaagagagtggggaccaatattcaacattctgaaagaaaagagttttcaacccagaatttcatatccagccaaactaagcctcataagtgaaggagaaataaaatcctttacagacaagcaaatgctgagagattttgtcaccaccaggcctgccctaaaagagctcctgaaggaagcactaaacacggaaaggaacaacccgtaccagccactgcaaaaacaggccaaatcgtaa

SEQ ID NO: 28064 - DNA, 1326 bp, Homo sapiens; identical to SEQ ID NO: 7485
  SIMILAR (91)..(999): 781254mologous to Homo sapiens putative p150,accession number U93567,Smith-Waterman Score=1202.

SEQ ID NO: 28065 - DNA, 2835 bp, Homo sapiens; identical to SEQ ID NO: 7486
  SIMILAR (607)..(1695): 921254mologous to Homo sapiens putative p150,accession number U93563,Smith-Waterman Score=1804.

SEQ ID NO: 28066 - DNA, 1677 bp, Homo sapiens; identical to SEQ ID NO: 23711
  SIMILAR (900)..(1676): 881254mologous to Homo sapiens putative p150,accession number U93567,Smith-Waterman Score=1146.

SEQ ID NO: 28067 - DNA, 3529 bp, Homo sapiens
  SIMILAR (3225)..(1681): 891254mologous to Homo sapiens putative p150,accession number U93572,Smith-Waterman Score=2317.
ttaggtttttctcttctctttctgagaaactccctctcttccttccaccctcccttgcaagggggcttttccacagtcttcagaaggcagcagaaaatgttgcagtgtgatggttacaagactggcatatatttcagtattgtttgtaatgcctgaaatatttatcaaaatatacccatgacatcttctgccctcattcgataatccttgtggagcagggaatagtaatggtggcaccgaggcaaaggccccctttgcagtcactgggagtggaattggaagtggactttggtgatgttcagcaggtggatgcacagtccttggggatttatgggatgtgaggggtaaggttccagagaggggccaaggatggctcatgggtgtctggtgggacatgtgcctttcacccagaagaggcagcttgtccaagtgcgtggacactgtgttctgtagccccaggtaacttttcaagtccccaaaaccccagctggcacctccaggagaaaaaagcgccccaaactctaaagctaaaggcctctgcacatgattgcctgctagttcttcttggctctggatgagcagaagctgtctttggatgcatttgtagggtttttttggatagcttttcttgtaactgaagtactcagtaaaaaattctgtggttttgctgggtttccccactccgtccttcaccgttaggccagatcctttgtgtccaatcacatttctgtatggctgttcattcatcaaacataggtcctttgttaaattcaatttgcaaggtgctgtagtaatatctttagagagtaaagatgaaggggtcaaggactgagaggagatgcttgggcacacacgtttgtgttgggttgctttcgcctccttgtggggagctgaggggagttgctggaggtggtaatgacactggcctggtcctggggtctcttcctggctagaattatccaaactcaggtgtttaaagctttcaatctttttgtgttgattcttagatctagctgggccttctgctggacccatggtgacgaactgtgggcccttgtctccagaaagccaaaataacatcctggattctgtgaccatgcacccagcacatttccgcctccaggcctgtgccctggccgactcctcctccaggagctgtttctcagtatccttgcccacccccatcctgcccttggcctcgctggctcgttctaccccttcctgtcttggctggaacatcatctccatggaaaggcttttcctatcctccgtgttgcttttctccttttcatctccctgcccgtttccttcatagaggtaattgcttatccacctttgaccttgtagtcctccctccactggaaatgccagttctggctttgtcttaaggaccacctggacaccaagaaactccctcttccctcctatctgtctgaccaggcaaataaccctgatagagttttcgtttagacttgacaagagcactgcaaaaggcaattcttcagaaccgtggcaatcctgatgcttgatggccattggttccagtgctttttggtgctgtgctggagaagcaccattataaagcgttgctatggtgttgaattctgtctctttgaggggaaaagtcctctggtgaatgtagtgtttgttgactctgaaccagtatgagaatttctgattgagagtcttgggcagtatggccattttcacaatattgattcttcctatccatgagcatggaatgttcttccatttgtttgtgtcctcttttatttcattgagcagtggtttgtagttctccttgaagaggtccttcacatcccttgtaagttgtattcctaggtattttattctctttgaagcaattgtgaatgggagttcactcatgatttggctctctgtctgtctgttattggtgtataggaatgcttgtgatttttgcacattgattttgtatcctgagacttcgctgaagttgcttatcagcttaaggagattttgggctgagacgatggggttttctaaatatacaatcatgtcatctgcaaacagggacaatttgacatcctcttttcctaattgaataccctttatttctttctcttgcctgattgccctggccagagcttccaacactatgttgaataggagtggtgagagaggacatccctgtcttgtgccagtcttaaaagggaatgcttccagtttttgcccattcagtatgatattggctgtgggtttgtcataaatagctcttattattttgagatatgtcagatatgtcccatcaatacctagtttattgagagtttttagcataaagggctgttgaattttgtcaaaggccttttctgcttctattgagataatcatgtggtttttgtctttggttctgtttatatgatggattacgtttattgatttgagtatgttgaaccagccttgcatcccagggatgaagccaacttgatggtggtggataagctttttgatgtgctgctggatttggtttgccagtattttattgaggatttttgcatcgatgttcatcagggatattggtctaaaattctctttttttgttgtgtctctgccaggctttgatatcaggatgatgctggcctcataaaatgaattagggaggattccctctttttctattgattggaatagtttcagaaggaatggtaccagctcctctttgtacctctggtagagttcagctgtgaatctgtctggtcctggactttttttggttggtagactattaattattgcctcaatttcagaacctgttattggtctattcacagattcaacttcttcctggtttagtcttgggagggtgtatatgtccaggaatttatccatttcttctaggtgttctagtttatttgcatagaggtgtttatagtattctctgatggtagtttgtatttctgtgggattggtggtgatattccctttatcattttttattgcatctatttgattcttctctattttcttctttattagtcttgctagcagtctatcaattttgttgatcttttcaaaaaaccagctcctggattcattgatttttttgaagggtttttgtgtctctatcttcttcagttctgctctgatcttagttatttcttgtcttctgctagagatggggttttggtgtggatgtcctttctgtttgttagttttccttctaatagtcaggaccctcagctgcaggtctgttggagtttgctggaggtcctctccagaccctgtttgcctgtgtatcaccagcggaggctggccctcgctgtctgaggacaatgtccttactgcaatggagtaagctagagtccaggcagaacacagcagcttcgctgaactttgcatcctcatcgcctcttgaatgcttcccctgctcttgtccttacttgaagctctaacttcctgtttgggattgtcccaagagttcaccgatctccctgcctgcctccattctctccactgaaaccctgtccaccagctgccatcactagag

SEQ ID NO: 28068 - DNA, 993 bp, Homo sapiens
  SIMILAR (394)..(969): 891254mologous to Homo sapiens putative p150,accession number U93572,Smith-Waterman Score=857.
atgaaacttactgatggtggttcagaagtcaatgggaatgcatatagctatgttcaatcaagaaaccagagaagtctctcctctgctggtgatacccaggaaacagggtctggagtggacctccagcaaaatccaacagacctgcagctgagggacctgattgttagaaggaaaactaacaaacagaaaggaatagcatcaacatcaacaaaaaggacatccacaccaaaaccccatctgaaggtcaccaacatcaaagaccaaagactaaaccaggaagaatttgaatgtctgaatagaccaataacaggttctgaaattgaggcaataattaatgtcctaccaaccaaaaaaagtccaggagcagatggatttacagctgaattctaccaaagaaccaaagacaaaaaccacatgattatctcgatagatgcagaaaaggccttcaacaaaattcaacagcccttcatgctaaaaactctcggggaactaggtattgatggaatgcatctcaaaataataagagctatttatgacaaaccctcagcgaatatcattctaaatgggcaaaaactggaagcattccctttgaaaactgacacacgacagggatgtcctctctcaccactcctattcaacatagttttggaagttctggccggggatttccgtcaagagaaagaaataaagggtattcaattaggaaaagaggaagtcaaattgtctctgtttgcagatgacatgattgtgtatttagaaaaccccatcgtctcagcccaaaatctccttaggctggtaagcaacttcagcaaagtctcaggatacaaagtcaatgtgcaaaaatcacaagctttcctacacaccaataacagacaagcagaaagtcaaatcatgagtgaactctcactcacaattgctacaaggagaataaaatacctaggaatccaacttacaagggatgtgaaggacggacctcttcatggagaactatga

SEQ ID NO: 28069 - DNA, 1287 bp, Homo sapiens; identical to SEQ ID NO: 7487
  SIMILAR (793)..(1263): 911254mologous to Homo sapiens putative p150,accession number U93567,Smith-Waterman Score=711.

SEQ ID NO: 28070 - DNA, 1122 bp, Homo sapiens; identical to SEQ ID NO: 7488
  SIMILAR (628)..(1068): 931254mologous to Homo sapiens putative p150,accession number U93565,Smith-Waterman Score=735.

SEQ ID NO: 28071 - DNA, 678 bp, Homo sapiens
  SIMILAR (588)..(4): 781254mologous to Homo sapiens ORF2 contains a reverse transcriptase domain.; ORF2,accession number M80341,Smith-Waterman Score=783.
tcagtagtcattcagaagaaggttgttcagtttccatgtagttgagcggttttgcgtctgtttcttaatcctgagttctagtttgatttttgttataatttctcctcttttacatttgctgaggagtgctttacttccaactatgtggtcaattttggaataagtgcgatgtggtgctgagaagaatgtatattctgttgatttggggtggaaagttctgtagatgtctattaggtccacttggtgcagaactgagttcagttcctggatatccttgttaactttctgtctcgtgggtctgtctaatgttgacagaggggtgttaaagtctcccattattattgtgtgggagtctaagtctctttgtgagtctctaagggcttgctttatgaatctgggtgctcctgtattgggtgcatatatatgtaggataattagctcttcttgttgaattgctccctttaccattatgtaatggccttctttgtctcttttgatctttgttggtttaaagtctttggtctttgatgatggtgacgtacagatggggttttggtgtggatgtcctttctgttcattggttttccttctaacagtcaggaccctcagctgcaggtctgttggagtttgctggaggtccactccaggccctgtttgcctgggtatcagcagcggagg

SEQ ID NO: 28072 - DNA, 1059 bp, Homo sapiens; identical to SEQ ID NO: 6255
  SIMILAR (184)..(1005): 891254mologous to Homo sapiens putative p150,accession number U93572,Smith-Waterman Score=1233.

SEQ ID NO: 28073 - DNA, 924 bp, Homo sapiens; identical to SEQ ID NO: 11168
  SIMILAR (460)..(900): 701254mologous to Homo sapiens putative p150,accession number U93563,Smith-Waterman Score=494.
  misc_feature (1)...(924): n = a,t,c or g

SEQ ID NO: 28074 - DNA, 1485 bp, Homo sapiens
  SIMILAR (1206)..(4): 941254mologous to Homo sapiens putative p150,accession number U93567,Smith-Waterman Score=1901.
ctatacaatcatgtcatctgcaaacagggacaatttgacttcctcttttcctaattgaatgccctttatttccttctcctgcctgattgccctggccaggacttccaacactatgttgaataggagtggtgagagagggcatccctgtcttgtgcccgttttcaaagggaatgcttccagtttttgcccattcagtatgatattggctgtgggtttgtcacagatagctcttattattttgagatacgtcccatcaattcctaatttattgagagtttttagcatgaagggttgttgaattttgtcaaaggccttttctgcatctattgagataatcatgtggtttttgtctttggttctgtttatatgctggattacatttattgatttgcgtatattgaacctgccttgcatcccggggatgaagcccacttgatcatgttggataagctttttgatgtgctgctggattcggtttgccagtattttattgaggatttttgcatcaatgttcatcaaggatattggtctaaaattctcttttttggttgtgtctctgcccggctttggtatcaggatgatgctggcctcataaaatgagttagtgaggattccctctttttctattgattggaatagtttcagaaggaatggtaccagctcctccttgtacctctggtagaattcgtctgtgaatccatctgatcctggactctttctggttggtaagctactgagtattgccacaatttcagagcctgttattggtctgttcagagattcaacttcttcctggtttagacttgggagggtgtatgtgtcgaggaatttatccatttcttctagattttctaatttgtttgcatagaggtgtttgtagtcttctctgatagtagtttgtatttctgtgggattggtggtgatatcccctttatgattttttattgtgtctatttgattcttctctcttttcttctttattagtcttgctagcagtctatcaattttgttgatcctttcaaaaaaccagctcctggattcatcaattttttgaagggttttttgtgtctctatttccttcagttctgctctgattttagttatttcttgccttctgctagcttttgaatgtgtttgctcttgcttttctagttcttttaattgtgatgttagggtgtcaattttggatcttcctgctttctcttgtgggcatttagtgcgatgggattttgttgtggatgtcctttttgttgatgttgatgctatttttttctgtttgttagttttccttctaacagtcaggtccctcagctgcaggtctgttggagatggctggaggtctactccagacactgtttgcctgggtatcaccagcagaggctcttcatctgatccgacaacaagtgatgttggctctactttcaaattgtaactggactcaaagcattcctcatttattccactgtcttgtccccaagccaccat

SEQ ID NO: 28075 - DNA, 1167 bp, Homo sapiens; identical to SEQ ID NO: 11170
  SIMILAR (76)..(2): 841254mologous to Homo sapiens NAG13,accession number AF194537,Smith-Waterman Score=122.

SEQ ID NO: 28076 - DNA, 1020 bp, Homo sapiens
  SIMILAR (49)..(2): 881254mologous to Homo sapiens putative p150,accession number U93574,Smith-Waterman Score=77.
tcatatcctttgcccacttttcgatggggttgttttttttcttgtaaatttaagtttcttatagattctggatattagccctttgtcagatagatagattgcacaaattttcttccattctgtaggttgcgtgttcactctgatggtagtttcttttgctgtgcagaagctctttagtttaattagatcccatttgtcaattttggcctttgttgccattgcttttggtgttttagtcatgaagtctttgcccatgcctatgtcctgaatggtattgcttaggttttcttctatggtttctatggttttaggttttacctttaagtctttaatccatcttgagtcaatttttgtagaagttgtaaggaaggggtccaatttcagttttctgcatatggctagccagttttcccaacaccatttattaaatagggaatcatttccccattgcttctttttgtcaggtttatcaaagatcagatggttgtagatgtgcggcattatttccgaggcctctgtcctgttccattggtctatatatctgttttggtgccagtaccatgctgttttggttactgtagccttatagtacagtttgaagtcaggtagcctgatgcctccagctttgttcttcttgcttaggattgtcttggcaatgcaggctcgtttttggttccatatgaaatttaaagtagttttatctaattggagttcttgtgccatggttttcagctgcatcaggtcctttaaggacttctctgcattggctattctagttagccattcgtctaatcttttttcaaggtttttaacttctttgcgttgggttccaacttcctcctttagctctttggtctttgatgatggtgatgtacagttggggttttggtgtggatgtcctttctgtgtgttagttttccttctaacagtcaggatcctcagctgcgggtctgttggagtttgctggtggtccactccagaccctgtttgcctgggtatcagcagcggaggcattgccat

SEQ ID NO: 28077 - DNA, 1596 bp, Homo sapiens
  SIMILAR (582)..(623): 641254mologous to Homo sapiens putative p150,accession number U93572,Smith-Waterman Score=41.
atgacccacagacgctctgaaggaagcggactgctcctgcaggacccaggagacaccccaaacactgtgagtgccccaactgtggaagtgggaaagggagaccatcctctcccaaacacatcccccaccggggaagctgaagtcctcaccatagtccagactttcatcagtgccatttcaaatgatgatagctcatataaaatggtttccttcagccctgtagaaacatttctacaacctccgctggtgatacccaggcaaacacagtctggagtggacctccagcaaactccaacagacctgcagctgagggacctgactgtcagaaggacaacgaacaaacagaaaggaatagcatcaacatcaaaaaaaaaggacatccacaccaaaaccccatctgtaggtcaccaatatcaaagaccaaacgtagataaaaccacaaagatggggagaaaccagagcagaaaagctgaaaattctaaaaaccagagtgccttttctcctccaaaggatcacagctcctcaccagtaatggaacaaagctggatggagaatgactttgacgagctgacagaagtaggcttcagaagcctggcagagacacaacaacaacaaaaagagaaatttagaccaatatccctgatgaacatcgatgtgaaaatcctcaataaaatactggcaaaccgaatccagcagcacatcaaaaagcttatccaccatgatcaagttggcttcatctctgggatgcaaggctggttcaacatatgcaaatcaataaacgtaatccatcacataaacagaaccaatgacaaaaaccacatgattatctcaatagatgcagaaaaggcctttgacaaaattcaacagcccttcatgctaaaaactctcaaaaaactaggtattgatgggacgtatctcaaaataataagagctatttatgacaaatccacagccagtatcatactgaatgggcaaaaactggaagcattccctttaaaagacaggacaagacaaggatgtcctctctcaccactcctattcaacatagcattggaagttctggccagggcaatcaggcaagagaaagacataaagtgtattcaattaggaaaagagaaagtcagattgtccctgtttgcagaggacatgattgtatatttagaaaaccccatcgtctcagccccaaatctctttaagctgataagcaacttcagcaaagtctcaggatacaaaatcaatgtgcaaaaatcacaagtattcctatacatcaataacagacaaagagagagccaaatcatgaatgaattcccattcacaattgccagaaggagaataaaatacctaggaatccaacttacaagggatgtgaaggacctcttcaaggagaactacaaaccactgctcaaggaaataaaagaggatacaaacaaatggaagaatatgccatgctcatggataggaagaatcaatatcatgaaaatggccatactggccaaggtaatttatagattcaatgccatccccatcaagctaccaatgactttcttcacagaattggagaaaactactttaaagttcatatggaaccaaaaatga

SEQ ID NO: 28078 - DNA, 456 bp, Homo sapiens; identical to SEQ ID NO: 19126
  SIMILAR (366)..(37): 761254mologous to Homo sapiens putative p150,accession number U93563,Smith-Waterman Score=426.

SEQ ID NO: 28079 - DNA, 728 bp, Homo sapiens
  SIMILAR (384)..(728): 841254mologous to Homo sapiens pot. ORF I,accession number X03145,Smith-Waterman Score=499.
ccggaacagcctgggccccgccgccagctcctccctgggcgcgcgtccggccacctagagaagtgtggcgcgccgacctgctcacaccccagggaggaggccccgcgactggcgtctccggcggggaagaatgtgacagtcccgtggggggaaacccagggatctggaaggcttggggtcacaggagaaccagagttgctgggattgggcggcgcgggggccctggcgaggctgataagcagcctctgctggtgatactcaggcaaacagggtctggagtggacctccagcaaactccaacagacctgcagctgagggtcctgactgttagaaggaatactaacaaacggaaaggacatccacaccaaaaccccatctgtacatcaccatcatcaaagaccgaaggcagatcaatgagacagaaagttaacaaggatatccaggaattgaactctgctctgcaccaagtggacctaatagacatctacagaactctccaccccaaatcaacagaatatacattcttctcagcaccacatcacacttattccaatattgaccacatagttggaagtaaagcactcctcaacaaatgtaaaagaacagaaattgtagcaaactgtctctcagaccacagtgcaatcaaaccagaactcaggattaagaaactcactcaaaactgctcaactacatggaaactgaacaacctgctcctgaatgactactgg

SEQ ID NO: 28080 - DNA, 517 bp, Homo sapiens; identical to SEQ ID NO: 2735
  SIMILAR (3)..(419): 1001254mologous to Homo sapiens Hb2E,accession number AF235097,Smith-Waterman Score=747.

SEQ ID NO: 28081 - DNA, 1045 bp, Homo sapiens
  SIMILAR (759)..(520): 681254mologous to Homo sapiens Human secreted protein, SEQ ID NO: 4473,accession number G00392,Smith-Waterman Score=290.
atgagcagactctatgagcagagaatggccctcagctggcagcaagcaagaaagcagggatctcagtcgtacagctgcaaggaacagtatggaaagatagaccaacaaccacaaccatgttctgtccaggaaactttgcattcagtcaaaagtgttacaaagttcagctggaagttttcttctccctgtggtcttttcccagttcctctggcatccctccccaaggatccgcgtgagacagaaatggctttcctggggactgagagagcccacagggctctttttgctgcttcttctaccccgtactttgttcggctctctaaattcttctcagctccaggcaaaagccaagatactcatttatgtagacatcagacctggggacttatgattgaaatgggaaatgcagaatgttggaatcatattcatttcatgtcaactacatgtgaagagaaacagaagtcctttaaaggggtcaacagacacctcatgcaggagagctccggctggcatctggcaggtgcccctctgggacgaagcttcccagaggaaggaaaaggcagcaatctttgctgttctgcagcctctgctggtgatacccaggcaaacagggtctggagtggaactccaacaaactccagcagacctgcagcagaggggcctgactgttagaaggaaaactaacaaacagaaaggagtagtatcaacatcaacaaaaaggacatccacacagaaaccccatctgaaggtcaccaacatcaaagaccaaaggattacaactccttgccaggaatgggaacaaaactggatggagaatgagtttgatgaattgacagaagtaggcttcagaaggtgggtaataacaaaatcctccaagctaaacaagcatgctctaacccaatgcaaggaagctaataaccttgataaaaggttagaggaattgctaactagaataactagtttagagaagaacataaacgacctgatgaagctgaaaaacacagcccaagaatttcatgaagcatacacaagtatcaatagctga

SEQ ID NO: 28082 - DNA, 1734 bp, Homo sapiens
  SIMILAR (1176)..(1715): 771254mologous to Homo sapiens p40,accession number U93569,Smith-Waterman Score=694.
ttaatcaatgcctagaggagatcctgtggagagggcttttgagtagcattttacttcattcattcctttggggtcagcctccagatggactcctggggctcttttagaggaagtgttcagcatattggaagaatccaggtcagcacaggaatgcgtcacaggcactgctaaatctacatctgctactttcacagagacctgccctttcagaattcccagtttctcactgagttcattcctttctatttgaagagccttgtacagcttctctaaccgctccaattttatttgaaagaccttataatttttatcacgaatagttttcttttccgtttcctgcttgaaggctgtaaaaagttcattggtttttgccatggtagtctggaattcttcaaacttatccatataaaggaaaagctgctctttcagttgtgcttcttcttgtttcatttcttcatatttgtgcctcgattctgttgcttcttttaataaaaactctctctctctctgatgtctttcatcagcttcttttatcagctgtgctgtttgttgaagtctggcatctacaagctgttgtcgtaattccttatgtttgaacgctttattaatttgctcttccctcagtgcatactggtcagtgagcttctttagcttttctcccatttccatgttctcctgctgcagtttggcattgtgtatttcatgctgttccagctgggcttgagtttcagttaaagtaatttggaaatgtgcagttacttctttaagaacttcttcctcctcttttttctgctgcatatgttcctcccaactcctgttctttgttataaagtcacggccttcttcatcttccaataaatgtttattacttgtggcactgcaatttgagtcttgatgttgaagaatatcatgtgattcagagttacacaacatatctgctttctctcttaacccacaaagtccagcttcttccattgtgctattcacaaactcccagtaggggccgactgacacctcaaacagccaggtgtccctcagagacaaagcttccagaggaacgatcaggcagcaacatttgctgttctgcaatatttgctgttctgcagcccctgctggtgatacccaggcaaacatggtctggagtggacctccagcaaactccaacagacctgcagctgagggtcctgtttgttagaaggaaaactaacaaacagaaaggacatccacaccaaaaccccatctgtatgtcacaatcatcaaagaccaaagcaaggcaggccagcattcaaattcaggaaatacagagaatgccacaaagatactcctcgagcagagcaactccaagacacataattgtcagattcaccaaagttcgaatgaaggaaaaaatgttaagggcagccagagagaaaggtcgggttacccacaaagggaagcccatcagactaacagtggatctctcggcagaaactctacaagccagaagagagtgggggccaatattcaacattcttaaagaaaagaattttcaacccagaatttcatatccagccaaactaagcttcataagtgaaggagaaataaaatcctttacaaacaagcaaatgctgagagattttgtcaccaccaggcctgccttacaagagctcctgaaggaagcactaaacatggaaaggaacaaccagtaccagccacttcaaaaacatgccaaattgtaaagaccatcaaggctag

SEQ ID NO: 28083 - DNA, 1294 bp, Homo sapiens
  SIMILAR (394)..(1275): 781254mologous to Homo sapiens p40,accession number U93569,Smith-Waterman Score=1180.
atggaggaagatctacgaagcaaatggaaagaaaagaaagcagaggttgcaatcctagtctctgatgaaacagactttaaaccaacaaagatcaaaagagacaaagaaggccagtgcataatgagaataaaatacctaggaatccaacttacaagggacgtgaaggacctcttcaaggagaactacaaaccactgctcaatgaaataaaagaggatacaaacaaatggaagaacattccatgctcatgggtaggaagaatcaatatcgtgaaaatggccataccgcccaagcctccgctggtgataccccagcagacagggtctggagtggacctccagcaaattccagcagacctgcagctgagggtcctgactgttagaaggaaaactaacaaagagcaaggacatccacaccaaaaccccatctgtacgtcaccatcatcaaagaccaaagaagctaaaaaccttgaaaaaagattagatgaatggctaactagaataaacagcatagagaacaccttaaaggacctgatggagctgaaaaccagggcacgagaactacgtgacgcatgcagaagcttcagtagccaattcgatcaagtggaagaaagagtatcagtgattgaagatcaaatgaatgaaatgaagaaagaagagaagtttagagaaaaaagagtaaaaagaaatgaacaaagcctccaagaaatatgggactctgtgaaaagaccaaatctgcatctgattggtgtacctgaaagtgacggggagaatggcatcaagttggaaaacactcttcaggatattatccaggagaacttccccaatctagcaaggcaggtcaacattcaaattcaggaaatacagagaacgccacaaagatactcctcgaggagaggaactccaagacacataattgtcagattcaccaaagttgaaattaaggaaaaaatattaagggcagccagagagaaaggtcgggttacccacaaagggaagcccatcagactaacagcggttctcttggcagaaactctacaagccagaagagagtgggggccaatattcaacattcttaaagaaaagaattttcaacccagagtttcatatccagccaaactaagcttcataagtgaaggagaagtaaaatcctttacagacaagcaaatgctgagagattttgtcaccaccaggcctgccttacaagagctcctgaaggaagcgctaaacatggaaaggaacaaccgataccaactactgcaaaaacatgccaaattgtaaagaccatccaggctag

SEQ ID NO: 28084 - DNA, 814 bp, Homo sapiens
  SIMILAR (365)..(433): 821254mologous to Homo sapiens Human secreted protein, SEQ ID NO: 4473,accession number G00392,Smith-Waterman Score=96.
tttcgtgtctgcagcgccgagggaggctgccagtgcgtgaggaagagagctagagactggacaggggagacagagcagcgtcggagccgcgcaggggacgggagtgagagcgggagtgagagcaggaacgacgcagagcggccgtcgccgtgcccgggtctcagggcgcctggctgaagtgagcatggcttcagtggcctgggccgtcctcaaggtgctgctgcttctccccactcagacttggagacccgtaggagcaggaaatccacagtcaggaccctcagctgcaggtctgttggagtttgctggaggtccagtccagaccctgtttgcctgggtatcaccagcagaggctgcagaacagcaaatattgcagaatggcaaatgttgctgtctgatcctttctctggaagcttcgtctcagaggggcacctggctgtacgcggtgtcagtcagcccctactgggagaatcatcagtcagcaggcaaggctcctttcttgggagtgaggttctcctgttccctctcatccccatctgccgccgcacgtggctgctgtgtggctccctgtcatccttcagcagctcctcagagctgtccagcagccacggcccggggttttcaaggcttaatcgaagagatgagatatgggctctgtttcgttactttagattctattgctgcagagcctcagtggatggtcattatcactgaaacagtgactaagcctgggcacaggggtagatataacaatctccctttggttcagattgaaaaaacggaaaatgatgatgatgatgatgatgattgttga

SEQ ID NO: 28085 - DNA, 2957 bp, Homo sapiens
  SIMILAR (335)..(1261): 801254mologous to Homo sapiens putative p150,accession number U93569,Smith-Waterman Score=1259.
atggtcagagcaggaagaggaaagggtaaaatttatttcctcctggaggactggcataaacgaaaggcaggtgtttatagaagaacagctgcattatgcaggaaggacagtgactacccttactttgcaacaagtgcaaaagatgccacaaatgtggcagcagcctttgaggatggggttcaaaaaattcttgtgactgtggatatgtcagatcacttgatgaacacaggcatgcctccgctgctgatacccaggcaaacagggtctggattggacctccaacaaactccaacatacctgcagctgagggtcctgactgttagaaggaaaaataacaaacagaaagaaatagcaccaacatcaacaaaaaggacatctacaccaaaaccccatcagtacatcaccatcatcaaagaccaaagaatatacattcttctcagtacaacaccacacctattccaaaattgaccacatagttggaagtaaagcagtcctcagcaaacgtaaaacaatagaaattataacaaactgtctcccagaccacagtgcaatcaaactagaactcaggattaagaaactcactcaaaaccacaaaactacatggaaacagaacaacctgctcctgaatgactactgggtacataacaaaatgaaggcagaaataaagatgttctttgaaaccaacaagaacaaagacacaacatacaagaatctctgggacacagttaaggcggtgtgtagagggaaatttatagcattaaatgcccacaagagaaagcaggaaagatccaaaattgacaccctaacatcacaattaaaagaactagagaagcaagagcaaacacattcaaaagctagcagaaggcaagaaataactaagatcagagcagaattgaaggagatagagacacaaaaaaccgttcaaaaaatccatgaatccaggagctggttttttgaaaagatcaacaaaattgatagaccactagcaggactaataaagaagaaaagagagaagagtcaaaaagatgcaataaaaaatgataagttggatatcaccaccgatcccacagaaacacaaactaccatcagagactaccataaacacctctacgcaattaaactagaaaatctagaagaaatggataaattcctcgacacatacactctcccaagactaaaccaggaagaagttgaatccctgaatagaccaataacaggctatgaaattgaagcaataattaatagcttaccaaccaaaaaaaagtacaggaccagacggattcacagccgaattctatcagaggtacaaggaggagctggtaccattccttctgaaactattccaatcaatagaaaaacagggaaccctccctaactcattttatgaggccagcatcatcctgataccaaagcctggcagagacacaaccaaaaaagagaattttagaccaatatccctgatgaacatcgatgcaaaaatcctcaataaaatactgacaaaccgaatccagcagcacatcaaaaagcttatccaccatgatcaagtgggcttcatccatgggatgcaaggctggttcaacatacgcaaatcaataaatgtaatccagcatataaacagaaccaacgacaaaaaacacatgattatctccatagatgcagaaaaggcctttgacaaaattcaacaacccttcatgctaaaaactctcaataaattagggacatggatgaagctggaaaccatcattctcagcaaacgatcgcaaggacaaaaaaccaaacaccggatgttctcactcatagtaaatattatccctaccataaagatactaattaagcaaaacatgacagcaatggaaactctctgtccaatatttaagttagaaggtgataccatggataaccctattgcaaatagaagagtgaggacagcagttcccacaagtgtggtgtgcctccacgtgggcacagagccagaagcaagactgccacatgggcctatgatcacggcacaaagtccttttggacagtgcctccctggagttgtggggcagttcaggaagagagaggatctcaagaaagaaggacatactaaactcctgtcaaaaaaggaagccaggcctcagactgggctcaggacttgggctctggattcaggcaccaaaggcacagatgagggagagccaccgctgctgatacccaggcaaacagggtctgcagtggacctccagcaaattacaacagacctgcagctgagggtcctgactgttagaaggaaaactaacaaacagaaaggacatccacaccaaaaccccacctgtacgtcaccatcatcaaagaacaaagaaaaagagggaatcctccctaactcattttatgaggccagcatcatcctgataccaaagcctggcagagacacaaccaaaaaagagaattttagaccaatatccctgatgaacatcgaagcaaaaatcctcaataaagtactggcaaaccgaatccagcagcacatcaaaaaccttatccaccatgatcaagtgggcttcatccatgggatgcaaggctggttcaacatacgcaaatcaataaacgtaatccagcatataaacagaaccaatgacaaaaaccacattattatctcaatagatgcagaaaaggcctttgacaaaattcaacaacccttcatgctaaaaactctcaataaattaggtattgatgggacgtatctcaaaataataagagctatttatgacaaacccacagccaatatcatactgaatgagcaaaaactggaagcattccctttgaaaaccggcacaagacagggatgccctctctcaccactcctattcaacatagtgttggaacttctggccagggcaatcaggcaggagaaggaaataaagggtattcaattaggaaaagaggaagtcaaattgccctgtttacagatgacatga

SEQ ID NO: 28086 - DNA, 3212 bp, Homo sapiens
  SIMILAR (1007)..(2020): 901254mologous to Homo sapiens putative p150,accession number U93564,Smith-Waterman Score=1592.
  misc_feature (1)...(3212): n = a,t,c or g
gcactcacagctcagcaaggcctactgcctttataaactccacccctgcggcaggtcatagctgaataaaaggcagcagaaacttcttcagacttaaacatccctgtctgacagccctgaagagagcagtggttctctcagcaaggcatttgaaaaaaaaggggnncccnctttgnaagaaatggacagactgcctcctcaagcgggtccctgacccccaggtagcctgactgggaaacccctgccagtaggggctcacggacacctcaaacaggcaggtgcccctccgggatgaaccttccagaggaaggatcaggcagcaatatttgctgttctgcaatatttgctgttctacaatatttgctgttctgcagcctccgctgctgataacccaggcaaacagggtctggagttgacctccagcaaactccaacagacttgcagctgagggtcctgactgttagaaggaaaactaacaaacagaaaggaatagcatcaacataaacaaaaaggacaactcataccaaaactccatctgtaggtcaccatcatcaaagacgaaaggtagataaaaccacaaagatcggggagaaaccagagcagaaaagttgaaaattctaaaaataagagcacctcttctcctccaaaggaaagcagctcctcgccagcaaaggaacaaagctggacggagaatgactttgacaagttgagagaagaaggcttcagaagatcagtaataacaaacttctccgagctaaaggagcatgttcgaacccatcgcaaagaagctaaaaaccttgaaaaaagattggacgaatggctaactacaatagacagcacagagaagaccttaaatgacctgatggagcagaaaaccatggcacaagaactatgtgaaaaatgtgcaagcttcagtagctgattcaatcaactggaagaaagggtatcagtgattgaagatcaaatgaatgaaatgaagcgagaagagaagtttagagaaaaaaagatgctggaagttctgcccagggcaatcaggcaggagaaagaaataaagggtattcaattaggaaaagaggaagtcaaattgtccctgtttgcagataacatgactgtatatttagaaaaccccatcatctcagcccaaaatctccctaagctgataagcaacttcagcaaagtctcaggatataaaatcaatgtgcaaaaatcacaagcattcctatacaccaataacagacaaacagagagccaaatcatgagtgaactctcattcacaattgcttcaaagagaataaaatacctaggaatccaacttaaaagggatgtgaaggaactcttcaaggagaactgcaaaccactgctcaaggaaataaaagaggacacaaacaaatggaagaacattccatactcatggataggaagaatcaatatcgtgaaaatggccatacagcccaaggtaatttatagattcaatgctatccccatcaagctacccataactttcttcacagaattggaaaaaaaaactactttaaagttcacatggaatgaaaaaagagcccacattgccaagacaatcccaagccaaaagaacaaagctggaggcatcacactacctgatttcaaactgtactacaaggctacagtaaccaaaacagcatggtactggtaccaaaacagagatatagaccaatggaacagaacagagccctcagaaataatgctccatatctacaactatctgatctttgacaaacctgagaaaaacaagcaatggggaaaggattccctatttaatatatggtgctgggaaaactggctagccatatgtagaaagctgaaactggatcccttccttacaccttatacaaaaattaattcaagatggattaaagacttaaatgttagatctaaaaccataaaaaccctagaagaaaacctaggcaataccattcaggacataggcatgggcaaggacttcatgtctaaaacaccaaaagcatatggcaacaaaagccaaaattgacaaatgggatctaattaaactaaagagcttctgcacagcaaaagaaactaccgtcagagtgaataggcaacctacagaatgggagaacatttttgcaatctacttatctgacaaagggctaatatccagaatctacaaagaactcaaacaaatttacaagaaaaaagcaaacaaccctattaaaaagtgggcaaaggacatgaacagatacttctcaaaagcagacatacatgaggctgatgaacatatgaaaaaaagctcaacatcactgatcattagagaaatgcaaatcaaaatcacgctgagataccaacttgcaccagttagaatggcaattactaaaaagtcaaaaaacgacatgctgactggaacaagacaagaatgcccacttttactgctgtttttcaatatagtagtggaagtaatgtctggagcaattagacaagagaaagaaataaagggcatccaaattgaaaagcctccgctggtgatacccaggcaaacagggtctggagtggacctccagcaaactccaacagacctgcagctgagggtcctgaccgttagaaagaaaactaacaaacagaaaggacatccataccaaaaccccatctgtacgtcaccaccatcaaagaccaaaggtgtgaacgccatgctgaggaaagtggccgtagcggctgcgtccaagccgcacgtggagatccgccaggacggggatcagttctacatcaagacatccaccacggtgcgcaccactgagatcaacttcaaggtcggagaaggctttgaggaggagaccgtggacggacgcaagtgcaggtttttcgatatgcttcgtgatctgctcaagaacgttgatcttaaagggttcgagcctgatgtacgtattttgcttaccaaatacagcaatagtaatggctctcagtccccgtggatggaggagcaaattcgggatgcctggggaagcatggttctaaaaaatgttgtacgtgaaacggatgaagttggtaaagtgccgcaagccaaaggcaacaatgtggttatcacaagtcttatgacaaacagaggcttcttcgaggagggggaggcaacatttgcgccaagcttcttaatgaacatcaaaggcaataaaacatccgttgtcaaaaacagcatcctggagcaaggacagctgacagtcaactaa

SEQ ID NO: 28087 - DNA, 556 bp, Homo sapiens
  SIMILAR (4)..(231): 971254mologous to Homo sapiens dJ1024N4.1 (novel Sodium:solute symporter family member similar to SLC5A1 (SGLT1)),accession number AL109659,Smith-Waterman Score=393.
ggaattccagagcccggagctttctggggcctcgtgtttggcctgggagtggggcttctgcgtatgatcctggagttctcatacccagcgccagcctgtggggaggtggaccggaggccagcagtgctgaaggacttccactacctgtactttgcaatcctcctctgcgggctcactgccatcgtcattgtcattgtcagcctctgtacaactcccatccctgaggaacagctcacacgcctcacatggtggactcggaactgccccctctctgagctggagaaggaggcccacgagagcacaccggagatatccgagaggccagccggggagtgccctgcaggaggtggagcggcagagaactcgagcctgggccaggagcagcctgaagccccaagcaggtcctggggaaagttgctctggagctggttctgtgggctctctggaacaccggagcaggccctgagcccagcagagaaggctgcgctagaacaaaagctgacaagcattgaggaggagccactctggagacatgtctgcaacatcaatgctgtcc

SEQ ID NO: 28088 - DNA, 606 bp, Homo sapiens; identical to SEQ ID NO: 23576
  SIMILAR (397)..(507): 571254mologous to Human T-cell lymphotropic virus type 2 gag polyprotein,accession number AF326584,Smith-Waterman Score=147.

SEQ ID NO: 28089 - DNA, 352 bp, Homo sapiens
  SIMILAR (331)..(254): 761254mologous to Homo sapiens Human secreted protein, SEQ ID NO: 5576,accession number G01495,Smith-Waterman Score=91.
ccaggagtaagaggagcccagggtggtccctctatccccaggcagtgtgaagagtctgctattggtcctaaatttgcttggatcatctcttcctttcactggaagcaaggcatgttcaacatggaggctccttcttcccttttctttgtcaacatgtgtgcagtaaagaagcagacaacctggggccggccagacagaggattcatctggcagccattcccagagcccctggaactctggcccaaggctctctgactgactccttcccagatcttctcggattagcggctgaagactgacgctgcccgatcgcctcggaagccccctgcacccaggtgatataaacagccat

SEQ ID NO: 28090 - DNA, 938 bp, Homo sapiens
  SIMILAR (848)..(612): 961254mologous to Escherichia coli RecC1004,accession number AF176618,Smith-Waterman Score=406.
tgattcttcagttacttcaggccatctgggcatatacgtgcaagtcacaggggatgcgatggcttggcttgggctcagaggcctgacattcctgccgtcttatattaataagaaaaataaaacaaaatagtgttgaagtgttggggtggcaaaaatttttggggggtgatatggagagagaatgggcgatgtttctcagggctgcttcyagcgggattaggggcgccgtgggaaccttccactgtgagagttacccgaagctcggcatccgtgatggtctagggggcttcaaccgaggcgatcgggcagtgtcagtcttcagccgctaagccgagaagatctgggaaggagtcagtcagagagccttgggccagagttccaggggctctgggagtggctgccaggtgagatgaacagtccgattttcggtggggtcccacacagatgggacgtggcttaggaggaataccgtgctgtgggcattccttggcccagtggcagatttccagcatgtgtagcaagctccagcatcccaaagctgaagacactgaagctgatcccttcagcatcccaaagctgaagacactgaagctgatcccttcagcatcccaaagctgcggcaaccagccagttatctgcacaccgttgcaggcgagatcaatttccatactctgccccggctggcgacaggcaatgactctgtcggcaagctgctgcatctcctggcactgtgtttcccagaaaatttcaccaaaagcgccatacggtaaatcccctgccgctcggaagcggcggaacaagcgttcggcatcatcctgctcaaccagtgcattcaataatggttgggacttttttaagaaaaccttccaattggccccgttgtagggaaaaatgtttgaaaaagttattttccggcctaatgaaatacaaaattccat

SEQ ID NO: 28091 - DNA, 2259 bp, Homo sapiens
  SIMILAR (271)..(1905): 991254mologous to Homo sapiens dJ1024N4.1 (novel Sodium:solute symporter family member similar to SLC5A1 (SGLT1)),accession number AL109659,Smith-Waterman Score=2798.
atggaataccaggcgtccgaggtgatcgggcagcgtcagtcttcagccactaagccaggaagatctgggaaggagtcagtcacagagccctgggccagagttccaggggctctgggagtggctgccaggcagatgcaccccaagtcaataatcacattcagagagataaatggggagtacactggggctgtggattttcccaggctaggagtccgtgcttctgaggaaacagcgctcagagagctgaagatgagcaaggagctggcagcaatggggcctggagcttcaggggacggggtcaggactgagacagctccacacatagcactggactccagagttggtctgcacgcctacgacatcagcgtggtggtcatctactttgtcttcgtcattgctgtggggatctggtcgtccatccgtgcaagtcgagggaccattggcggctatttcctggccgggaggtccatgagctggtggccaattggagcatctctgatgtccagcaatgtgggcagtggcttgttcatcggcctggctgggacaggggctgccggaggccttgccgtaggtggcttcgagtggaacgcaacctggctgctcctggcccttggctgggtcttcgtccctgtgtacatcgcagcaggtgtggtcacaatgccgcagtatctgaagaagcgatttgggggccagaggatccaggtgtacatgtctgtcctgtctctcatcctctacatcttcaccaagatctcgactgacatcttctctggagccctcttcatccagatggcattgggctggaacctgtacctctccacagggatcctgctggtggtgactgccgtctacaccattgcaggtggcctcatggccgtgatctacacagatgctctgcagacggtgatcatggtagggggagccctggtcctcatgtttctgggctttcaggacgtgggctggtacccaggcctggagcagcggtacaggcaggccatccctaatgtcacagtccccaacaccacctgtcacctcccacggcccgatgctttccacattcttcgggaccctgtgagcggggacatcccttggccaggtctcattttcgggctcacagtgctggccacctggtgttggtgcacagaccaggtcattgtgcagcggtctctctcggccaagagtctgtctcatgccaagggaggctccgtgctggggggctacctgaagatcctccccatgttcttcatcgtcatgcctggcatgatcagccgggccctgttcccagacgaggtgggctgcgtggaccctgatgtctgccaaagaatctgtggggcccgagtgggatgttccaacattgcctaccctaagttggtcatggccctcatgcctgttggtctgcgggggctgatgattgccgtgatcatggccgctctcatgagctcactcacctccatcttcaacagcagcagcaccctgttcaccattgatgtgtggcagcgcttccgcaggaagtcaacagagcaggagctgatggtggtgggcagagtgtttgtggtgttcctggttgtcatcagcatcctctggatccccatcatccaaagctccaacagtgggcagctcttcgactacatccaggctgtcaccagttacctggccccacccatcaccgctctcttcctgctggccatcttctgcaagagggtcacagagcccggagctttctggggcctcgtgtttggcctgggagtggggcttctgcgtatgatcctggagttctcatacccagcgccagcctgtggggaggtggaccggaggccagcagtgctgaaggacttccactacctgtactttgcaatcctcctctgcgggctcactgccatcgtcattgtcattctcacacgcctcacatggtggactcggaactgccccctctctgagctggagaaggaggcccacgagagcacaccggagatatccgagaggccagccggggagtgccctgcaggaggtggagcggcagagaactcgagcctgggccaggagcagcctgaagccccaagcaggtcctggggaaagttgctctggagctggttctgtgggctctctggaacaccggagcaggccctgagcccagcagagaaggctgcgctagaacagaagctgacaagcattgaggaggagccactctggagacatgtctgcaacatcaatgctgtccttttgctggccatcaacatcttcctctggggctattttgcgtga

SEQ ID NO: 28092 - DNA, 422 bp, Homo sapiens
  SIMILAR (222)..(269): 471254mologous to Homo sapiens Human secreted protein, SEQ ID NO: 6337,accession number G02256,Smith-Waterman Score=39.
tatttcgtcttggtcacggccggcggcggacagagccgcggaggaaccgcgagaccccagggcccagagcaggtccagccacccgtctggctccgtagtccgcgaagtctgcagtaaaggagccgcgtgggaccggggccgaagtccctagggcctggcaccgcgtgcccctctctcgggccctcggcttgggggtctcgcagcgccctgccgtcgtgcaccccacactgcccccatttctacaggggcccacctggtcaccacaccctcttggtccacccgcggatctcagcgtgtggctgacctctggccagcatggtgcagccgcagacgtccaaagctgaaagcccagccttggcagcgtctccgaatgcccagatggatgacgttattgacaccctgacctccctgcgcctcaccaa

SEQ ID NO: 28093 - DNA, 735 bp, Homo sapiens
  SIMILAR (576)..(647): 831254mologous to Homo sapiens Human secreted protein, SEQ ID NO: 7956,accession number G03875,Smith-Waterman Score=105.
caaagtccagtcaaattctttattatacaacgtgagtttactgacttgaacagaaagagggagcaagagaagcattctaggaaacaggtgtctaaaaagaatccaaagttcaagcaccttcctattctagcagcatccgccctgatccagcatggcggcaagagcttctgccagttcacagcctgactacacggcaggcgcctttccggaaccgcccgctgggtagattaaatttctccggcgccctgtaatgacacacacacaaaaaaaacccgggcgcgccttgtaagagaaaagaatttgaagtgagtatttaaacttattttataaaagtacttccctaattgttagtgtgttattatacagaagagaaatgtgattcactagaagaactcacaggagtcagtatatggccatacttgtggcaagctcttttatggcaaaagaatacaaagcagtgtcagcaaagggaaaaggtgcttgggaagcagtctggaggaacccaggtagaagcttccaagagtcgtcccccagtggagtcacacaggatgcactgaattccccttgtgacaagttatactcttcccaaatgtagagacacaatgcgggacagcctcagccaggttctccagagatgtgagtcagcaattcttttttaattgcttttcatttcaaatgaatgctacaccaaaatgtattttcttggcaagcctagctcttctgcctccagagctc

SEQ ID NO: 28094 - DNA, 499 bp, Homo sapiens
  SIMILAR (10)..(393): 991254mologous to Homo sapiens Human secreted protein, SEQ ID NO: 7956,accession number G03875,Smith-Waterman Score=660.
ctggtcgggatgagtggtggagggacagagacccctgtgggttgtgaggccgccccgggcggtggcagcaagaagagggactccctggggactgcgggctcagcgcacctcattatcaaggatcttggagaaattcattcaaggcttttggatcacagaccagttattcaaggtgaaactcgttattttgtaaaagaatttgaagaaaaacgtggtcttcgagaaatgcgagttcttgaaaatttgaagaacatgatccatgaaacaaatgaacatactcttcccaaatgtagagacacaatgcgggacagcctcagccaggttctccagagattgcaagcagctaatgactcagtctgtagactccaacagagggaacaggaacgaaaaaaagattcatagtgaccactttagtagctagttgagaaacagcatatgctccagtgggacaacttcatgaaggagcaacccaacaaaagggctgaagtggatgaagagc

SEQ ID NO: 28095 - DNA, 525 bp, Homo sapiens
  SIMILAR (308)..(427): 971254mologous to Homo sapiens GK003,accession number AF226046,Smith-Waterman Score=204.
tgcccacctcacagcaagcgtggcggcccaacactaggttttttaaaaactgtgactatcagtgttttaaaaattgcccggtaactctagacttcaaaagtgggataagtaatgataaaccaataataaacttaggagaagcatagtctgctttagttatattgttatgccatattatggtcagtaacacgagtaaaggcctaattcatctgctttctaaattgggttcctgtaccttttcctagaaaagccctacatgtatataccttagttaccagctgcacttctcccattaccttatttttaggaaggttatagagatggaatagatgctggcaaagcagttactcttcaacagggcttcaatcaaggttataaggaaggtgcagaagtcattttaaactatggacgactccgaggaacattgaggtaatttttaaagtgtaaatgctgaatcattttaacctcaatactactggaggatgtttctgtataaataaagtgtttaaactgaaaaaaaaaaaa

SEQ ID NO: 28096 - DNA, 1164 bp, Homo sapiens
  SIMILAR (662)..(889): 471254mologous to Homo sapiens GK003,accession number AF226046,Smith-Waterman Score=120.
  misc_feature (1)...(1164): n = a,t,c or g
atggtgaaggtcgtgccggccacgcgaggaaatctgcctcgctcacaactcacaggcacacatcaacactgccaaccgagggagcccaaaatcaccgcaagcgaaaggctccggcggcggccacgggccacagcccgcctccgcgcacacgcagcccctcccgagcctccactcgccgtcttcgccccgccttcggaccggaaggagttgttggcgcttccggtggcctgcgaccccgtaattgcctcggtgatgtcgtgggttcaagcagcctccttgatccagggccctggagacaaaggggacgtgtttgacgaagaagcagacgagtcgctcctggcgcagcgggaatggcagagtaacatgcaaagacgagtcaaagaaggttatagagatggaatagatgctggcaaagcagttactcttcaacagggcttcaatcaaggttataagaaaggtgcagaagtcattttaaactatggacgactccgaggaacattgagtgctttgctctcctggtgtcaccttcataataataattcaactttgatcaataaaataaacaatcttctggatgcagttggccagtgtgaagagtatgtgctcaaacatctgaaatcaatcactccaccgtcccatgttgtagatttattggactccattgagggatatggaccctttggtcatgtagttccagctgagaaaaaggattgatgaagctaaagatggaaagactctgtggaaaataatgctgagtttaaccaaaactggtagccaagagcccatagtggggatagattgttccatatgtagaaatgttgtagaacacaggagcatgcacattcaggaaaacccaagccccacatggattttggaacagacagccagttttagttaaacagctgggcctatcagtagatgtattacaacacctcaaacaactataaaattatccttcccttttctaatgaaaataatgttcagaacatttggtttccctaccaatcgaaatttgtactggttttctgcatcaaaccacctcaactgtagggttaccccntttatggaagtttgaaattancacactattgttcttcaaaattacacaccctattaaatgtaatataagcctttaaaaaaaaaaccaaaaaaagggcggccgct

SEQ ID NO: 28097 - DNA, 735 bp, Homo sapiens
  SIMILAR (577)..(648): 871254mologous to Homo sapiens Human secreted protein, SEQ ID NO: 7956,accession number G03875,Smith-Waterman Score=111.
tcaaagtccagtcaaattctttattatacaacgtgagtttactgacttgaacagaaagagggagcaagagaagcattctaggaaacaggtgtctaaaaagactccaaagttcaagcaccttcctattctagcagcatccgccctgatccagcatggcggcaagagcttctgccagttcacagcctgactacacggcaggcgcctttccggaaccgcccgctgggtagattaaatttctccggcgccctgtaatgacacacacacaaaaaaaacccgggcgcgccttgtaagataaaagaatttgaagtgagtatttaaacttattttataaaagtacttccctaattgttagtgtgttattatacagaagagaaaagtgattcactagaagaactcacaggagtcagtatatggccatacttgtggcaagctcttttatggcaaaagaatacaaagcagtgtcagcaaagggaaaaggtgcttgggaagcagtctggaggaacccaggtagaagcttccaagagtcgtcccccagtggagtcacacaggatgcactgaattccccttgtgacaagtcatactcttcccaaatgtagagacacaatgcgggacagcctcagccaggttctccagagatgtgagtcagcaattcttttttaattgcttttcatttcaaatgaatgctacaccaaaatgtattttcttgccaagcctagctcttctgcctccagagct

SEQ ID NO: 28098 - DNA, 499 bp, Homo sapiens; identical to SEQ ID NO: 28094
  SIMILAR (10)..(393): 991254mologous to Homo sapiens Human secreted protein, SEQ ID NO: 7956,accession number G03875,Smith-Waterman Score=660.

SEQ ID NO: 28099 - DNA, 723 bp, Homo sapiens
  SIMILAR (681)..(722): 1001254mologous to Mus musculus Similar to nucleolar protein (KKE/D repeat),accession number BC002231,Smith-Waterman Score=64.
ggcacgagtgaagacaaggggtaacaccccaaaatatggactcattttccactccaccttcattggccgagcagctgccaagaacaaaggccgcatctcccgatacctggcaaacaaatgcagtattgcctcacgaatcgattgcttctctggtatgggtgggggggcgttggcaggtgtgagaaggggctgggtggctgggtggggaggcttgcaaccatagcttccacaatgatggcaatatttttcgtcaacagcagttcacctagtgagtgttgagactctgggtctgagtgaagctgagggtagagggaacacagggttggggtagtttctctctttgggctgacaggctttgtcacccacacacatccagaggtgcccacgagtgtattcggggagaagcttcgagaacaagttgaagagcgactgtccttctatgagactggagagataccacgaaagaatctggatgtcatgaaggaagcaatggttcaggtcagttgggctttgctgggtgtggagtggcatagctagctgttggaggtgatgaactgtctgagcctgaccttgtagaatggaggcaaaaaaactgatttaatgagcctgatccaataaagccagaaaggagtcctcagagcaccagaagtcttcaggcccttttagcacttttctttgaccaggcagaggaagcggctgctgagattactaggaagctggaga

SEQ ID NO: 28100 - DNA, 5027 bp, Homo sapiens
  SIMILAR (1906)..(2340): 1001254mologous to Homo sapiens dJ686C3.3 (novel gene),accession number AL049712,Smith-Waterman Score=778.
atggggtttcaccatgttggccacgctggtctcgaacacctgacctcaggtgacaggctgggaaggagatcctcaagcaagcgggctctcaaagccgaggggaccccaggcaggcgcggagctcagcgaagccagaaggagcgcgccgggggcagcccaagcccggggtctccccggaggaagcaaacagggcgcaggagacacagagaagagctgggggagcaggagcggggcgaggcagagaggacctgcgagggcaggagaaagcgcgacgagagggcctccttccaggagcggacagcagccccaaagagggaaaaggagattccgaggagggaggagaagtcgaagcggcagaagaaacccaggtcatcctccttggcctccagtgcctctggtggggagtccctgtccgaggaggaactggcccggatcctggagcaggtggaagaaaaaaagaagctcattgccaccatgcggagcaagccctggcccatggcgaagaagctgacagagctcagggaggcccaggaatttgtggagaagtatgaaggcgccttgggaaaggggaaaggcaagcaactatatgcctacaagatgctgatggccaagaaatgggtcaaatttaagagagactttgataatttcaagactcaatgtatcccctgggaaatgaagatcaaggacattgaaagtcactttggttcttcagtggcatcgtatttcatctttctccgatggatgtatggagttaaccttgtcctttttggcttaatatttggtctagtcataatcccagaggatgtctacgtgatccctgaggaaccctcagttatgctgcaggagctggctggcaaggccccactggatgacaagtttatgtacttctcttccaacactggatcctacggtctaggttttgaccaaggctacaattatcttgaggctgaactgaagaagatccgcttccaagctcactcacatggctactggcagatctcagaagatacaatttcaagcttactcacgtggcttctggcaggcctcagaaaatctgcttccaaccttacttatgtggctgttcccaaggttcagggctatatcaagtactctgcactcttctatggctactacaacaaccagaggaccatcgggtggctgaggtaccggctgcctatggcttactttatggtgggggtcagcgtgttcggctacagcctgattattgtcattcgatcgatggccagcaatacccaaggaagcacaggcgaaggggagagtgacaacttcacattcagcttcaagatgttcaccagctgggactacctgatcgggaattcagagacagctgataacaaatatgcatccatcaccaccagcttcaaggaatcaatagtggatgaacaagagagtaacaaagaagaaaatatccatctgacaagatttcttcgtgtcctggccaactttctcatcatctgctgtttgtgtggaagtgggtacctcatttactttgtggttaagcgatctcagcaattctccaaaatgcagaatgtcagctggtatgaaaggaatgaggtagagatcgtgatgtccctgcttggaatgttttgtccccctctgtttgaaaccatcgctgccctggagaattaccacccacgcactggactgaagtggcagctgggacgcatctttgcactcttcctggggaacctctacacatttctcttggccctgatggatgacgtccacctcaagcttgctaatgaagagacaataaagaacatcactcactggactctgtttaactattacaactcttctggttggaacgagagtgtcccccgaccacccctgcaccctgcagatgtgccccggggttcttgctgggagacagctgtgggcattgaattcatgaggctgacggtgtctgacatgctggtaacgtacatcaccatcctgctgggggacttcctacgggcttgttttgtgcggttcatgaactactgctggtgctgggacttggaggctggatttccttcatatgctgagtttgatattagtggaaatgtgctgggtttgatcttcaaccaaggaatgatctggatgggctccttctatgctccaggcctggtgggcattaatgtgctgcgcctgctgacctccatgtacttccagtgctgggcggtgatgagcagcaacgtaccccatgaacgcgtgttcaaagcctcccgatccaacaacttctacatgggcctcctgctgctggtgctcttcctcagcctcctgccggtggcctacaccatcatgtccctcccaccctcctttgactgcgggccgttcagtgggaaaaacagaatgtacgatgtcctccaagagaccattgaaaacgatttcccaaccttcctgggcaagatctttgctttcctcgccaatccaggcctgatcatcccagccatcctgctgatgttcttggccatttactacctgaactcagtttccaaaagcctttcccgagctaatgcccagctgaggaagaaaatccaagtgctccgtgaagttgagaagagtcacaaatctgtaaaaggcaaagccacagccagagattcagaggacacacctaaaagcagctccaaaaatgccacccagctccaactcaccaaggaagagaccactcctccctctgccagccaaagccaggccatggacaagaaggcgcagggccctgggacctccaattctgccagcaggaccacactgcctgcctctggacaccttcctatatctcggccccctggaatcggaccagattctggccacgccccatctcagactcatccgtggagacagggcctgggcctgggcctgggcctgcgcctgcgcctgcgcctgccctgggaacgggttccggcagacgctgaggttgcgttgacgctcgcgccccggctcccgttccaggtgctgttgcacgtgtctgtttgagcacgcaggtcggctacacgcatgctggcgctgaaaggaagtggaggagatcagtctgctgcagccgcaggtgggaggagtccgtgctcaacctggggcaaattccacagcatcagttcgtctggtggccttttgtccctttgcctcatcccaggttgccttggaaaatagccaacgccgtgtctgaaaggggttgttcatgaggacctccgcctgctcttggaagacccacctgccgtccaaaaagaagaaaagtactcttggggagttgggggatcccaaagattggtgccgcaatacaggaaggagttagggtacaacttgccagactggaaggaatcatagctgagattcctgcgaggagttcgtctgcactttccacaaatctgggttgaaagggtctgaaccgattctgtcagctttgtaaagcacaagctggggcttgggacacagctattcccggtgccaaaagttaagtttaatgtgaacccgggtggacaatatgatcatccagtccattagcctccctggaccaagctggataaaggacatcaataccttctctaatgccgtgtcaagggagtggtacggggtaatcactttccggagcttggttgaagatcatcaaccgacaatgccacatactgccgtcttgcccagttttattggaaaccgaaggagacttgaatgaggacaagcatggagaagctggaggagctgacaatggatggggcccaaggctaaggctattctggatgcctcacggtcctccatgggcatggacatatctgccactgacttgataaacatcgagagcttctccagtcgtgtggtgtctttatctgaataccggccagagcctacacacttacctgcgctccaagatgagccaagtagcccccagcctgtcagccctaattggggaagcggtagggtgcacgtcttcatcgcacatgcttggcagccttcaccaacctgggccaagtattccagcattccacagtgcaagatcttgggggctgaaaaggccctgttcagagccctgaagacaaggggtaacaccccaaaattatgggactccattttcccactccacccttcattgggccgagcagctgcccaagaactaaaggcccgcatctccccgataccctggcaaacaaatgcagtattgccctcacgaatccgattgcttctctggctttgtcacccacacacatccagaggtgcccacgaagtgtattcggggagaagcttcgagaacaaagttgaagagcgactgtccttctatgagactggagagataccacggaaagaatctggatgtcatgaaggaagcaatggttcaagcaagaggcagaggaagcggctgctgaggattactagggaagctggagaaacaggagaagaaacgcttaaagaaggaaaagaaccgggctggcttgcactttgcccctcgcgtcttcaggaaaccagcagttagttcctccagaggagttgttgaggaagacgagtgaaaacccccaaaaaggaaggaaaaagccaaaagccccccaggaggtttccttcagggagaatgggaattgggaagaccccattctatcttcttttctcccaaaaccccaaggaaaaagaaatctttttcccaaggaggagttgatgagttagcgatccttgaagagacccgctggcagcacccagttattcccaagaggaagaagtctacacccaaggaggaaacagttaatgaccccttggaaggcaggccacaaaaagtggctccaagaaaaaggaggaaattctccaaaggaggagccggtcaagcagtgggcctgaagagccggttggcaagagcagctccaagaagaagaaaaagttccataaagcatcccaggaagattagaatgcaaatggacattctctgggaggtggggcataccatagcccaaggtgctcatttcccaccctgtgcccgtgttccccaataaaaacaaattcacaagaaaaaaaaaaaaaaaaaaaaaattcctgaggccgcaagggaattc

SEQ ID NO: 28101 - DNA, 461 bp, Homo sapiens
  SIMILAR (22)..(105): 601254mologous to Homo sapiens Human secreted protein, SEQ ID NO: 4608,accession number G00527,Smith-Waterman Score=83.
ttgcttttaatttttttaaatttattttaaagtcagggtctcagtatgttgtgcaggctagtcttgaattcctgggctcaagtattccttcagcctcagcctccctgctgtgtagctgggactaaacatgcatgccaccaagctgggattcgaagactggacggctccccggcggctcagcggcggggcgcgagcgctgcccatgcagcccgtggcggcgtttccccggcggcgctaccgcagcgggaaggcggagcaggctcgaggcctggccgaattgcgggcaggcggtatgctagcccgccactcggctgcgcggcacctgttgcggaggactactgagggggcatctggccgcaagctcaccggaggcgcctccccaactgaagatctcggtccatctcagggtggcctctgactctccgacccggcgctggtgcaggctgcatgagaagctctgg

SEQ ID NO: 28102 - DNA, 544 bp, Homo sapiens
  SIMILAR (102)..(242): 351254mologous to Homo sapiens Human secreted protein encoded by gene No. 116,accession number Y27894,Smith-Waterman Score=62.
gtgatgtcaatatttttattaggtatggcctctggtgttttcttagtccatttgggttgctatagcaaaataccaaagatactggacaggtaataaacaacagacatttattgcccacagttctggagactggaagtccagtatcaagatgcggcagattcaatgtctggtggggacccactttctcattcatagacagagccttccctctgtgtcctcacactgtggaaggagcaagcgagctctctggaatcctttttgtaggagtgctcatcccattcatgaggctccactctcatgacctcatcacctcccagaggctccacctgaaactcatttgatttggagatttaaagagtagctgtagggcatgttgtacaacttttagaaactttccgaaatgttagctgcatttcattatttaaccctccacttccatcttccaatcatctcttcggaacatgctgtggtgggattcgaagactggacggctccccggcggctcagcggcggagcgcgagcgctgcccatgcagcccgtggcg

SEQ ID NO: 28103 - DNA, 356 bp, Homo sapiens
  SIMILAR (15)..(98): 571254mologous to Homo sapiens Human secreted protein, SEQ ID NO: 4608,accession number G00527,Smith-Waterman Score=80.
taatttttttaaatttattttaaagtcagggtctcactatgttgtgcaggctagtcttgaattcctgggctcaagtattccttcagcctcagcctccctgctgtgtagctgggactaaacatgcatgccaccaagctggcgctaccgcagcgggaaggcggagcaggctcgaggcctggccgaattgcgggcaggcggtatgctagcccgccactcggctgcgcggcacctgttgcggaggactactgagggggcatctggccgcaagctcaccggaggcgcctccccaactgaagatctcggtccatctcagggtggcctctgactctccgacccggcgctggtgcaggctgcat

SEQ ID NO: 28104 - DNA, 1779 bp, Homo sapiens
  SIMILAR (1528)..(1716): 691254mologous to Homo sapiens envelope protein,accession number AF072508,Smith-Waterman Score=207.
atgacaactaaaggcaacgtgggatcctggatgggatcctgggacagcaagggaacattattggaaaaatctccagcttgctcagtagtcccccaacaatgccacactactctggccacatggactctggtgaaccaactcaaagcactgcagccaggtgcacgaccctgctccaatcatacatgtgatgacagggtcccagtgtgggaaggagaagaatgtcccagcctgacccaaggcccacacagcagctctgtcggctgggaaggcctgcaggctgcaaggccgcgcgaatgccccgggccagccccaaccactgtccctaggccagcggcgtctcttactgggattcgaagactggacggctccccggcggctcagcggcggggcgcgagcgctgcccatgcagcccgtggcggcgtttccccggcggcgctaccgcagcgggaaggcggagcaggctcgaggcctggccgaattgcgggcaggcgctctgaggtgggagtaggaggacgtcgcattgacgattgggcagggtcctgcgtaagggagcacacgaccctggaagtagcgagcaaccggattggcggtttccttcgcaaacgtcttgccttctggggcctggcaattggtctttccaagtgtcggaagcgacggggatatggtctggaaacatctggttttgaacatctggtattgaagcgctgggaggcaaaacgtctgccccgcgcgcccatgcggcgagtgtcggtccgtgcccctgctcaaggacagctcgggccacgtgcgccccggtccccagaaggcctggctccggactgtgctgccctggggcgtcactgggcaaggagagcagtgggtcggcgtcgaggggaggggacctgggcttcggagcggttgctccgggtgggcactggccgcgcaacccctctcccgcgcagagacgctagctccaccaattggaggaaaatactgggcacctgtcaggtagttaaaaacgttagcatggtgctggacttaagactcagctctcaacatgggcagttatgtgggacccattccccactacccttgccaaggccccaggtttctaaagggctagcagaaaacagagagacagaggggagagaaagagagagaggcaaagcaagagtcaaaaagagaaagaaagaagaaagagaaagaaagatagaagaaaaaaacagtgtgccctattcctttaaaagccagggcaaacattccctccaaggcaaagatgccccaaagatgtattctggagtattcagcccagtcagagaatatgtacctgtttccttgtcagacttgaagaaaattgaaatagacctaagtaaattctcagataaccttgatggctatgttaatgttttgcagtatccccatagacccaaagtccaacaaggactccaaaaggttgttgaggacctaaaagcccaaggcctaataaaaccatggactagcccctgcaatactccaattttaggagtacagaaatctaatggacagtggagaatcgaagctgtaaaactacgaatcattcttcagatggagccacagattcagtccatgactaagatctaccacagacccctggaccagcctgctagcccatgctccgacattgatgacatcaaaggcacccctcacagggaaatctcaactccacaacccctactacaatacaattcagcaggaaacaaagtgatcattggccaacctccccaacagcacttgggatttcctgtcgagaagggggactga

SEQ ID NO: 28105 - DNA, 367 bp, Homo sapiens
  SIMILAR (180)..(73): 441254mologous to Homo sapiens testis-specific Testis Transcript Y 1,accession number AF000990,Smith-Waterman Score=60.
ggcacgaggatggaataaggtttccccaacagaactgcgcttcccaagaatgggaataagaatgggggtgaggccagcatggtgcgggggtgtctagagagagcagaaacctgaggctgtcccaatggcatgccacagggggaacgcctgagccgctttggactccgcacagagaccacaggcactgtcaccttccgcttgcactgtctgcagcagtccaggtgagtgacttggccctctgcctcagggcacctttagccctgaggggtggagacagccgtaaccatgtggctggcctccctgcagggccttcatggaatcgagctcccttcagaaaaggatgcggagtgtgttggacccgctggaa

SEQ ID NO: 28106 - DNA, 479 bp, Homo sapiens
  SIMILAR (182)..(51): 361254mologous to Buthus martensii beta toxin precursor,accession number AF241269,Smith-Waterman Score=73.
cccaaggctatgagtatgacaatctctacgtccacttctttgtagaattgccaactgctcactggtcaagcccagcattccagcagctctcaggagtaacacagacctgcaccaccaagtccctggcaatggacaaggtggctcacttctcctacccattcacgtttgaagccttcttcctccatgaggatgaatcttctgatgcactcccggagtggcctgtgctctactgtgaggtcctctcgctggacttctggcagaggtaccgtgtggaaggctatggggctgtggtgctgcctgccactccagcgacaatgacgtggccttggcactgacttcctgacagtctctccatgtgcttcatgctcctctgattggactcagggtgagaagctgtatggcaaaattggctcatagcatatgtgtattgaatgaatcagcattcagtttggaataaaagcatctgtcttttactgtga

SEQ ID NO: 28107 - DNA, 2414 bp, Homo sapiens
  SIMILAR (431)..(1693): 961254mologous to Homo sapiens unnamed protein product,accession number AK000352,Smith-Waterman Score=2096.
gggccgcgagttcgtctggagcactgacaccggggaggcagagtatctttttcgggaccccgtgcgcaacttgcgcctccgagggcacctgcaaagaatcacatggggcaactttcttcattatcagcctgctgccgagctcgggaaggacctcatagacttggccacttttaggcctcagccaactgccagtggacaccgcccagaggaagacgaagaggaggagattgtgattgggtggcaggagaagctctttagccagtttgaagtagatctgtaccaaaatgaaacagcctgtcagagtcctttggattatcagtaccggcaggagatcctgaagctggagaattcgggtggcaagaaaaaccgacgaatctttacctacactgactctgatagatacaccaatttggaggagcactgtcagagaatgaccactgcagccagcgaggtgccttcattcttggtcgagcgaatggcaaatgtcaggcgtcgccggcaggacaggcgagggatggagggcggcatcctcaagtcacgcatcgtcacctgggagccctcagaagagtttgtcaggaacaaccacgtcattaacacccctcttcagacaatgcacatcatggcagacctggggccctataaaaagcttggctataagaagtatgaacatgtcctgtgtactctgaaggtggatagcaatggtgtgatcacagtaaagcctgacttcacgggcctcaaaggaccctacaggattgagacggagggggagaagcaggagctgtggaaatatacgatcgacaatgtttccccccacgcacagccggaggaggaggagcgggaacggcgagtgttcaaggatctttatggccggcacaaggagtatctcagcagcctcgtaggcaccgactttgagatgactgtcccaggtgccctccggctctttgtaaatggagaggtcgtttcagcccaaggctatgagtatgacaatctctacgtccacttctttgtagaattgccaactgctcgcgagcttactatatttggtctttggctttcagactggtcaagcccagcattccagcagctctcaggagtaacacagacctgcaccaccaagtccctggcaatggacaaggtggctcacttctcctacccattcacgtttgaagccttcttcctccatgaggatgaatcttctgatgcactcccggagtggcctgtgctctactgtgaggtcctctcgctggacttctggcagaggtaccgtgtggaaggctatggggctgtggtgctgcctgccactccaggctcacacaccctgacagtctccacgtggagacctgtggagcttggcacggtggctgagctgaggaggtttttcattggcggttctctggaactggaggacctctcctatgtacggataccaggatccttcaagggggaacgcctgagccgctttggactccgcacagagaccacaggcactgtcaccttccgcttgcactgtctgcagcagtccagggccttcatggaatcgagctcccttcagaaaaggatgcggagtgtgttggaccgtctggaagggttcagccagcagagttccattcacaatgtgctagaggccttccgtcgagcccggcgccgcatgcaggaggcccgggaaagccttccgcaagaactaatgggccccttttgaaaccttggcttcttacctaacagcagccctggcccacagtgcaagaggacaagatgggggatatctgaggccagtgctctcctgcctcttcgtctttctgattaggagaccacgttggtcttgttgaggaaccaggaaaagctggggaaatttcccggctgggcccctcttgccttaggcctttttgcagggtcttctcccctacccctgtggaaaataaaagccagagaccctgtggccccccccctttatatttgcagccactgtccaatgggcatccacagcaaggcaggctttttgaatctgaaagctgtttgggggtgaccccccaaagtgaagtctggcccttgacctcacttttctggcttgtcctcaaagtagcaggggatctgcctgttcctcccacccctttaaaaatgggagcctttcatccttcccaagacccaaagaaggaaggaaggtgggccggtgagagggtcttaaatccccagcctgtgaagtctcagcctctttcccagggaagcctcaatctactgcttggggcttgcttgaggttgagatatgagttatttcttgagtaagtgaaggctgaaggcagtgctgagtcctttctgctagctgggtggtatcttttactgtgtttttttgtttgtttgttttttttgttttttgttacataaaccccttttattttgaaaaaaaaaaaaaaaagggc

SEQ ID NO: 28108 - DNA, 1281 bp, Homo sapiens; identical to SEQ ID NO: 5683
  SIMILAR (797)..(889): 931254mologous to Homo sapiens putative p150,accession number U93574,Smith-Waterman Score=148.

SEQ ID NO: 28109 - DNA, 684 bp, Homo sapiens
  SIMILAR (61)..(2): 451254mologous to Homo sapiens putative p150,accession number U93572,Smith-Waterman Score=40.
tcacgtggtttctgtctttggttctgttatatgatggattacgtttattgatttgtgtatgttgaaccagccttgcatcgcagagatgaagccaacttgatcttggtggataagctttttgatgtgctgctggattcggtttgccagtattttattgaggatttttgcatcgatgttcatcagggatattggtctaaaattctctttttttgttgtgcctctgccaggctttggtatcaggatgatgctggcctcataaaatgagttagggaggattccctctttttctattgactggaatagtttcagaaggaatggtaccagctcctctttgtacctctggtagaattcggctgtgaatccatctggtcctggactttttttggttagtaggctattaactattgcctcaatttcagagcctgttattggtctattcagggattccacttcttcctggtttagtcttgggagggtgtatgtgtccaggaatttatccatttcttctagattttctagtttatttgcatagaggtgtttatggtattctctgatggtagtttgtatttcttgtgtccaagtgatctcattgttcaattcccacctaggagtgagaacatgcagtgtttggttttctgtccttgtgatactttgctgagaatgatggtttccagcttcatccat

SEQ ID NO: 28110 - DNA, 636 bp, Homo sapiens
  SIMILAR (396)..(10): 451254mologous to Homo sapiens S164,accession number AF109907,Smith-Waterman Score=314.
tcaccgatttctgcttttgtttctggctcccgggtctgtctgttctgtttctttctttctttctttctttctttctttctttctttctttctttctttctttctctttctttctctttctctctctctctttttctctttctttctgtctctctctctttccttccttcctttctttttctctctctttctctctctctctttctttctcttttctctctcctttctgtctctcctttctttctctcttttctttctttctctttcttctgtctttctctctctcctcttctctcctcttctcttctcttctcttctcttctcttctcttctcttctcttctcttcctcctcctcctcctcctctctctctctctcttgttctttctctcttttttattctcagaatctgtgctgtgggaaggatcagtggcaggactgcagacccctgccctctcctctgctttaaacagggcagttcttcctgtgtcctgctccatgatagaccagctgtgtgaccctggcaagtacttcatctctttatgcctgtttctacacctgcgagtgagaacatgcggtgtttggttttctgtccttgtgatagtttgctgagaatgatggtttccagcttcatccat

SEQ ID NO: 28111 - DNA, 484 bp, Homo sapiens
  SIMILAR (2)..(58): 841254mologous to Homo sapiens PRO1546,accession number AF116638,Smith-Waterman Score=82.
atggatgaagctggaaaccatcattctcagcaaactatcgcaaggccaaaaaaccaaacatcgcatgttctcactcataggtgggaattgaacaatgagaacacttggacagaggaaagggaacatcacacactggggcctgttgtgggccagcaggaaggctggaatctcagtcctacgaccaaaagaaactctattctaacaggccaaatcagtctggaagaagatcttaagcttcaggatatgactgcacagaatgtcggatgggatcttttggctttgcttctatatctctatgcacttatgttggctggttttatattgggctgtatggttcaaactacagactaccagattgagccgatggctcacagattctctgcctgtgtcgtatggctattgccaggggatgaacgagggttgctcttcgcaattcaagactgtctttcctaccctcttcagtgcctcttgatgttaaaaccag

SEQ ID NO: 28112 - DNA, 666 bp, Homo sapiens; identical to SEQ ID NO: 27005
  SIMILAR (187)..(387): 581254mologous to multiple sclerosis associated retrovirus element gag polyprotein,accession number AF123881,Smith-Waterman Score=187.

SEQ ID NO: 28113 - DNA, 603 bp, Homo sapiens
  SIMILAR (310)..(600): 741254mologous to Homo sapiens Human secreted protein clone pe318_4,accession number Y29866,Smith-Waterman Score=355.
atggatgaagctggaaaccatcattctcagcaaagtatcacaaggacagaaaaccaaacactgcatgttgtcactcataggtgggaattgaacaacgagatcacttggatacagagcggggaacatcacacactggggcctttcaggggctggggggctgggggatggatagcattaggagaaatacctaatgtaaatgatgagttgatgctgcagcaaatcaacatgggtgcagcccttgtagctcctgtcaccacagggttggagttgagtgcctttagcttttccaggctcaggatgcaagctgccggtgctggatcattctcaggtctaaagggcagtgatcctcttcccacagcttcactaggcagtgccctgaaaacaaccctttttgctgcacatggttatgtgcttcacatgatcactactgcagcagaatggtctatgtcattttccttctttggttttttcctgacttacattcgtgattttcagaaaatttctttacgggtggaagccaatttacatggattaaccctctatgacactgcaccttgccctattaacaatgaacgaacacggctactttccagagatatttga

SEQ ID NO: 28114 - DNA, 519 bp, Homo sapiens
  SIMILAR (518)..(462): 731254mologous to Homo sapiens PRO1546,accession number AF116638,Smith-Waterman Score=72.
ctacagaagactgagatttctctcgatgagagtaatgtactctgcacactgcacaaagaaaaaccaccgctttgcactcttgatattgacgtcaattctttgactcagtaggagtccatctgccttgtactttacctgttccacactttccaggcttgtccagccagctatctgatgacagttgtcaggattggcttctgggatgagagagtcccgggatgtgcttggtctaagattcacccccttgctcctctggattgtgcattccagagcgtgggcattagtggagtctgcagtgatgtcaacatgggagtgttgggtgggagatgagaggggtactggtgtgaaattggctggggcccacacagagctgccaacaggccctggtgtgtgatattcccctccctgtgtccatgtgttctcattgttcaactcccacttatgagtgagaacatgtggtgtttggttttctgtctttgtgatattttgctgagaatgatggtttccagcttcatccat

SEQ ID NO: 28115 - DNA, 381 bp, Homo sapiens
  SIMILAR (381)..(166): 691254mologous to Homo sapiens Human secreted protein, SEQ ID NO: 7348,accession number G03267,Smith-Waterman Score=249.
tcatgaggtgtccacctccatgacccagaaaccttccactaggcccaacctgtcaataccaccacactggggatcaaatttcaacatgagatttggtggggatgaacaaaccgtagccacaccgtagcagtgggaagctatgagtgagaacatgcggtgtttggttttttctccttgtgatagtttgctgagaatgatggtttccagcttcatccatgtccggtggaattcggctgtgaatccatctggtcctggacttttttcggttggtaagctattaattattgcctcaacttcagagcctgttattggtctattcagagattcaacttcttcctggtttagttttgggagggtgtatgtgtcgaagaatttatccat

SEQ ID NO: 28116 - DNA, 1395 bp, Homo sapiens; identical to SEQ ID NO: 11100
  SIMILAR (224)..(286): 851254mologous to Homo sapiens PRO1546,accession number AF116638,Smith-Waterman Score=93.

SEQ ID NO: 28117 - DNA, 3169 bp, Homo sapiens
  SIMILAR (1)..(1140): 901254mologous to Homo sapiens putative p150,accession number U93563,Smith-Waterman Score=1725.
atgaacattgatgcaaaaatcctcaataaaatactggcaaacccaatccagcagcacatcaaaaagcttatccatcatgatcaagtgggcttcatccctgggatgcaaggctgcttcaatatatgcaaatcaataaatgtaatccagcatataaacagaaccaaagacaaaaaccacatgattatctcaatagatgcagaaaaggcctttgacaaaattcaacaacgcttcatgctaaaaactctcgataaattaggtattgatgggacgtatctcaaaataataagagctatctatgacaaacccacagccaatatcatactgaatgggcaaaaactggaagcattccctttgaaaactggcacacgacagggatgccctctctcaccactcctattcagcatagtgttggaagttctggcccgggcaatcaggcaggagaaggaaataaagggtattcaattaggaaaagaggaagtcaaattgtccctatttgcagatgacatgattgtatatctagaaaaccccattgtctcagcccaaaatctccttaagctgataagcaacttcagcaaagtctcaggatacaaaataaatgtacaacaatcacaagcattcttatacaccaataacagacaaacacagagcaaaatcatgagtgaactcccattcacaattgcttcaaagagaataaaatacctaggaatccaacttacaagggacgtaaaggacctcttcaaggagaactacaaaccactgctcaaggaaataaaagaggatacaaacaaatggaagaacattccatgctcatgggtaggaagaatcaatatcgtgaaaatggccatactgcccaacgtaatttatagattcaatgccatccccatcaagctaccaatgactttcttcacagaattggaaaaatctactttaaagttcttatggaaccaaaaaagagcctgcatcgccaagtcaatcctaagccaaaagaacaaagctggaggcatcacgctacctgacttcaaactatactacaaggctacagtaaccaaaacagcctgggacatggatgaagctggaaaccatcattctcagcaaactatcgcaaggacaaaaaaccaaacgccgcatgttctcactcataggtgggaaatgaacaacgagaacacctggacacaggaaggggaacatgacacaccggggcctgtcactggataccaacatgagcatgaaacatactccacaaaggagctgttcaacaaggggtcccatgatttcagggccactagtccagaaaaggatattcagtcacggtgcaaaagaagagggtatatgaggacctctttgaagggagctgagagtgagtatcctgatcccaccagcaggaaggaggacatcctgcccttagcaaaacatgctggaatgggtttacagtgggtccgaggacatattctagtgaaagaccaaagccttgccagtcctctaggcacagtcgttatctccctggacaaatgtgtacaagtcactataagataccaagttaaaggaattcacatcattatatctcccagaggacaaagcctagaactttctacattcaagtcagtgaatattggggagtggggaatccatgaattcattatgtggatcaacaaaattgatagactgctagcaagactaataaagaaaaaaagagacaagaatcaaatagacgcaacaaaaaatgataaaggggatgtcaccaccgatcccacagaaatacaaactaccatcagagaatactacaaacacctctacgcaaataaactagaaaatctagaagaaatggataaattcctagacacatacaccctcccaagactaaaccaggaagaagttgaatctctgaatagaccaataacaggatctgaaattgtggcaataatcaatagcttaccaaccaaaagagtccaggaccagatggattcacagccgaattctaccagagatgcagaaaaggtctttgacaaaattcaacaacccttcatgctaaaaactctcgataaattaggtattgatgggacgtatctcaaaataataagagctatctatgacaaacccacagccaatatcatactgaatgggcaaaaactggaagcattccctttgaaaactggcacacgacaaggatgccctctctcaccactcctattcaacatagtgttggaaattctggccagggcaatccggcaggagaaggaaataaagggtattcaattgggaaaagaggaagtcaaattgtccctgtttgcagacgacatgattgtatatctagaaaaccccattgtctcagcccaaaatctccttaagctgataagcaacttcagaaaagtctcaggatacaaaatcaatgtgcaaaaatcacaagcattcttatgcaacaataacagacaaacagagagccaaatcatgagtgaactcccattcacaattgcttcaaagagaataaaatacttaggaatccaacttacaagggacatgaaggacctcttcaaggagaactacaaaccactgctcaaggaaataaaagaggatacaaacaaatggaagaacattccatgctcatgggtaggaagaatcaatatcgtaaaaatggccatactgcccaaggtaatttatagattcaatgccatccccatcaagctaccaatgactttcttcacagaattggaaaaaacgactttcaagttcatatggaaccaaaaaagagcccgcatcgccaagtcaatcctaagccaaaagaacaaagctggaggcatcacgctacctgacttcaaactatactacaaggctacagtaaccaaaacagcatgggacatggatgaagctggaaaccatcattctcagcaaactatcacaaggacaaaaaaccaaacaccgcatgttctcactcataggtgggaattgaacaatgagaacacatggacacaggaaggggaacatcacacaccggggcttgttgtgcggaggagtccagaccctgagcagaacttcaaggctgtcaggtgtttggaccttcctgatcttcaagctcgtttttggctgtcctcacatttcatttcaaaccagccttccttcagtcccttagatgagataagccacgctctttcctgccttggggacttggcacaag

SEQ ID NO: 28118 - DNA, 2831 bp, Homo sapiens
  SIMILAR (823)..(731): 321254mologous to Homo sapiens Human homologue of UNC-53 (Hs- UNC-53/2) sequence,accession number Y85565,Smith-Waterman Score=44.
ttagtaacgcagatcattgccagcttcactcatgttaattcgtggctcaggtccgcagtaagatataccttgtctgcatcccacggcacaatggaagtgagcgtctggcctgccatgggtgtacggggtgtgtggtgcaatatttgtgagcatcatgtacctgcaactctcattaattaaaaagacagctggtacccttccccactccccccgccccacaacagtccctggtgtgtgatgttccccttcctgtgtccgtgtgttctcattgttcaactcccacctatgagtgagaacatgcggtgtttggttttttgtccttgtgatagtttgctgagaatgatggtttccagcttcatccatgtccctttctcgtggctgcttggcggtgggggtggggaggtgactggtttggatttatcatagttgttaaagctctggctgcgtcggttgttagcagtagttgaccctccgcgtgttttggcctcgctgcctgcagcggataccctcgcggtaggacctggaagtctagagatctttttctgacccagagtgaagcggatgattttgctttgagatgagtccttggatgatgcactggactgcatttcagcttgtgcttttgactgctgatgtggcgctggctggtgaggctggcacggggcttggggagtgactggcacctgctgctgaggggtgccagcctggcactgggagggggccccggccacctgggatacggcgggcggcagaggtgaggagaggtgctgcttctggggctgctgctgctgctgcttgtatcgggagaggctgaagaagaggcctagaatggccttgaggtttccattcctgatctcttctgcagacagcccctggatgtttattcccttagctgccaggaaattcaagcaggcatctatgttttcaatcatcccggaatctcttattgcaaaatcaaaaatagtacactcgatatttattctgggaagtgtcacggaggtgggctgacgaggtaggttaagatttttcagcaatagtccagcaatatggcactttagacttgcagggcaacttccatgggctgtgttgcagcctttgtctcccatatcctgaagtatttccccaccaaggagagccagggagttagaaaaatcaaaacaaatgccaaacaacctttctgttgtggagttcctgctggtaggaagcctcttgtcttctgctttgcatgtcatgggctctcctactggactggatggagttgctcctgtcccttcacctactaagaagcggaacttggcacctcttgtcctttctgagaaggattccacttgccctgacatgcttaggtgatcacgttctaaactgccaattatgcctcctctgacaatgacctgaatgtaggatatacccactaactcacagccagtgagttcttccagagcaggctgtccagtcttggtgaagtggctgggctccacgctcacacctgttgagcttgactcggcagtaacattcccttcagtgtccgtctgagacctgttcctgcagccagtgccgaagacctcagagggcaccaagggctgataaaggacagggcccaggtgtcctgattcgtatcctggtgctcttatttccagcgtcacttcccagactaccctgtacaggaaaggtgcaaccgtggcagtgttgggatggttgtattgctgctggggctgaggtagctgaacactgacggtattgcttcctgtggtctgggtggtcccgacagacccactgacagtctggctgctgatgctgtggttcagggtggtccctcctgggccttttccttctgaggacgccaggctggaagaggaactggagtgtctgccgtccagctggggcttctgctgggggagtcctgagctcagcttcccactccggctccgctccccttccttggaaggcgctggggcacttggggatttcccgggcatgcttttcattcctggttttggtattccactgtgggaaggggccatgggctccttcttggcactgttgagcttcccccctttggggatgaagctggcaatcttggaggacttttttggcatctcgggcacagctgctccactggggtcttcttttggctcctccttgaggtccagcctctccgtcacagaggctctcttggcaaggtccttgcttttctccttatccttctcccgctgttgtttctccttctctttctcattgcctttcagagaactcttcttgttggtcagtgcccggctaaaagtcctctgggcaatgcccttgagtgcaatcttggggctgctggaagcagggcccacggtggtgagcatgcgactggcggcctccagctcctcgctctcttcgaagctgggcagagtctccagccgctcacagcttgtgtcccgggaccccggcccctcacctgcctttgagccccctttactgttgaaaagtttcagcttttccagcatggacttctgattgttgggggccggcttcatggcttcaggtgtgggcctgggggcctcaggcccaggaggcttgaccgagagcatggataccgtggcactgtgcttcacgctgagggatttgctgcgccaaggcttggtggctgcaccgggctgcgggatggccgaggaggtactgcaattagtaggggtggagctgctgccgctctccaaggaagcaggtgcattgtcactcattccggggtgggaggaggctgaacttgccaaaggctctgcagagacagaagagaggaggcctgaatcatacttgttgacctgcactgaagaccagggagggtcagccat

SEQ ID NO: 28119 - DNA, 1779 bp, Homo sapiens
  SIMILAR (1042)..(1431): 801254mologous to Homo sapiens p40,accession number U93566,Smith-Waterman Score=523.
atggagcagctctcaccgatggccagctcctaccactctgaccacgctgctgtctccctggccatcttctttgactacaaaggaataaaactaggtatcaagctggcggctgttcccagtgccttgcccacccctgccgggccgtcggactcggcggggcccctgtggcatccctgtccagtccctgtcaccacccagtttttccctctggacccaggaattcaaagtaagcaaggaggtccgctgctccagttggctgcaaataattacaaccttaagcccaagcagcactttgggtcctggtttgggaccatgaagcggctcgggacatggatgaagctggaaaccatcattcttagcaaactatcacaaggacaaaaaaccaaacaccgcatgttctcacacatagagttaaataatgattacacattgaaaaaagtaatgaagccgctgatcacttcaaacacggtaactgatgaaatcgagcgcgcgaatgttttcaaaatgaacggcaaatggtacttgttcactgattcacgcggttcaaaaatgacgatcgatgagaataaaatacctaggaatccaacttacaagggacgtgaaggacctcttcaaggagaactacaaaccactgctcaaggaaataaaagaggatacaaacaaatggaagaacattccatgctcatggataggaagaatcaatatcgtgaaaatggccttactgcccaagcttccacaacctccaccctcaggcatataaggctataccgcaccctgcttcccttgggaaaacctgatataatcaggacaataacaatgctggtaaactcttcaaagccaacaggaacccagctttgggttgtcagcagccagtatgttcaaagacagatggcttcagattctaagggaatgaacacctgtagtatggtcaaagccaggaaatattcaaagcctctgctggtgacacccaggcaaacagcatctggagtggacctccagcaaactccaacagatcttcagctgagggtcccgactgttagaaggaaaactgacaaacagaaaggaaatccacaccaaaaccccatccatatgtcaccatcatcaaaaaccaaaggacacagttcctcaccagcaacggaacaaagctggatggataatgactttgacgagctgagagaagaaggcttcagacgatcaaattactctgagctatgggaggacattcaaaccaaaggcaaagttgaaaactttgaaaaaaatttagaagaatgtataactagaataaccaatacagagaagtgcttaaaggagctgatggagctgaaaaccaaggctcgagaactacgtgaagaatgcagaagcctcaggagccgatgcaatcaactggaagaaagggtatcagtgatggaagatgaaatgaataaaatgaaggacatggatgaagctggaaaccatcattctcagcaaactatcacaaggacaaaaaaccaaacactgcatgttctcacttataggtgggaattgaacaatgagaacacttggacacaggaaggggaacatcacacactggggcctgttgtgggacttggaaaattgccttttttcatggctccaattctggtggctccaagtcagaagtctgcgtgtgaggaccactgccatggctgtgcttatggatggaaaaatacacccatgaaggaacgcttgctgccaatgaagtttaaaaaatttattgttcctcctttaacctggactttcggacttgaaagccctgtttag

SEQ ID NO: 28120 - DNA, 1730 bp, Homo sapiens
  SIMILAR (1730)..(603): 821254mologous to Cloning vector pZC320 SopA,accession number U26464,Smith-Waterman Score=1558.
ctggttttaacttcatatcgctgacagaggcactgaagaggatagcaaagacagtcttgaaatgccaacaccacccttccctcatctccaggcagtggccacatggtgcggagagagaatctgtatgcttgggggaaggagagctcagccattctgggactttgcattggaactcagtgtggccagcaccaagtagaactctgccagtgcccttaggtgtttctcctaatgctatctctcccccagtccaccaccccccaacaggccccggtgtgcgatgttccccgccttgtgtcctgtgtccaagtgttctcattgttaaattcccacctatgagtgagaacatgaggtgtttggttttttgtccttgtgatagtttgctgagaatgatggtttccagcttcatccatgtccctgttgtttcctgactttttaatgattgccattctaactggtgtgagatggtatctcattgtggttttgatttgcatttctctgatggccagtgatgatgagcattttttcatgtgttttttggctgcataaatgtcttcttttgagaagtgtttcttcatatcctttgcccactttttgatggggttgtttgtttttttcttgtaaatttgtttgagttcattgtagattctggatattagccttttgtcagatgagtaggttgcgaaaattttctcccattttgtaggttgcctgttcactctgttggtagtttcttttgctgtgcagaagctcttcagtttaattagatcccatttgtcaattttggcttttgttgccattgcttttggtgttttagacatgaagtccttgcccatgcctatgttatcaggctcgaaccctttaagatcaacgttcttgagcagatcacgaagcatatcgaaaaactgcagtgcggaggtgtagtcaaacaactcagcaggcgtgggaacaatcagcacatcagcagcacatacgacattaatcgtgccgatacccaggttaggcgcgctgtcaataactatgacatcatagtcatgagcaacagtttcaatggccagtcggagcatcaggtgtggatcggtgggcagtttaccttcatcaaatttgcccattaactcagtttcaatacggtgcagagccagacaggaaggaataatgtcaagccccggccagcaagtgggctttattgcataagtgacatcgtccttttccccaagatagaaaggcaggagagtgtcttctgcatgaatatgaagatctggtacccatccgtgatacattgaggctgttccctgggggtcgttaccttccacgagcaaaacacgtagccccttcagagccagatcctgagcaagatgaacagaaactgaggttttgtaaacgccacctttatgggcagcaaccccgatcaccggtggaaatacgtcttcagcacgtcgcaatcgcgtaccaaacacatcacgcatatgattaatttgttcaattgtataaccaacacgttgctcaacccgtcctcgaatttccatatccgggtgcggtagtcgccctgctttctcggcatctctgatagcctgagaagaaaccccaactaaatccgctgcttcacctattctccagcgccgggttattttcctcgcttccgggctgtcatcattaaactgtgcaatggcgatagccttcgtcatttcatgaccagcgtttatgcactggttaagtgtttccatgagtttcat

SEQ ID NO: 28121 - DNA, 3994 bp, Homo sapiens
  SIMILAR (535)..(1191): 461254mologous to Macaca fascicularis unnamed protein product,accession number AB046024,Smith-Waterman Score=510.
atgggtatccgaagaaccaaagatctcccggtctaccgccgccagaagacccggattctgatacgcctcgtgctggagcatcacgccatcgatatggtgcatgggtgctttggcctctgccagcgacttgaggccaacgagtttttgcggcccgctggtactttggcgaatcgcatcttccacatcgctattcctgtgaccgagctttatacggtgcaggaagaggataaaaccgtggagcggaaacgaagttttatccatttttggttacctgagtcattgatggttgatggcaatcagaagcgggaggaccccccccatcaaaaattgagtgaaggatatgaacatacacttgctcaaagtgaagatattgatgcagccgacaaacatatggaaaatatgctcatcatgtcctttggtgggacgtggatgaagcttgaaaccatcattctcagcaaagtatcacaaggacaaaaaaccaaacatcgcatgttctcactcatagacaaagtcttgctctgtcacccaagtcgactttatcttaaagcccaccatgagtgtacagatcagaaagtctaccaagctgtgacagatgacctgccggccgcctttgtggatggcaccaccagtggtggggacagcgatgccaagagcctgcgtatcgtggaaagggagagtggccactatgtggagatgcacgcccgctatatagggaccacagtgtttgtgcggcaggtgggtcgctacctgacccttgccatccgtatgcctgaagacctggccatgtcctacgaggagagccaggacctgcagctgtgcgtgaacggctgccccctgagtgaacgcatcgatgacgggcagggccaggtgtctgccatcctgggacacagcctgcctcgcacctccttggtgcaggcctggcctggctacacactggagactgccaacactcaatgccatgagaagatgccagtgaaggacatctatttccagtcctgtgtcttcgacctgctcaccactggtgatgccaactttactgccgcagcccacagtgccttggaggatgtggaggccctgcacccaatgaaggaacgctggcacattttccccagcagtggcaatgggactccccgtggaggcagtgatttgtctgtcagtctaggactcacctgcttgatccttatcgtgtttttgtaggggttgtcttttgttttggttttttattttttggtctataacaaaattttaaaatatatattgtcataatatattgagtaaaagagtatatatgtatataccatgtatatgacaggatgtttgtcctgggacacccaccagattgtacatactgtgtttggctgttttcacatatgttggatgtagtgttctttgattgtatcaattttgttttgcagttctgtgaaatgttttataatgtccctgcccagggacctgttagaaagcactttattttttatatattaaatatttatgtgtgtgcttggttgatatgtatagtacatatacacagacatccatatgcagcgtttcctttgaaggtgaccagttgtttgtagctattcttggctgtaccttcctgccctttcccattgctactgatttgccacggtgtgcagcttttactcgccaccttccggtggagctgcctcgttcctttgaactatgccctcacccttctgccctcacttgatttgaaagggtcgttaactctcccttacaggtgctttgactcttaaacgctgatcttaagaagctctcttcatctaagagctgttactttttcagaagggggggtattattggtattctgattactctcaattctaattgttatatatttgagcccatacagtgtattaggttgaaccatagaaactgctattctcgtaggtcaaaagggtctagtgatggaagttttggagataagaacttaatcttattaggaactcctaaaatttttctcatcccatgccccgttttaaattggcagttttccctctgactcttctgtgttaaaacatgaaactataaatttagtaattatcatgccttgctctttttaatctatatgaccgatgcaagcccctcttcttaaccgattcttggctttgagcccataaacacaggtctccctgtctccaactccagtaaggccctcctcagcctcaccttacggaatccaaaggaactgggggtttgttagggttctttctctaaatgtaggagggcccagatcccatcacaaagttttttcattcttccttgtccaccatgatctttccatcacagtctttggatatggtctggccatggcaaagtgggaacagagttggggcgggcaatggacaggaggagctttccttgggcctgactcggtgtgcgggccacttcggcactgcttaatccagatattcttgttaactaagcattgtgcttcccaggtggtctgaagtcaggtactctctctctcaacacctgtagttgaatatgatttggtcagttgctcgttgtaacttggagaaattcctataaagtaagatctccttgcctcttccatccattgttggcacccccttgcaaaaggaaaagaacagcaaaagtcaggagcagtaatctgagaaagttaactccaggataggtaggtttctattgttatagctagatgtaaatctttagttccaagaagtgatagagtttctgctttaataatttgttgataagtttacataaacagaaataaaagatactatctttaccgtagtagttcaggccaagattatgcttagttttagttctccaggtagttactttgtgccatgtcctattgatcagtgacactgccagaggcccataccggcaagaggaagaggacgtcattttgtaaagtttaacttcttagcgaactgatgtgccacccagtcacagagtggagttgtgaattcatgtagaggtggcaaacctctacctggtgttgatgagagaataatccttgggcagtctgggaaaaattaaggaaggcatctcccttcttactcatgggagattcaactatagagagttgaaacctaaacccgccttccttttatagaagctggactagagacggactgaccatcagctctgaactgtggctttttttgttcacctatgatgccatgtaccaaattcagaagctatccgttaataatttgttttataattgagtagtacaagcgaggaaaaaatacggaggataaccactatttttgtgcaaataatatgaaagtgaagtaaaagcaatagaagaaatttctataggatctgggtttagagtgtgtatcacttattaattataccttggcccttttcagggaaaataacaaccacccttacctgatagttgggaaaagaagattggggttattttggccatatccattttagctggaagtgacatttaaaagcaccctggcatcactagtaatagtgtattttgctattctgcccttgtaatcggtgtccctgtaaaacaatccccacagattactttcaggaaataagatgtatttctctaccgtaaggggccagggtttaattttctcctttttttgagatttcttagaaaaaatgctgcttgcacatgttggttcttgaaaccttagctagaagaatttcaggtcataccaacatgtggatagggctatagctgttcagaggtctcctgggggaggcttaaaacgggggaaacactggttttcacacgatgctccacatgggctgtctttaaaagactccaaaacttttttttgtcctctttgttatgcttggaagctccccccccatcaccacagtgtgtccgagtctttgcaaagaaacctttagatgtggttcatagatatatgaatacgtatctgtgtaaaacagtgagtgtgcagtgtgtaaatactttaaattattatgctagaaaaataaagttacataccttgcaaaaaaa

SEQ ID NO: 28122 - DNA, 781 bp, Homo sapiens
  SIMILAR (422)..(676): 361254mologous to Homo sapiens cN38E12.1 (like- glycosyltransferase (KIAA0609)),accession number Z68287,Smith- Waterman Score=87.
gctttctgtacagatgaatatttggaaaaactttccatttgatcgcgcctaaaatcttcatttagtcttcgattttgctctctcagaaagtcgatttctgcagccatttcgatacaattttagttgtagagctttcaccacctttaccttcctctgaaagacagagagcttgctgtgcgggaaaacaaaactaagccaacgctcggttggttgtcaagcgctccagcggtgcaatctgcatcctactcacgcggcatctacagccccgccacgcttctttccaccgcgccccagacgagtccctggccctggtgagagactgaagattgctggggactccacgttcaaccgaatcccacgctggtgggaagaggacgcggtcgatacaggcgtcccgcgggtcactctgggtctcgtcgggccacctaggagagagccgagggagcttgacggcagcctgagagcggcgttctacgcggagcggcgggggttggagaggacaacgccaagacggctgggaagccccaggccagcagcggaagtccactcggcccgccctgcgactttgaaaccggtgccccggaccactccttggagacggtggcgcctcttgcgtcatcacgcgggcgttggaggttacgccatcgcgcgtcctagagtcctagcacgctattggctggctgtcaagcatctgggaccacgatcccactcgggttgccggtctggttatcgggctgggaccacgggcccaactgttttgtccatcagacttttcgcgtga

SEQ ID NO: 28123 - DNA, 378 bp, Homo sapiens
  SIMILAR (290)..(373): 891254mologous to Homo sapiens putative p150,accession number U93569,Smith-Waterman Score=129.
atgaatcaaatagacacaataagaaatgataaaaggggtatcaccactgatcccacagaaatacacactaccatcagagaatactataaatacctctatgtaaatataccagaaaatctagaagaaatggataaattcctggacacaaacaccctcccaagactaaaccaggaagaagttgaatccctgaatagaccaataacaagtttggaaattgaagcagtaattaatagcctaccaaccaaaaaaagcccaggaccagaccgatttacagtcgaattctaccagagggacatggatgaagctggaaaccatcattctcagcaaactaacacaggaacagaaaaccaaacaccatatgttctcactcataagtag

SEQ ID NO: 28124 - DNA, 624 bp, Homo sapiens
  SIMILAR (120)..(146): 771254mologous to Homo sapiens Human secreted protein, SEQ ID NO: 6834,accession number G02753,Smith-Waterman Score=41.
atgtggcacatatacaccgtggaatactatgcaaccataaaaaaggatgagttcatgtcctttgcaggcacatggatgaagctggaaaccatcattctcagcaaactaacacaggaacagaaaaccaaacaccgcattttctcactctcccatgctcccccaagcctagccatagaaactagaatcctcttcccaagatacagaaaatgtggaagtgactttgaaatgggtaacaggcagaggtttgtacttcctagagacttggagagctcagaagacaggaagatgtgggaaagtttggaacttcctagagacttgttgaatggctttgaccaaaatgctgatagtgatatggacaataaagttcaggctgaagcgatctcaatggagataaagaacttgttgggaactggaataaagggcagtacagaaggaaatgtgagatcaaagcccccacacagaatccacactggtgcactgcctagtggagctgtgagaagatggccaccatcctctagaccccagaatggtagatccaccaacagcttgcactgtgtgcctggaaaagatgcagatactcaacgccagctcatgaaagcagccaggaaaggggttgtatcctga

SEQ ID NO: 28125 - DNA, 354 bp, Homo sapiens
  SIMILAR (134)..(12): 901254mologous to Homo sapiens Human secreted protein, SEQ ID NO: 7217,accession number G03136,Smith-Waterman Score=182.
atggaatactatgcagccataaaaagggatgaattcatgtcctttgcagggacacggatgaagctggaaaccatcattctcagcaaactaacacaagaacagaaaaccaaacactgcatgttctcactcataagattgactgccagggcagaagcagatttattgcaaccagataaaaccagttggcacaattcaaacacctgggcaactctgccttatcttgctaggcataggaagaaagctccggcagttaagattccttactgtttacaaaaatcagatggaaacagagttgaccttgatggtatcaagccctcacagtatagatttcagagtaataagccaatgaattaa

SEQ ID NO: 28126 - DNA, 510 bp, Homo sapiens
  SIMILAR (181)..(369): 1001254mologous to Homo sapiens estrogen receptor alpha,accession number AF123500,Smith-Waterman Score=348.
atggaatactatgcagacataaaaaaggatgaagtaatgtcctttgcagggacatgggtgaagctggaaaccatcattctcagcaaactaacacaggaacagaaaaccacacactgcatgttctcactggtttatgatccaaagaaaaggcagtggtcacagatacatgaaacgacaaggccaaattcagataatcgacgccagggtggcagagaaagattggccagtaccaatgacaagggaagtatggctatggaatctgccaaggagactcgctactgtgcagtgtgcaatgactatgcttcaggctaccattatggagtctggtcctgtgagggctgcaaggccttcttcaagagaagtattcaagtacttgggcccaacagagagggaaacctggaaactcacattagtgatcaatgcctaacaattcgcagctatgaagaagaagaagaggaagaagaagaagaagaagaggaagaggaagaggaagaggagaaagaggaatag

SEQ ID NO: 28127 - DNA, 546 bp, Homo sapiens
  SIMILAR (134)..(12): 871254mologous to Homo sapiens Human secreted protein, SEQ ID NO: 7217,accession number G03136,Smith-Waterman Score=179.
atggagtactatgcagccatgaaaaagaatgagttcatgtcctttgcagggatatggatgaagctggaaaccatcattctcagcaaactaacacaggaacagaaaaccaaacaccccatgttctcacccataagcattttgggtgactcaaagtttcctcttttaaaaacactggccattaaatattctcatgaacaagaatattatttacctgtgcaagtaaaaacactgcccattaaatattcccttgaagaagaatattatttacctgtgcaagggggtattcttaggtgttcttctaatgtaaaatcgcagaaggttaaggagcttgcacaaattccacagcgagtgtttgagtgtgtgtatgtggtggtggtgggggatggtattcaaattcaggacttcttacataagttaaaggatgctttttatatcccgtgttgtaggtatagcaatatggcagtgtggaggaatccacatcatatccttgttatgtatgcgtccccaagcccaggaatacagactgatgaagagccaccaatttga

SEQ ID NO: 28128 - DNA, 764 bp, Homo sapiens
  SIMILAR (63)..(359): 751254mologous to Homo sapiens reverse transcriptase,accession number L27428,Smith-Waterman Score=386.
gtctccagacaaggctagatgaccactcactgagaaggtataaaggggctttggatattgaatataaggggcagctgatgtcagccagaaaactgaaactggaccccttccttacaccttatgcaaaaattaactcaagatggattaaagacttaaacataagatgtaaaaccataaaaaccctagaagaaaacctaggcaataccattcaggacatagacatgggcaaagacttcatgactaaaacaccaaaagcaatggcaacagaagtcaaaattgacaaatgggatctaattaaactaaagagcttccacacagcaaaagaaactatcatcgaggtgaacagggacatggatgaagctggaaaccatcattctcagcaaactaactcagaaacagaaaaccaaacaccgcatgttctcactctaaaacaagaaatagggaatgataagccagatgccaaccaatcacataagaaaaatggagaggagaaagaatgtttcaaaaagagaggagaagtattccacatgctagtcctactgagctttcattttccagaatcagtccacaggcccttgtctgcaacccttgaggtctcaggcaagctggctgcctcctgggtgctccactcctcaagtccctccctgtggaatgtcctgtccactttgctcgacaatgatgattggtatgatgtcgattgctatgatggtgatgatgatgatgatgatgatgacgacaatgtgaccacaaggctcaattactga

SEQ ID NO: 28129 - DNA, 1178 bp, Homo sapiens
  SIMILAR (617)..(781): 441254mologous to Homo sapiens Amino acid sequence of a human secreted protein,accession number Y10869,Smith-Waterman Score=91.
atgatctatatcagcggtcctcaaacctggcagtacatcaaatataacctgagggacttatttaaaattcagatgtcaggctctattccagacctactaaatcagcctccaggccattggtgttcttatcaaactgcacttttgatgctcttgcacaatggtgtacacaagcagtcattggaaagcaggtttagcaaatatattggtcagggctttgctgaactttccagctttccaaaatgtccaagttccttcagtcttcttcatgtgccgtgcgagatgtacaagacgacactgatggagccgaaaatcacacagaaatacagagactctgcacaaggcatcccccattctaaatctcctgtgtttcacaaggcatcttggtgtcattctgtgtatcagactgtgctggcttttctccatttacccaatggatccatttaccccgtggatccattctctttctttctgctccctggaagactgattccgatggattgcatcacttgggctcccctcacctctgactttccactggatttgaccgatgggagccataagcaagagacaggagacacacgtggagtgcttttaaagagtggagagtttaataggcaagaaagaagggagaagaaagaaggaagaagctcccttgtacagagacagagggagcgggactccaaagccaagagaggaaaccccgagtgcgacagaaacgtggctgcttatatgcgggtggaagaggtggtgtctgatttgcatagggctcaggggattggtttgaccagggacattgatgaagctggaagccatcattctcagcaaactaacacaggaacagaaaaccaaacactgcatgttctcactcaaaaggtcggccggcctgccccttaccagccgcaggaccagccgggagaaggctggaggcgggtcccactgcctgagggcctgggtgcagcctcactgccccacaagcagaaccaacgcctgcgagctccttaacaatgcgcggtgtgggccacctgcgagctccttaacaatgcgcggccccatgccggacctactgtgttccgacagaatccgcggcatagaatcagccctgcgcctccagagcccaatcctaatgcccccacctggaaggggcttctgttgtcctgggaccagcttcagaatggcag

SEQ ID NO: 28130 - DNA, 2595 bp, Homo sapiens
  SIMILAR (454)..(975): 701254mologous to Homo sapiens putative p150,accession number U93570,Smith-Waterman Score=539.
atgcggttacttcacttaatatgtatcaccataattctcttctcagaaagtttattcagtcaggctgttaggatcaacagctataggagaaaggaaggatgccagattgggaagaagagagggactatggtgccgtcacaacaagaattagaaaaaacaactttaaatttcatatggaaccaaaaaagagcccgtattgccaagacagtcctaagtaaaaagaacaaagctggaggcatcatgctacctgacttcaaactacattacaaggatacagtaacaaaaacagcaggggacatggatgaagctggaaaccatcattctcagcaaactaacgcagggacagaaaaccaaacactgcatgttctcactcgatacaactccttaccagcaaaggaacaaaactggatagagaatgagtttgatgaattggcagaagtaggcttcagagggagaaagtgggaaagatctaaatttgacaccctaacatcacaattaaaagaactagagaagcaagagcaaacaaattcaaaatctagaatacaagaaataactaagatcagagcagaattgaaggagatagagacacagaaaacccttcaaaaaatcattgaatccagaaagattatcaaaatagatagaactccagctagactaataaagaagaaaagagagaagaatcaaatagatacactaaaaaatgataaaggggatatcgccaatgatcccacggaaatacaaactaccatcacagagtactgtgaacagctctatgcaaataaactggaaaatctagaagaaatggataaattcctcaacacatacaccttcccacaactaaatcagggaagaagtcgaatccctgaagagaccaataacaagttctgacattgaggcagtaattaatagcctatcaatcaaaaaaaaagtccagtaccagacagactcacagccaaattctaccagaggggaaaatctgggcaataccattcaggacacaggcatgggcaaagacttcataactaaaacaccaaaagcaatggcaacaaaagccaaaattgacaaatgggatctaattaaactaaagagcttctgcacagcaaaagaaactatcatcagagtgaacaggcaacctacagaatgggagaaaatttttgaaatctatccatctaacaaagggctaatatccagaatctataaggaacttaaacaaatttacaagaaaaaaacaaatgaccccatcaaaaagtgggcaaaggatatgaacagacacttctcaaaagaagacatttatgcagccaaaaaacacatgaaaaaatgctcatcatcactgggacatggatgaagctggaaaccatcattctcagcaaactaacacaggaacagaaaaccaaacaccgcatgttctcacttctgattccagatgatggtaattctcttacccgacgaatgttgctgattgggatatctgtgaagacacctgtaggaactggtgccattccaggacctgtgggaggcacaacagctgccggagcctatgggaggaaagaaaaagctcttagtaactgtgattcaatcttagcgctagctctagctaaaatgagtgaaaaccaaatgtcaatggagagcttctttgaaaaggggaaagacccaatgaggagacagcagaagactctaacactaacaaaaaagaaaaatgcatttaaaagaaaataccaagagtcctacttaaattatgggttcattgcaacagtgagagcatcattcttagtggctaactgcattgttaaagctaagaagccctttactattggggaagagttgatcctgcctgctgctaaggacatttgttatgaacttttaggagaggctgcagttcaaaaggtgccacatgttcctcttccagtcagtaccataactagaccaattgatgaaatagcagaggatatcgaggcacaatttttagagaggattaatgagtcactgtggtacacaatccagattgacaagtctaccattgctgacaacaaggcaacaatgcttgttttcgtgcaatatatttttcaagaggatgtgcacgaggatgttttctttcaagagagtttgagagctacttcccaaccgctaaagaccccccaaactggcaaggaatgggtccatgacccatttgtggataagccaagtgaatcgactttgtctatgctagaagaggatcaactgcttgagattgcaaatgacggtagccttaaaagtatgtttgagaaaacttcaaatcttcatatagtctgtattaaagtcaaggcagaatatcctgagattgccacaaaagcactgagaaggctgcttgcatttccatgggtagcagctgtggatagggaatgtcaatggggctccagggatgtggagatgcggaggctgttggaccctaaggcaggattcagtctgctgggggttggcaactgccactgcttaaggactttggagtttgtaggactcagcatgagctccctctgtggagcaatgctgttatgtggtctccgggcagctccctatattagtctcagggaccacaaaggtcaagggactctcctatag

SEQ ID NO: 28131 - DNA, 1665 bp, Homo sapiens
  SIMILAR (506)..(414): 801254mologous to Homo sapiens Human secreted protein, SEQ ID NO: 7217,accession number G03136,Smith-Waterman Score=129.
atggttatggacatacgctttggtgtgactgtgttccctgcattcggaaatgccttcctaggggcacagccaagtcactcggcaaagggctcaggacacaggtgcaaggaagtgtatattaggagcagcagtgcagccgccaccggcttccgacagctatttcgggcttctgtgtattgtggcactcagctgagtacagatgctcccaaatcctgtggtttgccccggtgtgccacagacttttctgtttctgtgtgtgccatgctcgtgctgcacggcagctcagcagcaggtctgctcctctgtgctgaactgaagggagccgagtgctcgccctccgtccgggccggagctcagatcgtcctgcctcacgtacaagaagtaaccagttctttggccttcagactccctgtttcactggggacatggatgaagctggaaaccatcattctcagcaaactaacacaggaacagaaaaccaaacaccgcatgttctcacttctcagagcagatgagcccagtgaccttgaggcccttgaagatggtggaaccaggagacatgaggggccttggcctggaaacacaactcgaagggaaatcactcatctggaaaacgtgtttggacccataccacaccgtggcaaatacctggcctgtggacaggacaaagccaaagccgcccagcgccgtgtgatgcggccacagagaacacgagcctcgggagagaggagcctggggctggaaaacaagggccctggggtgaagggcacagatcgggaggtccctggacttccacttgttgagctggactcaagccggatcgcctggaggatattctcagggcacagcggctgcctgcgcctgagcagtgctgaggagatgccaaggtcaggcatcagctttcagagaatgcagctgcgtcagagatggagacacgcagagccacgtgtcgtggagaatctaaggaagttcgctggcgccagcagcgggaaaaggccctggcttgatgaggggaactcgcagccttgcagcgcggggcttctgctgctgcctggcctggagaccccactcagtcacaccatcaccatccagcaagcccaaggcacccagaaggataaagatcgctcccaggacctgaggacaaaagcagacattttgggggcacgggagaacaaactgccgccgtgtctccacaccctgtgtgtcctgaacaccgctgggaagccgtcagcagacgctccgcaggccaccggggcgatcggggcactaaaggccaagcaggcttcacacactgccaaagtccaggtgaccagagagtatgaccggacacaaaggtgggacaagccgtttctcattgttactgagaagcaactcacggcctccgtgcacctgatggagagtaacccggcaaccccaaagggacaagacaaggccattgcagagaagccctcttgccccagcttaaacatccggaaactagtggctaagtctgtgagtccagataatgttccttgctggggtggtaaaagcatcctcagtctgaaaagaagcagtgccagcctctatccatgggacatgcaggcccaggaggcctctcaggttctgctgatcactggcctcaggcacgactcagcagatgtggtccagcggccatgcagtcagtga

SEQ ID NO: 28132 - DNA, 678 bp, Homo sapiens
  SIMILAR (373)..(672): 611254mologous to Homo sapiens putative p150,accession number U93569,Smith-Waterman Score=290.
ctgttggtgggactgtaaactagttcaaccattgtggaagtcagtgtggcgattcctcagggatctagaactagaaataccatttgacccagccatcctattactgggtatatacccaaaggattataaatcatgctgctataaagacatatgcaccaagtatgtgtacctgcggcactattcacaatagcaaacacttggaaccaacccaaatgtacatcaatgatagactgggttaagaaaatgtggcatatatacaccatggaatactatggcagccataaaaaaggatgagttcatgtcctttgcagggacatagatgaagctggaaaccatcattctcagcaaactaacacaagaacagaaaaccaaacaccgcatgttttcactctactggaagtcctagccagagcaatcagaaaagagaaagaaatacagagcatccaaattagtaaagaggaagtcaaactgttgctgtttgctgatgatacgattatttacttagaaaaccttaaggcctcctccagaaagctcctagaactgataaaagatttcagcaaagtttctggacacaaaattaatttacacatatcagtagcacttctgtacaccaacagcgaccaagtggagaatcaaatcaagaactcaaccccctttacaatagctgcgaaaaattaa

SEQ ID NO: 28133 - DNA, 1407 bp, Homo sapiens
  SIMILAR (589)..(1404): 991254mologous to Homo sapiens butyrophilin,accession number U90548,Smith-Waterman Score=1473.
atggtgggtgaagacgctgatctgccctgtcacctgttcccgaccatgagtgcagagaccatggagctgaggtgggtgagttccagcctaaggcaggtggtgaacgtgtatgcagatggaaaggaagtggaagacaggcagagtgcaccgtatcgagggagaacttcgattctgcgggatggcatcactgcagggaaggctgctctccgaatacacaacgtcacagcctctgacagtggaaagtacttgtgttatttccaagatggtgacttctacgaaaaagccctggtggagctgaaggttgcagcattgggttctgatcttcacattgaagtgaagggttatgaggatggagggatccatctggagtgcaggtccactggctggtacccccaaccccaaataaagtggagcgacaccaagggagagaacatcccggctgtggaagcacctgtggttgcagatggagtgggcctgtatgcagtagcagcatctgtgatcatgagaggcagctctggtgggggtgtatcctgcatcatcagaaattccctcctcggcctggaaaagacagccagcatatccatcgcagagtggaggaaaatccagtacatggctcgtggagagaagtctttggcctatcatgaatggaaaatggccctcttcaaacctgcggatgtgattctggatccagacacggcaaacgccatcctccttgtttctgaggaccagaggagtgtgcagcgtgctgaagagccgcgggatctgccagacaaccctgagagatttgaatggcgttactgtgtccttggctgtgaaaacttcacatcagggagacattactgggaggtggaagtgggggacagaaaagagtggcatattggggtatgtagtaagaacgtggagaggaaaaaaggttgggtcaaaatgacaccggagaacggatactggactatgggcctgactgatgggaataagtatcgggctctcactgagcccagaaccaacctgaaacttcctgagcctcctaggaaagtggggatcttcctggactatgagactggagagatctcgttctataatgccacagatggatctcatatctacacctttccgcacgcctctttctctgagcctctatatcctgttttcagaattttgaccttggagcccactgccctgaccatttgcccaataccaaaagaagtagagagttcccccgatcctgacctagtgcctgatcattccctggagacaccactgaccccgggcttagctaatgaaagtggggagcctcaggctgaagtaacatctctgcttctccctgcccaccctggagctgaggtctccccttctgcaacaaccaatcagaaccataagctacaggcacgcactgaagcactttactga

SEQ ID NO: 28134 - DNA, 3309 bp, Homo sapiens
  SIMILAR (74)..(2266): 981254mologous to Homo sapiens butyrophilin,accession number U97502,Smith-Waterman Score=3798.
  misc_feature (1)...(3309): n = a,t,c or g
gatggttttccatactggaacccaaaggtaaagacactcaaggacagacatttttggcagagcatagatgaaaatggcaagttccctggctttccttctgctcaactttcatgtctccctcttcttggtccagctgctcactccttgctcagctcagttttctgtgcttggaccctctgggcccatcctggccatggtgggtgaagacgctgatctgccctgtcacctgttcccgaccatgagtgcagagaccatggaactgaggtgggtgagttccagcctaaggcaggtggtgaacgtgtatgcagatggaaaggaagtggaatacaggcagagtgcaccgtatcgagggagaacttcgattctgcgggatggcatcactgcagggaaggctgctctccgaatacacaacgtcacagcctctgacagtggaaagtacttgtgttatttccaacatggtgacttctacgaaaaagccccggtggagctgaaggttgcagcattgggttctgatcttcacattgaagtgaagggttatgacgatggagggatccatctggagtgcaggtccactggctggtacccccaaccccaaataaattggagcgactccaagggagagaacatcccagctgtggaagggcccgtgaatgtatatggagtgggcctgtatgcagtaccaccacctgtgatcatgacaggcacctctggtgggggtgtatcctgcatcatcacaaattccctcctcggcctggaaaagacagccagcatatccatcgcagacccctttattcaggggggcgccccagcccgtgnattngnaggccctgggcnagggaccctggcntattttngggtggctgnttcttggcaaggagccagttacttcttgtggagacaacagaaggaanaaattggtctgtccagggagacagaaagagagcgagagatgaaagaaatgggatacgntgcaacagagcaagaaataagcgctaagaggagcctccaggaggaactcaagtggaggaaaatccagtacatggctcgtggagaggagtcttcgtccgataccaaaaagtcagccctgatgctcaaatggaaaaaggccctcttcaagcctggtgacaaaatgcttcagatgagggtttcaccttgtaaaataaattggatgtattcaaaaatatactgcagaaaaggggagctcattaagttcataagcggtcgagtgaagattgaaaataaacctctgagtataaagcatcagtgggcanaatcaatgtggggagggaaacaacaaaaatgtanaaagaggatccttgttgcttcttggggccgcatcagggtattgggtaaggcanatactgaccttactttcatttcccctctggtcactagacccctggggctttcaccaatgacattgatgagagaatcacattcagggcaggctagggacacggggttctggaaggacctcctcagcatggcccaagccttgcatgctgtggctcttaaatccaggaaaaatggcagaccccatggacacctcctcaaactctctgcagcagatgtaattctgtatccagacatggcaaatgccatcctccttgtttctgaggaccagaggagtgtacagcgtgctgaggagccccatgacctaccagacaaccctgagagatttgaatggcgttactgtgtgcttggctgtgaaagcttcatgtcagagagacactactgggaggtggaagtgggggacagaaaagagtggcatattggggtatgtagtaagaacgtggagaggaaaaaagtttgggtcaaaatgacaccggagaacggatactggactatgggcctgactgatgggaataagtatcgggctctcactgagcccagaaccaacctgaaacttcctgagcctcctaggaaagtgggggtcatcctggactatgagactggacatatctcgttctacaatgccacggatggatctcatatctacacatttctgcacgcctcttcctctgagcctctgtatcctgtattcagaattttgaccttggagcccactgccctgaccgtttgcccaataccaaaagtagagagttcccccgatcccgacctagtgcctgatcattccctggagataccactgaccccaggcttagctaatgaaagtggggagcctcaggctgaagtaacatctctgcttctccctgcccagcctggagctaagggtctcaccctccacaacagccagtcagaaccataaagctacaggcacacactgaagcactttactgatattcattcaattattccataggacagttgtttgagtttggtgccaccttattggcccctttatacagataaggaaactggggtgtagaaaagtgtattgactttacaaagcagacaggaatagtgaacaacagagctgggatctgaacaacaatgactaacattaatggagaatttaaaacgttctgagttgctgtgttaatgaacctttggtgggtgtcactcctttaatcctcacaacaccctgtcaggtagtctcatttggcaagtatggaagcagaggcagggcaacattaagtagcttacataactcacacggtaatttgtgcagttgggagatgttcagcttcagtcccctggccaattgcccgttcttttccagcctgatttttcctgcatgggaagagcccacatgtagccctgaggttcccttcccaggacagctccaggatcgagatcactgtgagtggttgtggagttaagacccctatggactccttcccagctgattatcagagccttagacccagcacaccttggattggcttctgcagagntctggtgagagataacgtgcagttcccacagggcatggacttgaaagagactagaggccacactcagttaataatggggnacagatgtgttcccacccaacaaatgtgataagtgatcgtgcagccagagccagccttccttcagtcaaggtttccaggcagagcaaataccctagagattctctgtaatattggtaatttggatgaaggaagctagaagaattacagggatgtttttaatcccactatggactcagtctcctggaaaaggatctgtccactcctggtcattggtggatgttaaacccatattcctttcaactgctgcctgctagggaaaactgctcctcattatcatcactattattgctcaccactgtatcccctctactgggcaagtgcttgtcaagttctagttgttcaataaatttgttaataatgctgactcttc

SEQ ID NO: 28135 - DNA, 2879 bp, Homo sapiens
  SIMILAR (195)..(1679): 1001254mologous to Homo sapiens dJ45P21.5 (butyrophilin, subfamily 3, member A2),accession number AL021917,Smith-Waterman Score=2590.
atttgctttctctttttcctttcttccggatgagaggctaagccataatagaaagaatggagaattattgattgaccgtctttattctgtgggctctgattctccaatgggaataccaagggatggttttccatactggaacccaaaggtaaagacactcaaggacagacatttttggcagagcatagatgaaaatggcaagttccctggctttccttctgctcaactttcatgtctccctcctcttggtccagctgctcactccttgctcagctcagttttctgtgcttggaccctctgggcccatcctggccatggtgggtgaagacgctgatctgccctgtcacctgttcccgaccatgagtgcagagaccatggagctgaagtgggtaagttccagcctaaggcaggtggtgaacgtgtatgcagatggaaaggaagtggaagacaggcagagtgcaccgtatcgagggagaacttcgattctgcgggatggcatcactgcagggaaggctgctctccgaatacacaacgtcacagcctctgacagtggaaagtacttgtgttatttccaagatggtgacttctatgaaaaagccctggtggagctgaaggttgcagcactgggttctaatcttcacgtcgaagtgaagggttatgaggatggagggatccatctggagtgcaggtccaccggctggtacccccaaccccaaatacagtggagcaacgccaagggagagaacatcccagctgtggaagcacctgtggttgcagatggagtgggcctatatgaagtagcagcatctgtgatcatgagaggcggctccggggagggtgtatcctgcatcatcagaaattccctcctcggcctggaaaagacagccagcatttccatcgcagaccccttcttcaggagcgcccagccctggatcgcagccctggcagggaccctgcctatcttgctgctgcttctcgccggagccagttacttcttgtggagacaacagaaggaaataactgctctgtccagtgagatagaaagtgagcaagagatgaaagaaatgggatatgctgcaacagagcgggaaataagcctaagagagaggaaaaaaatccagtacttgactccagatgtaattctgtatccagacatggcaaatgccatcctccttgtttctgaggaccagaggagtgtacagcgtgctgaggagccccatgacctaccagacaaccctgagagatttgaatggcgttactgtgtgcttggctgtgaaagcttcatgtcagagagacactactgggaggtggaagtgggggacagaaaagagtggcatattggggtatgtagtaagaacgtggagaggaaaaaagtttgggtcaaaatgacaccggagaacggatactggactatgggcctgactgatgggaataagtatcgggctctcactgagcccagaaccaacctgaaacttcctgagcctcctaggaaagtgggggtcatcctggactatgagactggacatatctcgttctacaatgccacggatggatctcatatctacacatttctgcacgcctcttcctctgagcctctgtatcctgtattcagaattttgaccttggagcccactgccctgaccgtttgcccaataccaaaagtagagagttcccccgattcccgaccttagtgcctgatcattccctggagataccactgaccccaggcttagctaatgaaagtggggagcctcaggctgaagtaacatctctgcttctccctgcccagcctggagctaagggtctcaccctccacaacagccagtcagaaccatatagctacaggcacacactgaagcactttactgatattcattcaattattccataggacagttgtttgagtttggtgccaccttattggcccctttatacagataaggaaactggggtgtagaaaagtgtattgactttacaaagcagacaggaatagtgaacaacagagctgggatctgaacaacaatgactaacattaatggagaatttaaaacgttctgagtgctgtgttatgagctttggtgggtgtcactcctttaatcctcacaacaccctgtcaggtagtctcatttggcaagtatggaagcagaggcagggcaacattaagtagcttacataactcacacggtaatttgtgcagttgggagatgttcagcttcagtccctggccaattgcccgttcttttccagcctgatttttcctgcatgggaagagcccacatgtagccctgaggttcccttcccaggacagctccaggatcgagatcactgtgagtggttgtggagttaagacccctatggactccttcccagctgattatcagagccttagacccagcactccttggattggctctgcagagtgtcttggttgagagaataacgttgcagttcccacagggcatgtgactttgaaagagactagaggccacactcagttaataatggggcacagatgtgttcccacccaacaaatgtgataagtgatcgtgcagccagagccagccttccttcagtcaaggtttccaggcagagcaaataccctagagattctctgtaatattggtaatttggatgaaggaagctagaagaattacagggatgtttttaatcccactatggactcagtctcctggaaaaggatctgtccactcctggtcattggtggatgttaaacccatattcctttcaactgctgcctgctagggaaaactgctcctcattatcatcactattattgctcaccactgtatcccctctactgggcaagtgcttgtcaagttctagttgttcaataaatttgttaataatgctgactcttc

SEQ ID NO: 28136 - DNA, 2935 bp, Homo sapiens
  SIMILAR (172)..(1932): 931254mologous to Homo sapiens butyrophilin,accession number U90548,Smith-Waterman Score=2822.
  misc_feature (1)...(2935): n = a,t,c or g
acgcgtccgcttcggaatgagagactcaaccataatagaaagaatggagaactattaaccaccattcttcagtgggctgtgattttcagaggggaatactaagaaatggttttccatactggaacccaaaggtaaagacactcaaggacagacatttttggcagagcatagatgaaaatggcaagttccctggctttccttctgctcaactttcatgtctccctcttcttggtccagctgctcactccttgctcagctcagttttctgtgcttggaccctctgggcccatcctggccatggtgggtgaagacgctgatctgccctgtcacctgttcccgaccatgagtgcagagaccatggagctgaggtgggtgagttccagcctaaggcaggtggtgaacgtgtatgcagatggaaaggaagtggaagacaggcagagtgcaccatatcgagggagaacttcgattctgcgggatggcatcactgcagggaaggctgctctccgaatacacaacgtcacagcctctgacagtggaaagtacttgtgttatttccaagatggtgacttctacgaaaaagccctggtggagctgaaggttgcagcattgggttctgatcttcacattgaagtgaagggttatgaggatggagggatccatctggagtgcaggtccactggctggtacccccaaccccaaataaagtggagcgacaccaagggagagaacatcccggctgtggaagcacctgtggttgcagatggagtgggcctgtatgcagtagcagcatctgtgatcatgagaggcagctctggtgggggtgtatcctgcatcatcagaaattccctcctcggcctggaaaagacagccagcatatccatcgcagaccccttcttcaggagcgcccagccctggatcgcggccctggcagggaccctgcctatctcgttgctgcttctcgcaggagccagttacttcttgtggagacaacagaaggaaaaaattgctctgtccagggagacagaaagagagcgagagatgaaagaaatgggatacgctgcaacagagcaagaaataagcctaagagagaagctccaggaggaactcaagtggaggaaaatccagtacatggctcgtggagagaagtctttggcctatcatgaatggaaaatggccctcttcaaacctgcggatgtgattctggatccagacacggcaaacgccatcctccttgtttctgaggaccagaggagtgtgcagcgtgctgaagagccgcgggatctgccagacaaccctgagagatttgaatggcgttactgtgtccttggctgtgaaaacttcacatcagggagacattactgggaggtggaagtgggggacagaaaagagtggcatattggggtatgtagtaagaacgtggagaggaaaaaaggttgggtcaaaatgacaccggagaacggatactggactatgggcctgactgatgggaataagtatcgggctctcactgagcccagaaccaacctgaaacttcctgagcctcctaggaaagtggggatcttcctggactatgagactggagagatctcgttctataatgccacagatggatctcatatctacacctttccgcacgcctctttctctgagcctctatatcctgttttcagaattttgaccttggagcccactgccctgaccatttgcccaataccaaaagaagtaagangagttcccccgatcctgacctagtgcctgatcattccctggagacaccacttgaccccggggcttagctaatgaaagtgggggagcctcaggctggaaagtaacatctctgcttctccctgcccaccctgggagctgaaggtctccccttctgcaacaaccaatcagaaccataagctacaggcacgcactgaagcactttactgatattcattccattattccatatgacagttgttttgagtttcgtaccaccttattgtccccttatacagataaggaaactggggtgcagaaaggtgaattaactttacaaagtagacatgacaagtgaacagcagagctgggatctaaacagcaataactaacattaacagagaatttaaaatgttcttagtgctgtgttataagctttggtggatgtcactcctttaatcctcacaacaccctgtcgggtagtcatattttgcaagtatggaagctgaggcagggcaacatgaagtaacttacataattcatacagtaatttgtgcagttgggagatgttcagccttagtccctggctaattgcctgttcttttccagcctgattttttttcccacaggaagagcccacatgtagccctgaggtttccttcccaggacagctgcagggtagagatcattttaagtgcttgtggagttgacatccctattgactctttcccagctgatatcagagacttagacccagcactccttggattagctctgcagagtgtcttggttgagagaataacctcatagtaccaacatgacatgtgacttggaaagagactagaggccacacttgataaatcatggggcacagatatgttcccacccaacaaatgtgataagtgattgtgcagccagagccagccttccttcaatcaaggtttccaggcagagcaaataccctagagattctctgtgatataggaaatttggatcaaggaagctaaaagaattacagggatgtttttaatcccactatggactcagtctcctggaaataggtctgtccactcctggtcattggtggatgttaaacccatattcctttcaactgctgcctgctagggaaaactgctcctcattatcatcactattattgctcaccactgtatcccctctacttggcaagtggttgtcaagttctagttgttcaataaatgtgttaataatg

SEQ ID NO: 28137 - DNA, 3471 bp, Homo sapiens
  SIMILAR (643)..(2220): 971254mologous to Homo sapiens butyrophilin precursor,accession number U39576,Smith-Waterman Score=2713.
atgacaccggagaacggatactggactatgggcctgactgatgggaataagtatcgggctctcactgagcccagaaccaacctgaaacttcctgagcctcctaggaaagtgggggtcatcctggactatgagactggacatatctcgttctacaatgccacggatggatctcatatctacacatttctgcacgcctcttcctctgagcctctgtatcctgtattcagaattttgaccttggagcccactggcctgaccgtttgcccaataccaaaagtagagagttcccccgatcccgacctagtgcctgatcattccctggagataccactgaccccaggcttagctaatgaaaaaaactcagatggagaaagtgatgctggctcacacctggctgacacctcaatggcttccagggccaaggcccagagagtgaatataccaggccacctggaggcaggctttcctgagagcacctcccgcttccttttcctgctggcttttaacttttgccccgggggccacagccagctttctcacttggtagcagtggcctcttgtgcctttttctccaagatcacccaggctgaagctcctgaggggactcacatcagttatcttgctgctccagaagggtgggagatggcagttttcccaagctccggtctccccagatgtctgctcaccctcattctcctccagctgcccaaactggattcagctccctttgacgtgattggacccccggagcccatcctggccgttgtgggtgaggacgccgagctgccctgtcgcctgtctccgaacgcgagcgccgagcacttggagctacgctggttccgaaagaaggtttcgccggccgtgctggtgcatagggacgggcgcgagcaggaagccgagcagatgcccgagtaccgcgggcgggcgacgctggtccaggacggcatcgccaaggggcgcgtggccttgaggatccgtggcgtcagagtctctgacgacggggagtacacgtgctttttcagggaggatggaagctacgaagaagccctggtgcatctgaaggtggctggccttggggctaagcccctcattgaaatcaaggcccaagaggatgggagcatctggctggagtgcatatctggagggtggtacccagagccccaggtgcagtggagaacttccaagggagagaagtttccatctacatcagagtccaggaatcctgatgaagaaggtttgttcactgtggctgcttcagtgatcatcagagacacttctacgaaaaatgtgtcctgctacatccagaatctccttcttggacaggagaagaaagtagaaatatccataccagcttcctccctcccaaggctgactccctggatagtggctgtggctgtcatcctgatggttctaggacttctcaccattgggtccatatttttcacttggagactatacaacgaaagacccagagagaggaggaatgaattcagctctaaagagagactcctggaagaactcaaatggaaaaaggctaccttgcatgcagttgatgtgactctggacccagacacagctcatccccacctctttctttatgaggattcaaaatctgttcgactggaagattcacgtcagaaactgcctgagaaaacagagagatttgactcctggccctgtgtgttgggccgtgagaccttcacctcaggaaggcattactgggaggtggaggtgggagacaggactgactgggcaatcggcgtgtgtagggagaatgtgatgaagaaaggatttgaccccatgactcctgagaatgggttctgggctgtagagttgtatggaaatgggtactgggccctcactcctctccggacccctctcccattggcagggcccccacgccgggttgggattttcctagactatgaatcaggagacatctccttctacaacatgaatgatggatctgatatctatactttctccaatgtcactttctctggccccctccggcccttcttttgcctatggtctagcggtaaaaagcccctgaccatctgcccaattgctgatgggcctgagagggtcacagtcattgctaatgcccaggacctttctaaggagatcccattgtcccccatgggggaggagtctgcccctagggatgcagacactctccattctaagctaatccctacccaacccagccaaggggcaccttaaggaatatctcagctcatctgttttcctttcctctaacccctctcctccatagccttctgaggcttcacctgctagctttacccagtctgtttcttcctgttgggtggcaattaattaatcctgtgaaggttacattgctgctgctagagagggtggggattgcaccttccaaatctgtttctgtaccaatatttgggggatggaggggtgactcaaactgcttctagtgttctcctaatcccttaagactagaacctataggaaactacttggagcaaactcaaaggacagattagggatcgagattgggtcaggttagcatggggttgtggttgaaatatcttggtatccaggataagggtatgtggaaaaacaggctttaggcaagtggaaaattcaaaatgtgctgtgaaaggacaatctcaggctgaaatcccataaaggaacttggagggaatattatgatggagggaagtgaggtgaatccaggcacatgatgaacacctggctcatccatagagttttcacagcctatatcgcaaattttctaagccacgtcctataggacagaggagactggccccacttctatgggtctgagctgtggaaaagggagagcagagaggaactgagatgagcagggatgaagggtcaggcagaaagcgtgatagaggagagaatttttgacaaaactcaaaagttgtttgcacagctgttctttgtaccctgttccttcctctgcgccctcctgtttctcccttgcctggaagtcattccaccctcaatttgttgatccacaagtttccagttgtcctcttctttttgttatagcatctctctatttcaaagacattcctagaagtcatccttcagtgatatcaccacttgctcagtcaccatctcaaccttatgtcacctcagccctcatctcaatgcccaaaccccttacacacaccttcagttagcttcaactgcctccgtttccacactgtgcacctttcactttccctacccagctttcctacatgctgcctctcctcagggtcccctgaatgctgcatcattgtgttcagtgcagctggactgattgcacctgtgtatttgcccctgagcactttcctttacacatgtggcttgtcttgccaatagactccaggcttacaccttccatttccatcgtattctccagtttccaggatagatgttgctcatcgtctttacctaataaataagtttgtctgattgctg

SEQ ID NO: 28138 - DNA, 509 bp, Homo sapiens
  SIMILAR (284)..(352): 781254mologous to Homo sapiens G6f,accession number AF129756,Smith-Waterman Score=88.
gcatggaaagtctttatttgagccccttagctgatgtggaatcagaagagcaaaaaggtcatcttcagagtggcctgggctgggtccttttctctccaggatagaaaagtggtggtcactttatccctagtagacatgctgctgggctttatcgccccagcattcccatcccctccagagccccttgtcactccagaccagcgagtgtgggcctttatctggactctgcttcctccctggggacaccaggtcttggagcaagagaacttggcaggctctccccatggcagtcttattcctcctcctgttcctatgtggaactccccaggctgcaggtaaggggcaagaggtacgggattccttagctatttgcaaggttggggagggactactgctctttctcctaggagcctggcgaaggcatctgactcaagaagatagaattaccccaaccaacctcatcctgcctctgacactagggaagacccagaggcaacgagggtccaggt

SEQ ID NO: 28139 - DNA, 730 bp, Homo sapiens
  SIMILAR (474)..(728): 1001254mologous to Homo sapiens G5c,accession number AF129756,Smith-Waterman Score=467.
cgttccaggacgctgaggaccacctcctcccctaacgcacagcccaacgatcctaaaagtaaaaaccctgagtttctgagtcaagactgagctggtggggtggggaccgagtaggcgtggatggggagcccagcggtccccagcggagaaaatgggtgagacgcctggggccgcggtctccagaattcgcctgggagggagagtggcgctacggcgccatgtccgtggggagccgcttcgggctccggattgtccgctggggcccgacgcttgggtcccgacgcgcggttcgcactttccaggtttcttccccagggaacagagcttgagcggggggccacccccccgtcctaccggagttctgaggtgcggtcaggcgcggagagcggacgcccagcgccagattctgtgggctccggagttcaggcccactgagccgcagctgagcacaggcggggcaggaaaaaggatgaggtaagtttgttcctgtcaattgggaaccccctcaaccacttccattccccaaatacctgcgctgctaccgatgcctcttggagaccaaggagttagggtgccttctgggatctgacatctgcctcaccccagctggcagcagctgcatcactctccacaaaaagaacagcagcggttctgacgtcatggtgagtgactgccgaagtaaggagcagatgagtgattgttcaaatacccgaacttctccggtgtctgg

SEQ ID NO: 28140 - DNA, 1477 bp, Homo sapiens
  SIMILAR (382)..(1032): 991254mologous to Homo sapiens megakaryocyte-enhanced gene transcript 1 protein; MEGT1 protein,accession number AF195764,Smith -Waterman Score=1158.
atgcagaccttcccagttgctggggcgctggaccctgctatactggacacaaggccccgccttctttgtttcgtcactcggttgcttaccctcaggtatcccttaactctagaattcgcctgggagggagagtggcgctacggcgccgccttcctggggagccgcttcgggctccggatgtccgctggggcccgacgcttgggtcccgacgcgcggttcgcactttccaggtttcttccccagggaacagagcttgagcggggggccacccccccgtcctaccggagttctgagaccagcgagtgtgggcctttatctggactctgcttcctccctggggacaccaggtcttggagcaagagaacttggcaggctctccccatggcagtcttattcctcctcctgttcctatgtggaactccccaggctgcagacaacatgcaggccatctatgtggccttgggggaggcagtagagctgccatgtccctcaccacctactctacatggggacgaacacctgtcatggttctgcagccctgcagcaggctccttcaccaccctggtagcccaagtccaagtgggcaggccagccccagaccctggaaaaccaggaagggaatccaggctcagactgctggggaactattctttgtggttggagggatccaaagaggaagatgccgggcggtactggtgcgctgtgctaggtcagcaccacaactaccagaactggagggtgtacgacgtcttggtgctcaaaggatcccagttatctgcaagggctgcagatggatccccctgcaatgtcctcctgtgctctgtggtccccagcagacgcatggactctgtgacctggcaggaagggaagggtcccgtgaggggccgtgttcagtccttctggggcagtgaggctgccctgctcttggtgtgtcctggggaggggctttctgagcccaggagccgaagaccaagaatcatccgctgcctcatgactcacaacaaaggggtcagctttagcctggcaggcagcggttctgacgtcatggtgagtgactgccgaaagtaaggagcagatgaagtgattgttcaaaatacccgaacttctccggtgtctggcttctggatattctctcaaatactgcttcctggatttctgcaatgacccttcaaaacagagggctctatactccttagtgtgactgcagcaaactttggtgtaaaattccaccagtttccagccaccttcctgacttctatctgggcttggccaggacttctagtccctcataccagccctccttgcctccgtccagccactggaccccagccttggctcttcctcttggttgacgcccttcagcacacttactgctactctgtacccccagccctactgcccaccaggtttccgctcttgtcccctagtccctggatgtttctcccaaataaatttgtgtggtaaactgtaaaaaaaa

SEQ ID NO: 28141 - DNA, 692 bp, Homo sapiens
  SIMILAR (113)..(262): 411254mologous to Chionodraco rastrospinosus metallothionein,accession number Z72484,Smith-Waterman Score=88.
ctcccgggtcgacgatttcgtctggtagtgagctcagaccctgcagtgggatggggtgctctctgctaggtgctgaccccgcacaggtatggggtgctgtctgccaggtgctgaccccgcagagatccgttcttccccctctccttcctggtcaacagctggctcccagggatgctggatgacctctttcagtccatgttcctgtgcgccctgctgctcttctggctgtgcgtgtaccacgggattcgtgtccagggagaaagaaagtgtttaactttctatttgcctaaattcttcattgttggactattgtggttggcttctgttacgctaggaatatggcaaacggaatgaaggtcttcttcatggtggtggcagcggtgtacattctgtacctcttgttcttgatagtgcgggcgtgttccgagctacgtcacatgccttatgtggcaccaccagccgagttcttatctttctatggcctgttgaacttctatctctacaccttggcctttgtatattctccatcgaagaatgccctctatgagtcccagctgaaagacaatcctgccttctccatgctgaatgactcggatgatgatgtgatttatgggagtgactatgaggaaatgccgctgcagaacggccaggccatccgggccaagtacaaggaggagtcagatagtgactga

SEQ ID NO: 28142 - DNA, 415 bp, Homo sapiens
  SIMILAR (1)..(414): 681254mologous to Homo sapiens ribosomal protein S8,accession number X67247,Smith-Waterman Score=446.
cgagcgatgggcatctctcgggacaactggcacatgcgccgtaaaaccgggggcaagagaaagccctaccacaagaagcggaagtatgagttggggcgcccagctgccaacaccaagattggcccccgccgcatccacacagtccgtgtgcggggaggttgtactcgtaaaacaaggatcatcgatgttgtctacaatgcatctaataacgagctggttcgtaccaagaccctggtgaagaattgcatcgtgctcatcgacagcacaccgtaccgacagtggtacgagtcccactatgcgctgcccctgggccgcaagaagggagccaagctgactcctgaggaagaagagattttaaacaaaaaacgatctaaaaaaattcagaagaaatatgatgaaaggaaaaagaatgccc

SEQ ID NO: 28143 - DNA, 346 bp, Homo sapiens; identical to SEQ ID NO: 16382
  SIMILAR (29)..(256): 861254mologous to Homo sapiens ribosomal protein S8,accession number X67247,Smith-Waterman Score=329.
  misc_feature (1)...(346): n = a,t,c or g

SEQ ID NO: 28144 - DNA, 657 bp, Homo sapiens
  SIMILAR (31)..(654): 831254mologous to Homo sapiens ribosomal protein S8,accession number X67247,Smith-Waterman Score=906.
atggggcctctttccagccagcgccgagtgatgggcatctctcaggacaactggcacaagcgccgcaagactggcagcaagagaaagccctacgacaagaagcggaagtatgagttggggcacctggctgccaacaccaagattggcccccaccacatccacacagtccgtgtgtggggaggtaacaataaatacggtgccctgaggcgggacatggggaatttctcctggggttcagagtgttgtactcgcaaaacaaggatcactgatgttgtctacgatgcgcccaatagcaagctggtccgtaccaagaccctggtggagaactgcttcgtgctcactgacagcacaccgtaccaccagtggtatgagtcccactatgcgctgcccctgggctgcaagaagggagccaaactgactcctgaggaagaaaagactttaaacaaaaaacgatctaaaaaaattcagaagaaatacgatgaaagggaaaagaatgccaaaatcagccgtctcctgggggagcagttccagcagggcaagcttcttgcatgcgtcgcttcaaggctgggacagtgtggccaagcccatgtctatgtgccagggggcaaggagatggagttctatcttaggaaaatcaaggcccggaaaggcaaataa

SEQ ID NO: 28145 - DNA, 747 bp, Homo sapiens
  SIMILAR (44)..(247): 821254mologous to Homo sapiens ribosomal protein S8,accession number X67247,Smith-Waterman Score=294.
tcccggtgaattcacgcgtgcgccacgcgtacggcgccgagcgatgggcatctctcgggacaactggcacaagcgccgcaaaaccgggggcattagaaagccctaccacaagaagcggaagtatgagttggggcgcccagctgccaacaccaagattggcccccgccgcatccacacagtccgtgtgcggggaggtaacaagaagataccgtgccctgaggttggacgtggggaatttctcctggggctcacagtgttgtactcgtaaaacaaggatcatcgatgttgtctacaatgcatctaataacgagctggttcgtaccaagaccctggtgaagaattgcatcgtgctcatcgacagcacaccgtaccgacagtggtacgagtcccactatgcgctgcccctgggccgcaagaagggagccaagctgactcctgaggaagaagagattttaaacaaaaaacgatctaaaaaaattcagaagaaatatgatgaaaggaaaaagaatgccaaaatcagcagtctcctggaggagcagttccagcagggcaagcttcttgcgtgcatcgcttcaaggccgggacagtgtggccgagcagatggctatgtgctagagggcaaagagttggagttctatcttaggaaaatcaaggcccgcaaaggcaaataaatccttgttttgtaattcccccatgtaataaaggtggtttattgctttgctcccacaatatatgttgcctgaaaaa

SEQ ID NO: 28146 - DNA, 1259 bp, Homo sapiens
  SIMILAR (231)..(1193): 311254mologous to Drosophila melanogaster ankyrin,accession number L35601,Smith-Waterman Score=362.
cccaggaccttgggccccgtcctagtgacgacggagaagagggccgctgccgctgcagtggctcgtgggtgagagcaagtgaagaccgccgcagcatcaggggcctggactcaactcctccccagagtcggaggtgttgcgccatgcccggggtggccaattcaggcccctccacttcctctagggagactgcaaacccctgttccaggaagaaggtgcattttggcagcatacatgatgcagtacgagctggagatgtaaagcagctttcagaaatagtggtacgtggagccagcattaatgaacttgatgttctgcataagtttacccctttacattgggcagcacattctggaagtttggagtgtcttcattggctgctctggcatggagctgatatcacacacgtaacaacgagaggttggacagcatctcacatagctgcaatcaggggtcaggatgcttgtgtacaggctcttataatgaatggagcaaatctgacagcccaggatgaccggggatgcactcctttacatcttgctgcaactcatggacattctttcactttacaaataatgctccgaagtggagtggatcccagtgtgactgataagagagaatggagacctgtgcattatgcagcttttcatgggcggcttggctgcttgcaacttcttgttaaatggggttgtagcatagaagatgtggactacaatggaaaccttccagttcacttagcagccatggaaggccaccttcactgtttcaaattcctagtcagtagaatgagcagtgcgacgcaagttttaaaagctttcaatgataatggagaaaatgtactggatttggcccagaggttcttcaagcagaacattttacagtttatccagggggctgagtatgaaggaaaagacctagaggatcaggaaactttagcatttccaggtcatgtggctgcctttaagggtgatttggggatgcttaagaaattagtggaagatggagtaatcaatattaatgagtgtgctgataatggatcaactcctatgcataaagctgctggacaaggccacatagagtgtttgcagtggttaattaaaatgggagcagacagtaatattaccaacaaagcaggggagagacccagtgatgtggcaaagaggtttgcccatttggcagcagtgaagctgttagaggagctacagaaatatgatatagatgacgaaacgaaatggtggatccgggaattcaggggcaat

SEQ ID NO: 28147 - DNA, 2683 bp, Homo sapiens
  SIMILAR (23)..(124): 371254mologous to Lycopersicon esculentum extensin (class I),accession number X55683,Smith-Waterman Score=55.
atgccatcgacaacaatcttagcccccatcacagcagcaatccgaacccaggtactcccctccataatccccgagtcgatgaccgtcgtgaatctccagcgcatttccgcccccccaccacacgcgcagcagtacgttttgcagtaccaccatcggcggtcgcacatatccagcaccctagcagcccggtctgcgggtgcgtgcctctctcggtgtaccctcccggctgactaccgcgtagcggttgtcatttcctcgcctcccagcacccactcgcgcaatcgtattcaattaccggtcatcagcccatgcacaaccccgtgctgcactcgccctagtgactattgtacagcccaagtgtctaccaaaggtccttccccccctactatttcaatacgcgtgctgactacggtaagcaacccgattccggcaaagcgttacatcggctgcaggccaaggcgggtatacagcaaatcctctcaccagcgtaagcaatcgtacagtactagtgttcgcgaagcgtacagtacaagtgttcgcgaagcgtgcagttggcgcaggcggcaaaccgttacatccgcggcacgcgtaggcgggttactagcaaatcctgtaacagggaggtgcgcatcgccctccacccgccccgcccctgcttccccactcccaagccagcgccaaccccgccaccttatcagtcgtcctatccccaccccaccccaccccaccccacccccatatcaatacgcgtgcacacgtgggtcagcaatacagtacaacaggtcgccaagcgtcctgttggcggtggccggaaaccctttagcatttccaggtcatgtggctgcctttaagggtgatttggggatgcttaagaaattagtggaagatggagtaatcaatattaatgagcgtgctgataatggatcaactcctatgcataaagaaaaatgttcaacaggaagttttgcctacatttttggattcacagacctcagttcctatggcagtgttcatatacaaaaatgttcaacaggaagttttgcctacatttttggattcacagacctcagttcctatggcagtgttcatatacgttccaggaagaaggtgcattttggcagcatacatgatgcagtacgagctggagatgtaaagcagctttcagaaatagtggtacgtggagccagcattaatgaacttgatgttctccataagtttacccctttacattgggcagcacattctggaagtttggagggagaaggcaataagggtggaaaaactgggccgagaggggaatccaggttggtgatgcccctggagggcagccaagtggctggagtcgggaggctggaaagagactccgagaaagtaccagcggaaggcggcgcgccgctacggcgattcgcagggagtagcagacgaagacgggtggccgccgcactagccaccacgtgtgagggataaacggtctacacggccattccggcgccgagtctagggaaagagttagcgacgacggggaaagaaaatgtgaagagagcgaccgccgctccagggtcgctgcaggaagcctaagtgcagacgccggcttctcccgcagtgacttgagaagggtcagtgaaaacctcggccactgccgcagcgtctctagggagagagttaggggagatagtggccacagtcacagctgctcttgggagaaagttaggggagacagcacccttctgcagcagcgacgtgaattttagtggaagctggaggccaccaaactaccgactccaggggaacagccagagaagaccgaggcctccgcctcagtggtccttgggagggagtcagtgacattcgggacccgcgaactagtgacttcggggatagagtcagtgacgatcgcagtcgccgcttcagtggctcctgggagggagggagtgtcgaaggcggccacagcgttggtagttcttgggaggaagtaagtggagaccgcggctacgcagccagcgactcctctggtgtgagcggcagtgaagacgccagctaccgcttcagtggcttttgggagagagaaagtgaagacgaaggtttccgctgcagcttctgggagagagcaagagaggaccttgggccccgtcctagtgacgacggagaagagggccgctgccgctgcagtggctcgtgggtgagagcaagtgaagaccgccgcagcatcaggggcctggactcaactcctccccagagtcggaggtgttgcgccatgcccggggtggccaattcaggcccctccacttcctctagggagactgcaaacccctctgctggacaaggccacatagagtgtttgcagtggttaattaaaatgggagcagacagtaatattaccaacaaagcaggggagagacccagtgatgtggcaaagaggtttgcccatttggcagcagtgaagctgttagaggagctacagaaatatgatatagatgacgaaaatgaaattgatgaaaatgatgtgaaatattttataagacatggtgttgagggaagcactgatgccaaggatgatttatgtctgagtgacttggataaaacagatgccagaaggcaagagtggaagcagggaaatcagttagggggctatcgctatagttcaggagagagttgtttatggcttggactggagtggagatga

SEQ ID NO: 28148 - DNA, 2505 bp, Homo sapiens
  SIMILAR (1642)..(2493): 721254mologous to multiple sclerosis associated retrovirus polyprotein,accession number AF009668,Smith-Waterman Score=1053.
atgagtgaactcccattcacaattgcttcaaagagaataaaatacctaggaatccaacttacaagggacgtgaaggacctcttcaaggagaactacaaaccgctgctcaatgaagtaaaagaggacacaaacaaatggaagaacattccatgctcatgggtaggaagaatcagtatcgtgaaaatggccgtactgcccaaggtaatttatagattcaatgccatccccatcaagctaccaatgactttcttcacagaattcgaaaaaactactttaaagttcatatggaagcaaaaaagagcccacattgccaagtcaatcctaagccaaaagaacaaagctggaggcatcacgctacctgacttcaaactgtactacaaggctacagtaaccaaaacagcatgtgttcctgtgtgcacgggcatctgcagccaggcctgtaggggaccgctccccgaagatgttgggggtctttccaggaaagtggtgagttcagaagttgccctggtgcataggaagagaataccccaaggggctactgaaagggccttgagtagggcactgattggtccattttacagggtgctgactggtccattttacaaacctctagctagccacagagcactgactggtgcatttttacagagcgctgactggcgcattttacaatcctcttgtaagatatcaaagttctccaagtccccacccaacccagaagtccagctggcttcacctctcaatcccccctctaaacaggacaccccaactgctgctaggaattgggcgatgcccactctagctacttcctgctggatagggaaggaaacaagcaaagaaatctccaaaggaccacaaaaactcccaggctatcggttatgtccccttcaagctgtagggggaggggaatttggcccaacccagggtctagggcaaaccttcaacctcacttggagagatgtcatgctattgttagatcaaaccctggcctttaatgaaaagaatgcagctttagttgcagcccaagagtttggagatacctggcatctcagtcacgtaaatgacagaatgacagtcgaagaaagggacaaattccctactggtcagcaagccattctcagtgtggatccccaccgggtcctcgactcagatcatggggactggagtcgtgaacatctgttaacctgtgtcctagaaggactaagcagaattaggaaaaagcccatgaattattcaatgacatccaccataactcagggaaaggaagaaaatcctaccgccttcctcgagcggctacaggaggccttaagaaaatatacttccctgttacccgactcactcgagggtcaattgatcctaaaagataagtttattacccagtcagctgcagatatcaggataaagctccaaaagctagccctggcccctgaacaaaatttggacgcattattaaacctggcaacctccgtgttctacagtagggatcgagaagaacaggctgaaaaggaaaaacggctgtcctcaaggtccgttaccatccgaggctcagtgttaatctcctgtcccggacagctgtcctcaaggtccattaccatccgaggaatcctgggacagtctgtaaccaggagtacaaaaaccagtcagtggagactagtgcaagatcttagactcatcaatgaagcagtaattcctctatatccagttgtacccaagccctataccctgttctctcaaataccaaaggaagcagaatcgttcacagttctggacctcaaggatgccttcttctgtattcccctgcactctgactcccagtttctctttgcctttgaggatcctacagatcacacgtcccaacttacgtggacagtcttgccccaaaggttcagggatagccctcacctgtttggtcaggcactggtccaagatctaggccacttctcaagtccaggcactctggtccttcagtttgtggatgatttacttttggctgccagttcggaagcctcatgccagcaagctactcgagatctcttgaactttctagctaatcaagggtacaaggcatctaaatcaaaggcccagctctgcctacaacaagtcaaatatctaggcctaatcttagccagaggaaccagggccctcagcaagaaacgaatacagcctatactggcttatcctcgccctaagacattaaaacagttgcgggggttccttggaatcaccagcttttgccgactacagatccctggatacagcaagatggccaggccactctatactctaataaaggagacccagagggcaaatactcatctagtagaatgggaaccagaggcagaaacagccttcaaatccttaaagcaggccctagtacaagctccagccttaagccttcccacaagacaaaacttctctttatacgtcagagagagagcaggaatagctcttgaagtccttactcagactcacgggacaaccctacaaccagtggcaaaaggctag

SEQ ID NO: 28149 - DNA, 2628 bp, Homo sapiens; identical to SEQ ID NO: 6213
  SIMILAR (1339)..(2028): 471254mologous to Moloney murine leukemia virus Pr180,accession number AF033811,Smith-Waterman Score=545.

SEQ ID NO: 28150 - DNA, 1680 bp, Homo sapiens
  SIMILAR (499)..(1077): 701254mologous to multiple sclerosis associated retrovirus polyprotein,accession number AF009668,Smith-Waterman Score=691.
atgacagctgaggaaagggacaaattccctactgaccagcaagccatccccagtatggatccccactgggaccctgactcagatcatggggactggagtcataaacatctgttgacctgtgttctagaaggactaaggagaattaggaaaaagcccatgaattactcaatgatgtccaccataactcagggaaaggaagaaaatccttctgccttcctcaagtggctacgggaggccttaagaaaatatactcccctgtcacccaactcactacggggtcaattgattctaaaagatacatttattacccaatcagctgcagatatcaggagaaagctccaaaagcaagccctgggccctgaacaaaatctggaggcattattaaaccaggcaacctcagtgttctataatagggaccaagaggaacaggcccaaaaggaaaaacgactgtcctcaaggtccgttaccatccggggaatcctgggacagtctgtaaccaggcctgaagctcataaaggattacaagatattgttaaacatttaaaagctcaaggcttagtaaggaaatgcagcagtgactgcaacaccccaattctaggagtacaaaaactgaatggtcagtggagactagtgcaagatcttggactcatcaataaggcaataattcctctatatccagttgtacccaacccctataccctgctctctcaaatatcagaggaagcagaatggttcactgttctggacctcaaggatgccttcttctgtattcccctgcactctgactcccagtttctctttgcctgtgaggaccccacagaccacacatcccaacttacacagacgatcttgccccacgggtttagggatagcccttacctgtttggtcaggcactggcccaagatctaggccacttctcaagttcaggcactctggcccttcagtatgtggatgatttacctttggctaccagtttggaagcctcatgccaacaggctactctagatctcttgaactttctagctaatcaagggtacaaggcatctaggtcaaaggcccagctttgcctacagcagcgagatggccagaccactctatactctaatcaaggagccccagagggcaaatactcatctagtagaatgagacccagggtcagaaacagccttcaaaaccttaaagcgggccctagtacaactccagctttaagccttcccacaggacaaaacttatctctatatgtcacagagacagcagggatagctcttggagtccttacgcaggctcatgggatgaacccccaaccagtggcatacctaagtaagaaaattgatgtagtagcaaaaggctggcctcactgtttaagggtagttgtggcagtggccatcttagtgtcagaggctatcaagataatacaaggaaaagatctcactgtctggactactcatgatgtaaatggcatactaggtgccaaaggaagtttatggctatcagacaactgcctacttagataccaggcactactccttgaaggaccggtgcttcaaatacctatgtgtgcagccctcaaccctgccacttttctcccagaggatggggaaccaatcagcatgactgccaaacttatagtccaaacttatgccgcccgagatgatctcttagaagtccacttagactga

SEQ ID NO: 28151 - DNA, 363 bp, Homo sapiens
  SIMILAR (228)..(124): 431254mologous to Bombyx mori fungal protease-specific inhibitor-F,accession number D38075,Smith-Waterman Score=58.
  misc_feature (1)...(363): n = a,t,c or g
ttagccactaaatccgatttttcttggtcctctttgtggtctaggaggacaggcaagggtgcaggttttcaagaatgcatcagtaagggccactaaatccgaccttcctcggttctccttgtggtctgggaggaagactagtgtttctgctgctgcgttggtgagagcaattattccaatcagcagggtccagggaccgttgcgggttcttgggcaggggttgtttctgctgctgtcagtgagcacaactattctgatcagcaggggccagggaccattgcaggttctgcgccacactcgaattcttgctgggccntcagccgcctccccgtggggcagggcttgggacctgcagcccgccat

SEQ ID NO: 28152 - DNA, 954 bp, Homo sapiens
  SIMILAR (208)..(711): 721254mologous to multiple sclerosis associated retrovirus polyprotein,accession number AF009668,Smith-Waterman Score=603.
atgagtattaccaaggaaaaaggctctatttggatgctgcagctgaagagatgggagttaaatctttctccccaactgattaaaactggggccttttctagtgcggaatgtagctacctgagggaaaacaggaattggagaggagtaaggaagaagagtttgtcaacaggaagcaagcagtcagttaggaaaacaggaattagggaggctgtacccaacccctataccctgctctctgaaataccagaggaagcagaatggttcactgttctggacctcaaggatgcttccttctgcattcccctgcactctgactcccagtttctcttcgcttttgaggatcccacagaccacatgtcccaacttacatggatggtcttgcctcaagcgtttagggatagtcctcatctgtttggtgaggcactggcccaagatctaggccacttctcaagtccaggcactctggtccttcaggatgtggatgatttgcttttggctaccagttcggaagcctcatgccagcaggctactctagatctcttgaactttctagctaatcaaggatacaagacatctaaattgaaggcctacctctgcctacaacaagtcaaatatctagacctaatcttagccagaggaactagagccctcagcaaagaacaaattcagcctatactggtttatcctccccctaagacattaaaacaattggattttgccgatttcggaaccaccatcaaacaggattttcgcctgctggggcaaaccagcgtggaccgcttgctgcaactctctcagggccaggcggtgaagggcaatcagctgttgcccgtctcactggtgaaaagaaaaaccaccctggcgcccaatacgcaaaccgcctctccccgcgcgttggccgattcattaatgcagctggcacgacaggtttcccgactggaaagcgggcagtga

SEQ ID NO: 28153 - DNA, 3404 bp, Homo sapiens
  SIMILAR (2733)..(3005): 701254mologous to multiple sclerosis associated retrovirus polyprotein,accession number AF009668,Smith-Waterman Score=336.
tcattccttgctgagggccctggcccctctggctaagattaagcctagatattcgacctgctgtaggcaaagctgggcctttgacctagatgccttgtacccttgattagctagaaagttcaagagatctagagtagcctgttggcatgaggcttccaaactggtagccaaaggtaaatcatccacatactgaagggccagagtgcctgaacttgagaagtggcctagatcttgggccagtgcctgaccaaacaggtaagggctatccctaaacccgtggggcaagatcgtctgtgtaagttgggatgtgtggtctgtggggtcctcacaggcaaagagaaactgggagtcagagtgcaggggaatacagaagaaggcatccttgaggtccagaacagtgaaccattctgcttcctctgatatttgagagagcagggtataggggttgggtacaactggatatagaggaattattgccttattgatgagtccaagatcttgcactagtctccactgaccattcagtttttgtactcctagaattggggtgttgcagtcactgctgcatttccttactaagccttgagcttttaaatgtttaacaatatcttgtaatcctttatgagcttcaggcctggttacagactgtcccaggattccccggatggtaacggaccttgaggacagtcgtctatcaggaccatctgaaaacttcaccaggtctgccttgatctgctttaaatcagagagggagaaagggtcatgtacctgggtggggccaaattccccaccccctacagcttgaaggggacaaaactgacagcctggggggttttgtggtcctttggagatttctttgcttatttccttcaatgctcccaactctgaagagtcggggtttgttagagagccctttcccagaaagcctgacacccgtgtctttagtccggcggctgtgctagtcacttttaactggccaataggtgtctggtatttagcccctgaattagggaagtgtgaagagagaggcgcaggcaggagctggggctgcgtgcggtgctcacaggccagtgcgggttccaggtgagcgcaggcttggcaagccccgcactcagggcagcgggctgatgcctgctgggcttgatcagaggctgaatcccatgcatggaccgccattcccttttcacgggatgattggccacaataccaggtctccatctctttctcgcttcccctcttttcctcttgattgtctgggacgagctccctctgggctgccagagtgcccagacaatcagctctctgtaaaatggaccagtcagctctctcaggaggatgtgggtggggcaagataagggaataaaagcaggcgaccagagccagcaggggcaactggctcaggtcactttccaggctgtggaacctttgttctttcactcttcgcaataaatctcgctgctgctcactctttgggtccgcaaagcctttatgagctgtaacactcaccatgaaggtctgcaggttcactccacgaaggtctgcagcttcactcatgaggccagcaagaccacgaacccaccagaaggaatgaacaactccagatatgccgcctttaagagctgtaacactcactgtgaaggtctgcagcttcactcctgaagtcagtgagaccacgaacccaccaggaggaagaaactctggacacatctgaacatctgaaggaacaaactgcggacacatcatctttaagaactgtaacactcactgctagagtctgcggcttcattcttgaagtcagcgagaccaagaactcaccggaaggaaccaattccggacatattttgacatcccagatgggactatcacctattgccaagcggagggaaactagtgcttctgctgctgcgttggtgagtgcaactattccaatctgcagggtccagggaccattgcgggttcttgggcaagaggtgtttctgctgctgcttcgccttcctacagctccccttcctattaatgataagcctcctctaatctcccctgcccagaaggaaacaagcaaagaaatctccaaaggaccacaaaaacccctgggctatcggttatgtccccttcaagcagtagggggaggggaatttggcctaacccgggtacatgtccccttctccctctatgatttaaagcagatcaaggcagacttggggaagttttcagatgatcctgataggtacatagatgtcctacagggtctagggcaaactttctatctcacttggagagatgtcatgctattgttagatcaaaccctggcctttaatgaaaagaacgcagctttagctgcagcccgagagtttggagatatctgggaccaaggggaacagtccaaaaaggaaaagcaagatcagagaaagaccgtagccttagtcatggccctcagacaaataaaccttggtggttcagagaggacagaaaatggagcaggtcaatcagccgggtttagggatagccctcaactgtttggtcaggcactggcccaagatctaggccacttctcaagtccaggcactcttgtccttcaatatgtggatgatttacttttggctaccagtttggaagcctcatgccagcaggctactctagatctcttgaactttctagctaatcaagggtacaaggtgtctaggtcgaaggcccagctttgcctacagcaggtcaaatatctaggcctaatcttagccagagggaccagtgcccagttagcagaactactggcacttaccctagccttagaactgggaaatggaaaaagaataaatgtgtatacagatagcaagtatgcttatctaatcctgcatgatcatgctgcaatatggaaagaaagggcgttcttaacctctgggggaacccccattaaataccacaaggaaattatggagttattgcacacagtgcaaaaacccaaggaagtggcagtcttacactgccaaagccatcaacaagctcaaggctctgtggctctacaatcagcagatggaaaaggcagccaggcttttgtcattttcttcaagtcagcaggttccctctggccaaagatatgttcagaaatgccatccaggatccatggcctggaaatggaagccttcagaatccacttggtgctctattccactgtggctgaggtggaacccaaaaaacaagacaaaattcttctcactattcccacccatttttataagcacatgagtctctctccacgaccaccactggcccaggcccacagaatggagcttcctgagagtcgaactgcagtgattgtttttgctcttctggatctagccacccagtggagctaccgagctctgggctggtactggggactgtctgcaaagagtcctgtgatgtaa

SEQ ID NO: 28154 - DNA, 1566 bp, Homo sapiens
  SIMILAR (1317)..(1412): 591254mologous to multiple sclerosis associated retrovirus polyprotein,accession number AF009668,Smith-Waterman Score=89.
atgtttcggaaggatgaagaactgacttcctcacagagggatttagctgtaaggaactgggcatggagcctagcccgtggtgagcgctcagcaaacatgcacgcagtacacacctcgcttctagtggaaaggacaatactgaccacgaccaaggaaagagggtctaccttgcaatatcccttaagacctggagctcataaaggattgcaagatattgttaaacgtttcaaagctcaagccttaataaggaaatgcagcagtccctgcaacaccccaattctaggagtacaaaaaccgaatggtcagtggagactagtgcaagatcttagacttatcaatgaggcagtaattcctctatatccagttgtacccaacccctataacctgctctctcaaataccagaggaagcagaatggttcactgttctggacctcaaggatgccttcttctgtattcccctgcactctgactcccagtttctctttgcctttgaggatcccacagaccacacgtcccaacttacgtggacggtcttgcccccagggtttagggatagccctcccctgtttggtcaggcactggcccaagatctaggccacttctcaagtccaggcactctggtccttcagtatgtggatgatttacttttggccaccagttcagaagcctcttgccagcaggctactctagatctcttgaactttctagctaatcaagggtacaaggtgtctaggtcaaaggcccagctttgcctacagcaggttaaatatctaggcctaatcttagccaaagggaccagggccctcatcaaggaacgaatacagcctatactggcttatccttgccctaagacattaaaacagttgcgggggttccttggaattaccggcttttgccaactatggatccccggatacagcgagatagccaggcccctctatactctaatcaaggacacccagagggcaaatactcatctagtagaatgggaatcagaggcagaaacagccttcaaaaccttaaagcaggccctagtacaagcgccaggtttaagccttcccacaggacaaaacttctctttatatgtcacagagagagccgggatagctcttggagtccttactcagactcgtgggacaaccccacaaccagtggcacacctaagtaaggaaactgatgtagtagcaaaaggctggcctcactgtttaagggtagttgcagcagtggccgtcttagtgtcagaggctatcaaaataatacaaggaaaggatctcattgtctggactactcatgaagtaaatggcatactaggtgaaaaggaagtttatggctatcagacaaacgcctatttagataccaggcgctctgccttgagggactggtgcttcaaatacgcacgtcctgtggcagccatcttgctgttactcgcctttgggccctgtatttttaaccttcctgtcaaatttgtttcctctagaatcgaggccatcaagctacagatggtcttacaaatggacccccaaatcagttcaactaacaacttctaccgaggacccctggactga

SEQ ID NO: 28155 - DNA, 1143 bp, Homo sapiens
  SIMILAR (923)..(1036): 471254mologous to Nicotiana alata PRP2,accession number A31036,Smith-Waterman Score=85.
ttataggacatgggaaggtcccaatactaacagtagaatgcttaggactctaacaggttttcggactgcatcagtaaggttagccactaaatccgatttttcttggtcctcttgtggtcttcctcggttctccttgtggtctgggaggagactagtgtttctgctgctgcgttggtgagagcaattattccaatcagagggtccagggaccgttgcgggttcttgggcaggggttgtttctgctgcgtcagtgagcacaactattctgatcagcaggggccagggaccattgcagttctgtttggtcaggcctggcccaatatctaggccaattctcaagtccaggcactggcccaagattaggccacttctcaagtccaggcactctggtccttcagtatgtggatgattacttttggctaccagtttggaagcctcatgccagcaggctactctagtctcttgaactttctcgcttgccacactcgaattcttgctgggcctcagccgcctccccgtggggcaggcttgggacctgcagcccgccatgcccgagccccactgtggtgggctccgtgcggcccgagcctccctgatgggcactgccccctgctccatggcgccggtaccatcgacaacccaagggctgaggaatgcaggtgcatggcacgggctggcaggcagctccacccgtggccccagcgcgggatccactaggtgaaccagctgggctcctgtgtctagctcagggattgtaaatgcaccaatcagcaccctgtcaaatggaccaatcagctctctgtaaaactgacctatcagctctctgtaaaacgaccaatcagctctcgtgagagcccgcagttcattctcgaagtcagtgaaaccaagaacccaccaattcttccacatgttcaacatcggccccgcgcgggacggtccgccgcctccctctcctgctccccacggacccggaacacttccgtaccggggcagttccaggccggggtcaccgccgcccccgcctcgaactcccccagtcagctccttcctttgccacagcagcggcgcgccggtgacacgtcgagacgcggcagcacaggcgcacctgctctgctctcgcttccctttttccttcataggcat

SEQ ID NO: 28156 - DNA, 510 bp, Homo sapiens
  SIMILAR (372)..(1): 781254mologous to Drosophila melanogaster epsin-like protein,accession number AF233291,Smith-Waterman Score=532.
atttataccttgatccttaccatgctcatctacaaagtggtaattttccagggatcgtaaatcataaatgtgttctctggcacttgtaacaacacgctctgatccattccttatgaggtaagatagaacaagcaacgacttataaacttttctccaattctttttgttgtcttttaacattcgtgaccaaagcatgttcataagttctggaaattgttcatacataaatgtagccttggcaatctctcccatgagttgcccagaaggtccccaaggatcatcgttcgttgcctctcgaaccttagactcgatctctgaataattcataacaacattggtggctttgtccaccagctcgcgcaccttccacatgttcaacatcgtgccccgcgcgggacggtccgccgcctccctctcctgctccccacggaccccggaacacttccgtaccggggcagttccaggccggggtcaccgccgcccgccgcctcgaactcccccagtcagctc

SEQ ID NO: 28157 - DNA, 816 bp, Homo sapiens
  SIMILAR (2)..(814): 1001254mologous to Homo sapiens dJ534K7.2 (novel protein),accession number AL109925,Smith-Waterman Score=1442.
gatgcaaatagctcagaggtccatggtttatctaacaattaagccattaaacctgagtcaagttgaaggaaaaccatccccttggttatccgttgatactgccttgtatattctcaaggaaaatgagagtcaagcaaatctacagcttgtgtgttttaccgaactacgaaatagagaagtgtttggatggactggtgaactaggacctggaatttactggttaattccttccacaactggctgtaggctgaggaaaaaaataaaaccagtaacagatgaagcccaacttgtatatagagatgaaacaggggaattattccttacaaaggaatttaagtctactttatcagatatatttgaagtaattgatttagatggaaatggtcttcttagccttgaagaatataatttttttgaattgagaacaagtggtgagaaatgtgatgaagatgcttgggctgtctgcagagagaattttgatacaaagaggaatgaactaacaagacaaggatttatggatttgaatctaatggaagctaatgatcgagaaggagatccttgtgacctttgggtaactctacactctatgggctacaataaagctctggagttgacagaggcatgtccatttgtcattgatatctatgcagaaaaatgcaagccaaaaattaaagctgtccatatggaggcatgtagtggacaacttgagaaggccatttgtaaatctgttcttagcaacggtgatgccaaagtaatggatggctatgaaaatataatcgtgcatacttacagttgtgacacctggataacgtcagt

SEQ ID NO: 28158 - DNA, 1314 bp, Homo sapiens
  SIMILAR (889)..(1206): 961254mologous to Homo sapiens dJ534K7.2 (novel protein),accession number AL109925,Smith-Waterman Score=537.
atgaagggtgtggccaagtttgataaggaagttagttcagaggggccatctcaatcaaagctagaagctattcatccagacaatggggagattagactcccgtctaaacagaagccaggacctattgtgcaagacaatggaataaccccgaaggcattttggagatcatcaaggctgccccctcacttcacaggtccagactgcaagggactgggggaacagaacaatttcaaggctctgctctttgccaagctctttggctgccccaagttcagctctagtgaattcaaacacaggcctagatcctgggtaaacactggtgaaaaaggcagtctctgccatgtaggagttcccagggcagtagaagaaatggaaagtaaacaggttatgaacatagaatgggataagcgcctcgaagggggaaatagaggtgataggaacaccagaaaaagctcccaaaccagacactggaggctcagaaagcacttcttggaggaaacgatgtttaaattgagacctgaggaacaagtaggagttgggagaatatggcggatggtggaatggaggggaaaggtggagaatgtagtggagggtgggatggagggtaaaggtgattcaggtggaaagaagagcagcttccaaggcctgggggcaggagggaggtgccatggttccccaagactgaagcttggaatgaaggaaaaacatacttcaaaagcagaactactaaaatcatttaagcaattagatgtaaatgatgatggctgtattttacacactgacctttataaatttctaacaaagagaggtgagaagatgactcgagaagaagtaaatgccataataaatttggctgatgtaaatgctgatggcaaatttgactacatcaaggtgtttggatggactggtgaactaggacctggaatttactggttaattccttccacaactggctgtaggctgaggaaaaaaataaaaccagtaacagatgaagcccaacttgtatatagagatgaaacaggggaattattccttacaaaggaatttaagtctactttatcagatatatttgaagtaattgatttagatggaaatggtcttcttagccttgaagaatataatttttttgaattgagaacaagtggtgagaaatgtgatgaagatgcttgggctgtctgcagagagaacttatcttcatttgacacgtttatcatctgtcaggctcaacgagaaccccacagctctgtagagcagaaactttgttcaattcactgttgtatccgtagtaccgagaacctaataggtgctcaataa

SEQ ID NO: 28159 - DNA, 1464 bp, Homo sapiens
  SIMILAR (800)..(919): 501254mologous to Mus musculus LINE/Ig H-chain fusion protein,accession number M26361,Smith-Waterman Score=104.
tcacgatgtagagtagcatgcgtactccctttttgccatttgtggtttaataactgcatcttccaagtaccacatgaacaggaacttgtctgtcttttcagcacgccagcggcactcctgctgcggtcgatctagaggatccctctcttttaccccatcactcccagcggacatttcaccatgtctggagacatttttggttgtcacaattagtgggacggttcttctgacatcaagatgggtagaggccagggatgctgttaaacatcctgggcctcgtcgcatatctctagaagctgcccaccgcgaatccactggagtgctgactggtctttgagatctacaagtggggcggcttatctctggtccacactggcctctcatcctccaagaagttatttcatgcttgttgacatggcaggtgacctctgccacattatactggtcaaagccagtctcacagccaaccctagattcaaggggtggggaaatagattccagctcttgatgggaggagctgccgctcatgtggccagttttgcagtaggagggactattagcaagaaggacgaggcaggactggatgaccgggattgttggataaacttttgaaattgatttcacttcatctcctcttgcactattggaatctgtgctttttaatgtgctacaattggcttcaccctgacctttgaatttctcagcatctggtagctgtacttgctgagatgtatctttgctcttggcttcccccaaaatgtagaggtatctgaagctgggctcttgtagacatctggcattccgttcatcagcacatgaaacattctccaagatagaccatatgataggccacagaacaagtctcaataaatttaagatgtccgtgtacaaactgtccatcattgactgtgccatgtcaggcactgagactgggtaatttacgacgaaaaagaggtttaatggactcacagttccatgtggatccaggtcacgctgatgcaagaggtgggttcccatggccttggtcggctctttccctgtggctttgcagggtatagccccactcttgactgctgtcatgggctggtgttgagtgtttgcggctttttcaggtacacagtgcaagctgtcagtggatttaccattctggggtctggaggatattggctctcttctcacagctccaccagacagtgccccagtggggactccatgtgggggctcacaccccaactcctgatgggtgactggcaaggtcacactgtagtacaggatatggatggcatatttttggaaaacatcagttaccacaaacagggatggaagcataaaataaatgtctgttagtgagttggaggtggccttttgtaacagtgtaatggtcaggtctgcggtacattcatggtttttatccggtattactaactctcctatagctagctcatcctctgaatttcctctcat

SEQ ID NO: 28160 - DNA, 1392 bp, Homo sapiens
  SIMILAR (861)..(950): 1001254mologous to Homo sapiens IGSF5,accession number AL163280,Smith-Waterman Score=155.
atgtgggctctcagtgacatggtggtgctaagcgtcaggcccatggagcccatcatcaccaatgaccgcttcacctctcagaggtacgaccagggcgggaacttcacctcggagatgatcatccacaatgtggagcccagtgattcggggaacatcagatgcagcctccagaacagtcgcctgcatggatctgcttaccttaccgtccaagttatgggagagctgttcattcccagtgttaatcttgtagtcgctgagaatgaaccttgtgaagttacttgtctaccctcacactggacccggctcccggatatttcctgggagctcggtctcctggtcagccattcaagctattattttgttccggagcccagcgaccttcaaagtgcagtgagcatcctggctctgaccccacagagcaatgggactttgacttgcgtggctacctggaagagcctgaaggcccgcaagtctgcaactgtaaatctcactgtgattcggtgtccccaagacactggaggtggtattaatattccaggtgtattatcaagtttaccgagtttaggtttttcattgcctacttggggcaaagttggacttggactagcaggcaccatgcttctgacgccgacgtgtactcttacaatacgctgctgctgctgccgccgtcgttgttgtggctgcaactgctgctgccgttgttgtttctgctgtagaagaaaaagaggtgacattcttctgacatctttcccacatccccagagattaggtgcatgcatcaatggcgtcattttgtgtatactcatttatgtctgccttcttgagcctctcactgtgagactgatccataccgtggcacgaaatctgaaaaagagaagacaaacaaagaaactgagacagaaagtggaaatgaaaactccggctacaattcagatgaacaaaagaccacagacaccgcttctctccctcccaaatcctgtgaatccagtgatcctgaacaaagaaacagtagctgtggccctcctcaccagagaagacatagaccttgttgtggtcaactggccacttgagagctgccagaatagtgaagctacagcttgtagaagcagtcagggtgacgctggtacagaggttccttttaagaacttccccagaccaggccccgtagccctgcagccctgccaggcctatgtcaccaggttcgtgctgtgtggggtgatgaggacctctgaattccgaatgccttggtccaagatcgcagaacaggatagttttggttttgtgaacaggacggcaactgctgaccacatacactcgctctctgctcatgctgcatcctcctctgctgaaactggtgatctgttaacactcggcaatttcaggaggacttaa

SEQ ID NO: 28161 - DNA, 970 bp, Homo sapiens
  SIMILAR (145)..(186): 921254mologous to Homo sapiens Ku70-binding protein,accession number AF078528,Smith-Waterman Score=97.
atgggaaaatttattacatgggtgatagaattgctaagaagccacgagaagattggtgcaactcagagactgacaaaagcctttaccaccctaggcaggagtacatatcggttgaatgcaagtattgatgaaggacagatggatggatggatggatggatggatggatggatggatggaaggatggatgaacgggtacactcgccagcagttttgccacgagagtacaccgaacaaaggagacagggtcatttataacctgatgcatccaccctactgctgtttccggtttctactggctggaacggaacctcacattctgtgtttatcccaattggcgagcaacttagaactttttaaaagaggcaaaggtagacaagaacaaaggaaggaggaagtaacttgcggaatgctgagaagagtaaaaacacttttaaataaggaaaaggaacaggctatgacccaatgcttgcttggaccagtataagcatgccaaggcaaatatttaggctaaattgtgggagctaagaacataaagtacgttgatttctttatgacggctagcagatatttaagaatgttagcacaggtctttgaataaattttgcttataagagaagttaccatttattcctaattagacagggaagaaagtctttgaagagaaacctctactttactttttacaaagatgtcatgaaaaaggaatgctattaaaaaatcggagacaaacaaagggctcttagaaattaaaaattaagttagatcatctgaaattaaaattttaaattaagatgaggagatataatgaagtttcccactaaataatatgaaaaaacaaaattaaaaaccaaaaaaatggaatggacaataacagggcccactgaatatccaaatgatgagttcaaaaagaccctcacgaagacatatactcatgaaatttcagaacactgaagaaaatgaaagagaaa

SEQ ID NO: 28162 - DNA, 375 bp, Homo sapiens; identical to SEQ ID NO: 15053
  SIMILAR (325)..(254): 831254mologous to Homo sapiens Human secreted protein, SEQ ID NO: 5576,accession number G01495,Smith-Waterman Score=90.

SEQ ID NO: 28163 - DNA, 882 bp, Homo sapiens; identical to SEQ ID NO: 8280
  SIMILAR (882)..(802): 811254mologous to Homo sapiens Human secreted protein, SEQ ID NO: 5576,accession number G01495,Smith-Waterman Score=99.

SEQ ID NO: 28164 - DNA, 2207 bp, Homo sapiens
  SIMILAR (175)..(849): 711254mologous to Mus musculus Pro-Pol-dUTPase polyprotein,accession number Y12713,Smith-Waterman Score=829.
atgggccgggcgaggcggctcacgcctgtaatcccggcactttgggagaccgaggcggacggatcacgagctctaacagtggaaaccacagtcactcaactacaacatttaaatacagtgggaataattggattccgaggtggcaggggccaagtggcagcagtcaactgtcaaaagcgagatatccagccttttaccagggtaactgtgcattggggaaagagaaatgatcagacatttcaagcactagtggacactggccttgagctgacattgattcccggggacccaaaacatcattgtgatcctccagttaaagtaggggcttatggacatcaggtaattaatggagttttagctcagattcaaattacagtaggtccagtgggtccctggactcaccctgtggtcattttcacagtgcctaaatgcataattgacatagacatacttaggtggcagaactcccacactggctccctgactggtaggatgaaggctattatggtgggaagggccaaatggaagccgttagagctgcctctgcctagaaaaacagtaaaccagaaaccatatcacacccctgtagggactgcagaaattagtgccaccatgaaggacttgaaagatgcaggggtggtgattccaaccacaaccctgttcaactctcctatttggtctgtgcagaagacaggtggatcttggagaatgacagtggattattgtatgcttaaccaagttgtgtctgcagttgaagctattgtactagatgtggtttcattgcttgagcaaattaacacatctcctgccatagagtgggtcatgcacagcagcattccatcatcaaatggaagtggtacatacatgatcgggctcaagcaggtcctaaaggcacaacctgcaccaatggcctcatggggagtttcctatgatcagtggacagaggaagagaagactacggcctggttcacagacggttcttcacgatatgctagcaccacccgaaactggacagctgcagcactacagtccctttctaggatatccctgaaggacagctgtgaagggaaatcttcccaccacccgtgtcatggaggcaaggatggaggttatgcatgggctcagcaacatggactttcactcaccaaggttgacctggctatggccactgctgagtgcccaatttgccagcagcagagaccaacactgagccctcgatatggcaccattcctcagggtgatcagccagctacctggtggcaggttgattatatgggacctcttccatcatggaaagggcagagattatatgtgatctcaggagatgtgtatgggttcaagttgacaagggatggacttatgatggttaatacggagtgtcaacttgattggattgaaggatgcaaagtattgatcctaggcctgatgaattacaaatctcaagggactgccttctccctgggctgctgttttgaaaagaaaaaaacaagaaaatttgaggatactatgcctggagaggtggttgaaaataggtacaatgaacaagggctctgtcatcctgggaccctctatcctaggaaacaagtggaacaaatcaaaagatttatactaactgaagaatataaaactatcagacagaagaatttcccagaaagcagcagcaaagaaaaagaaaatgctgctccttgcaaggccacagcaagtccctcagcctctgctcccccaccctataatccttctatcacttccactcctcacacccggtctggcttacagtttcgttccgcgactagccctcccccacctgcccgacaatttcctcttaaagaggaggctggagctaaaagcacagtcaagggatcttgcttcaagtgccagaaatctggccactgggccaaggaatgcctgcatcccgggattcctcctaagccgtgtcccatctgtgtggaaccccactggaaatcggatggtccaacttgcctggcagccactcccagagcccctggaattctggcccaaggctctctgactgactcctttccagatcttcttggcttagtggctgaagactgatgctgcccgattgcctcggaagtccccataaaatcttccttcagcttaatgtctcccactctaggttcccacaccgcccctaatcccgctcgaagcagccctgagaaacatcgcccattatctctccataccat

SEQ ID NO: 28165 - DNA, 765 bp, Homo sapiens; identical to SEQ ID NO: 23572
  SIMILAR (188)..(132): 841254mologous to Homo sapiens Human secreted protein, SEQ ID NO: 5576,accession number G01495,Smith-Waterman Score=88.

SEQ ID NO: 28166 - DNA, 774 bp, Homo sapiens; identical to SEQ ID NO: 26579
  SIMILAR (773)..(687): 721254mologous to Homo sapiens putative p150,accession number U93564,Smith-Waterman Score=107.

SEQ ID NO: 28167 - DNA, 859 bp, Homo sapiens
  SIMILAR (604)..(855): 721254mologous to Homo sapiens neutral protease large subunit,accession number M27826,Smith-Waterman Score=288.
atccatctgaccttgcccctcctccccaggctgctcctcaccaggccaagccaggtcccaattcttcctcaacctccactctcccaccctataatgcttctatcacctcacctcttcacacccagtctggcttacagtttctttctacccagagggaccagaaggccatcttattctcaatatgtattttattacccaatccactcccaacattagaaaaagctccaaaaattagattccgccctcaaaccccacaacaggacttaattaaccttgccttcaaggtgtacaataatagagaagaggcagccaagcggcaatgtatttctggattgcaattacttgcctccgctctgagagaaaccccagccacatctccagcacacaagaacttcaaaacgcctaaaccacagtggccaggcattcctccaggacctcctcccccaggatcttgcttcaagtgccggaaatctggccactgggccaagcgaatgcccgcagcccaggattcctcctaagccgtgtcctatctgtgcaggtccccactcgaaatcggactgtccagcttgcccaaaagccactcccagagcccctggaactctgccccaaggctctctgactgactccttcccagatcttcttggcttagtggctgaagactgacactgcccgatcgcctcggaagccgcctagaccatcacggacaccgagcttcgggtaactctcacagtggaaggtaagcccgtccccttcttaatcaatacggaggctactcactccacattaccttcttttcaagggcctgtttcccttgcctccataactgttgtgggtattgacgggcaggcttctaaaactc

SEQ ID NO: 28168 - DNA, 841 bp, Homo sapiens
  SIMILAR (179)..(108): 751254mologous to Homo sapiens Human secreted protein, SEQ ID NO: 7771,accession number G03690,Smith-Waterman Score=105.
ccaggagtaagaggagcccagggtggtccctctatccccaggcagtgtgaagagtctgctattggtcctaaatttgcttggatcatctcttcctttcactggaagcaaggcatgttcaacatggaggctccttcttcccttttctttgtcaacatgtgtgcagtaaagaagcagacaacctggggccggccagacagaggattcatctggcagtcactcccagagcccctggaattccggcccaaggctctctgtctgactccttcccagatcttcttggcttagcgactgaagactgatgctgcccgatcgcctcggaagccccataattatggaagccaaggagtcccacaatctgccatctgaaagctggagaaactggagagctagtattgtaattcagtctgaagggaaccaatggtgtaactctcagtccaaggccaaagacctgagaatgggggcaaggtggagttgggggcactggtgtaaatccctgagtctgaaggtctgagaacctgaagttctgatgtcctgcctgcaactgacctgagtattctctgtattgtggctctgcatggtatggcattttcccctcctcttgggaactgtgaataattaactctcgtttaaatgcaattgtctcctgatctattggcttcactatatcaaaatccttggcaataacttttccttgtctctttctctcatatttcccatacagtgcatccgaaaatccaatccattttacctctgaaatttgtgctgcatacaaccactttttaccaagaggatttgctgataaatggcaacagagcaggccccagttgagcagctgtatcat

SEQ ID NO: 28169 - DNA, 609 bp, Homo sapiens
  SIMILAR (122)..(217): 1001254mologous to Homo sapiens putative gene, RNA binding motif 11 like, confirmed by RT-PCR,accession number AP001660,Smith- Waterman Score=159.
atgcctcgcccccagcgcgcgctcccggcgccggccccgccccctcacccaggcggcgccgtaaagccggagaaggggcggggtctcagctcctacttcattctacggccgagaccggaggatgttccctgctcaggaggaggccgacaggaccgtgtttgttgggaatttagaggcccgagttcgggaagagattctgtacgagctgttccttcagtgctgcagcttccttactatgaaatgacagctccacttcctaatagtgcatccgtgtcttcctcactgaatcatgttccagatcttgaggctggacccagctcatataaatggactcaccaacaaccaagtgactctgacctttatcagatgacagctccacttcctaatagtgcatccgtgtcttcctcactgaatcatgttccagatcttgaggctggacccagctcatataaatggactcaccaacaaccaagtgactctgacctttatcagatgaataaacgaaagagacaaaagcaaacaagtgatagtgatagtagcacagacaacaacagaggcaacgaatgtagccaaaagttccgaaagtctaagaagaagaaaagatactag

SEQ ID NO: 28170 - DNA, 584 bp, Homo sapiens
  SIMILAR (114)..(584): 981254mologous to Homo sapiens putative gene, RNA binding motif 11 like, confirmed by RT-PCR,accession number AP001660,Smith- Waterman Score=810.
ggggaagtcccggaggatgttccctgctcaggaggaggccgacaggaccgtgtttgttgggaatttagaggcccgagttcgggaagagattctgtacgagctgttccttcagtttcttataggcggggccactaaccaaagtgactatatgcaaagacagagaaggaaagccaaagtcttttggatttgtctgctttaaacacccagaatcggtgtcttatgccatagctttgctgaatggaattcgtttatatggaagaccaattaacgtgcagtatcgatttgggagttctcgctcttctgaaccagctaaccaaagttttgagagctgtgttaagataaattcacacaactacaggaatgaagaaatggtggtgggcagatcttcctttcccatgcagtattttccaattaataatacttctttacctcaagaatattttctctttcagaagatgcagcggcatgtgtataatccagtgctgcagcttccttactatgaaatgacagctccacttcctaatagtgcatccgtgtcttcctcactgaatcatgttccagatcttgaggctggacccagctca

SEQ ID NO: 28171 - DNA, 457 bp, Homo sapiens
  SIMILAR (456)..(367): 701254mologous to Homo sapiens unnamed protein product,accession number AK021798,Smith-Waterman Score=118.
catgaccatgcattacgagattccggtccgtacccggagatcaaaagggacgacataactccctcagaacgcctggtgaacaacatgcctcactgaacaggtgctatttaagctgatatctcaatgactaattatgcaaggattgagaggaaccatttagggagaggaaacagcaactccaaagaccctaagctacgagagagctctgagcatttgaggaaattaaagaccagagtggtgaacgagcagaccaggcttggtctcataatggagacgtttgtgggccgaggcggagaggctccattttactttcaatgtgacaaacatctgtcacggagttttcagggactcggtctgatctgtctgtaaaaagcctgtaaaactgctctctgggcagggcatctctgaaagaaaggcagcagccccagtcaggggcttatagataaaactcccatct

SEQ ID NO: 28172 - DNA, 761 bp, Homo sapiens
  SIMILAR (761)..(660): 351254mologous to Homo sapiens Human secreted protein sequence SEQ ID NO:195,accession number Y87156,Smith-Waterman Score =40.
atgggacttgactgtctcacccctgaatccccactgggaaagaaggtgactatcccagtggcttttccatctagtatgatggatgagaggcccatgaaggaagcagccaccaaaggttctgcagtggctcctgttggctttctgatcacatcgcagctggctgtcaagtccgtggcccagcgatttatggcgtccctgggcaggaggagcctgtgcaaggctactgctgcagcagcccagggacagcgcatctctgaaagaaaggcagcagccccagtcaggggcttacagataaaattcccatctccctgggacagagcacctgggggaaggggtggctgtgtgcgcagcttcagcagacttaaatgttactgcctgctggctctgaagtgggtccctgacccctggcctcctggaggacacctcccagcaggggtcaacagacacctcatacaggagagctccagctggcatctggcaggtgcccctctgggacaaggcttccagaggaaggaacaggcagcaatctttgctgttctgcagcctccgctagtgatacccaggcaaattgggtctggagtggacctccggccaacagggtctggagttgacctccagcaaactccagcagacctgcagcagaggtgtctattagaaggaaaacttaacaaacagaaaggaatagcatcaacatcaacaaaaacaatgtccacacagaaaccgcacaccaataggtcaccaacatcaaagaccaaaggtag

SEQ ID NO: 28173 - DNA, 269 bp, Homo sapiens
  SIMILAR (1)..(84): 921254mologous to Neisseria gonorrhoeae TufA,accession number L36380,Smith-Waterman Score=141.
atgccgcagactcgtgagcacatcctgctgggtcgtcaggtaggcgttccgtacatcatcgtgttcctgaacaaatgcgacatggaagctggagtcattcactgcaagggccatcaaaaggcatcagatcccattgctcaggacaacgcttatgctgataagggtcccggccgatatggccgggtccacgctagttccaaggaaccaggaggcccaatccggagacctctagcggtggcacccttgaaaaaggcaggtggtaccagaag

SEQ ID NO: 28174 - DNA, 483 bp, Homo sapiens
  SIMILAR (249)..(314): 721254mologous to Homo sapiens reverse transcriptase homolog= pol {retroviral element},accession number S61070,Smith-Waterman Score=86.
ttgcggaattcggcacgaggacgcatgtactttctgcttccccgctccttcagctatactcactctttgttgagtctcccacaattaccattgttcctggcccggacttcaatctggcctcccacattattcctgataccacacctgacccccatgactgtatctctatgatccacctgacattcaccccatttccccatatttccttctttcctgttcctcaccctgatcacgcttgatttattgatggcagttccaccaggcctaatcgccacacaccagcaaaggcaggctatgctatagcacaagccactatcccgcctcttagaacctctcatttcctttccatcgtggaaatctatcctcaaggaaataacttctcagtgttccatgtgctattctactactcctcagggattattcaggccccctcccttccgtacacattaagacgagatcgtcgacccgggacttcaagagcgg

SEQ ID NO: 28175 - DNA, 1175 bp, Homo sapiens
  SIMILAR (318)..(896): 781254mologous to Homo sapiens reverse transcriptase homolog= pol {retroviral element},accession number S61070,Smith-Waterman Score=764.
gaaaagtactgaagggccttaagggacatgatcaggccatctctgtccaccaactggtgtttatcaaagttaggctcctacgcttccacagagactggaagacaggggccttatctttcctaatgatatttcaaagggatggctcccaggtccttgaaaaacatattccacagttgaagaaaatagatatacacctcaaaaagacagagaaaggatttacaattgcaagatttcaaaggattaaagcccgttatcacttgcctgttacagcttggccttttaaagcctataaactctccttacaattcccccactttacctgtccaaaaaccagacaggccttacagcaaaccgaactcattgccttaactcaatccctcacttttgcaaaggaattacacgtcaatatttttactgactctaaatatgccttccatatcctgcaccaccatgctgttatatgggcagaaagaaatttcctcactacacaagggtcctccatcattaatgcctttttaataaaaactcttctaaaagccgctttacttccaaaggaagctggagtcattcactgcaagggccatcaaaaggcatcagatcccatcactcgggacaatgcttatgctgataaggtagctaaagaagcagctagtgttccatcttctgtccctcatggccagtttttctccttctcattggtcactcctatttactctcctactgaaatttccacctatcgatctcttcccactcaaggcaaatggttcttggaccaaggaaaatatctccttccagcctcacaggcacattctattctgttgtcatttcataacctcttccacgtaggttacaagctgctagactgcctcttagaggctctcatttcctttccatcgtggaaatctatcctcaaggaaatcacttctcagtgttccatctgctattctactactcctcagggagtgttcaggccccctcccttccctacacaccgagcttggggatttgtgcctgcccaggactggcaaattgactttactcacatgcctcgagtcaggaaactaaaatacctcttggtctgggtagacactttcactggatggatagaagcctttcccacagggtctgtaaccaggccatcactaatcattctatacgacaaatgtttcttctaa

SEQ ID NO: 28176 - DNA, 702 bp, Homo sapiens
  SIMILAR (68)..(187): 601254mologous to Arabidopsis thaliana putative protein,accession number AL162506,Smith-Waterman Score=112.
atggaggaagaacagcatattaaacaaatggtgctagaaaaattggatgatcatatgaagttttatggaagaagaagaagaaggaggaggaggaaggaggagaaggaggaagaaggaggaggaggaagaggaggaggagaaggaggaagaagaggaggaagaggaaagaagaagaagaagaacagaacatcaattagacctagagattatacattactgcaaaattattttaaaatggaccatagacataagcgtaaaattgaaaactataccactgccagaagaaatcataagaaaaaaatttatatgactttgggtatacacagaaccaaaaccacaagtcacatggactgggcatgcacaattgaaaaaggtttgatttctaacaatacccagaaccaacaattcttcctttcggaaccaagaagactgggacaggactggagcctgaagatacacaggcggctggacatagagcgaagcagatcagcagaagaggacacagcggctcgatggcaagaggacgttgagggagcacgccggcaaaagagctcaccgagagattctggtacgccagatggcaggccattgaccggcgggactaggcagagtttggctggggcagtcagaggagagcaggggccaccaagtggcagaactctaggagaaaaccgtttcccttctgtctcctatatcgactga

SEQ ID NO: 28177 - DNA, 3291 bp, Homo sapiens
  SIMILAR (2193)..(643): 961254mologous to Homo sapiens putative p150,accession number U93564,Smith-Waterman Score=2592.
tcagatgattatgtgtcttggggttgcttttctcaaggagtatctttgtggtggtctctgtgtttcctgaatttgagtgttggcctgtcttgctaggttggggaagttctcctggataatatactgaagagtgttttctaacttggctccattctccctgtcactttcagctacaccaatcagacgtagatttggccttttcacatagtcccatatttcttggaggctttgtttgttccttttcatttttttccctctaatcttgtcctcatgctttatttgattaagttgatcttcagtctctgataacctttcttccgcttgattaatttggctattgatacttgtgtaggcgtcaagaagttctcgtgctgtgtttttcaggtccattaggtcatttatgttcttctctaaactggttattctagttagaaattcctctaaccttttttcaaggttcttagcttccttgcattgggttaaaacatgctgttttagcttggaggagtttgttataacccaccttctgaagccgacttcttcttcctgtttttctttgaatgctctcctcaggttgggtgggctcaaaacactttcaaaaattttccaccgttctgctgtttcctcagctgttctgtctctcctgttgtttcctgactttttaatgattgccattctaactggtgtgagatgatatctcatagtggttttgatttgcatttctctgatggccagtgatgatgagcatttcttcatgtgttttttggctgcataaatgtcttcttttgagaagtgtctgttcatgtccttcgcccactttttgatggggttgtttgtttttttcttgtaaatttgtttgagttcattgtagattctggatattagccctttgtcagatgagtaggttgcgaaaattttctcccatgttgtaggttgcctgttcactctgatggtagtttcttttgctgtgcagaagctctttagtttaattagatcccatttgtcaattttggcttttgttgccattgcttttggtgttttggacatgaagtccttgcccacgcctatgtcctcaatggtaatgcctaggttttcttctagggtttttatggttttaggtctaacgtttaaatctttaatccatcttgaattgatttttgtataaggtgtaaggaagggatccagtttcagctttctacatatggctagccagttttcccagcaccatttattaaatagggaatcctttccccattgcttgtttttctcaggtttgtcaaagatcagatagttgtagatatgcggcattatttctgagggctctgttctgttccattgatctatatctctgttttggtaccagtaccatgctgttttggttactgtagccttgtagtatagtttgaagtcaggtagtgtgatgcctccagctttgttcttttggcttaggattgacttggcgatgcgggctcttttttggttccatatgaactttaaagtagttttttccaattctgtgaagaaagtcattggtagcttgatggggatggcattgaatctgtaaattaccttgggcagtatggccattttcacgatattgattcttcctacccatgagcatggaatgttcttccatttgtttgtgtcctcttttatttccttgagcagtggtttgtagttctccttgaagaggtccttcacatcccttgtaagttggattcctaggtattttattctctttgaagcaattgtgaatgggagttcactcatgatttggctctctgtttgtctgttgttggtgtataagaatgcttgtgatttttgtacattgattttgtatcctgagactttgctgaagttgcttatcagcttaaggagattttgggctgagacgatggggttttctagataaacaatcatgtcgtctgcaaacagggacaatttgacttcctcttttcctaattgaataccctttatttccttctcctggctgattgccctggccagaacttccaacactatgttgaataggagtggtgagagagggcatccctgtcttgtgccagttttcaaagggaatgcttgcagtttttgcccattcagtatgatattgtctgtgggtttgtcatagatagctctctggtagaattcggctgtgaatccatctggtcctggactctttttggttggtaaactattgattattgccacaatttcagagcctgttattggtctattcagagattcaacttcttcctggtttagtcttgggagagtgtatgtgtccaggaatgtatccatttcttctagattttctagtttatttgcgtagaggtgtttgtaggattctctgatggtagtttgtatttctgtgggatcggtggtgatatcccctttatcattttttattgtgtctatttgattcttctctctttttttctttattagtcttgctagcggtctatcaattttgttgatcctttcaaaaaaccagctcctggattcattgattttttgaagggttttttgtgtctctatttccttcagttctgctctgattttagttatttcttgccttctgctagcttttgaatgtgtttgctcttgcttttctagttcttttaattgtgatgttagggtgtcaattttggatctttcctgctttctcttgtaggcatttagtgctataaatttccctctacacactgctttgaatgcgtcccagagattctggtatgtggtgtctttgttctcgttggtttcaaagaacatctttatttctgccttcatttcgttatgtacccagtagtcattcaggagcaggttgttcagtttccatgtagttgagcggctttgagtgagattcttaatcctgagttctagtttgattgcactgtggtctgagagatagtttgttataatttctgttcttttacatttgctgaggagagctttacttccaactatgtggtcaattttggaataggtgtggtgtggtgctgaaaaaaatgtatattctgttgatttggggtggagagttctgtagatgtctattaggtctgcttggtgcagagctgagttcaattcctgggtattcttgttgactttctgtctcgttgatctgtctaatgttgacagtggggtgttaaagtcttccattattaatgtgtgggagtctaagtctctttgtaggtcactcaggacttgctttatgaatctgggtgctcctgtattgggtgcataaatatttaggatagttagctcctcttgttgaattgatccctttaccat

SEQ ID NO: 28178 - DNA, 3420 bp, Homo sapiens
  SIMILAR (2709)..(481): 971254mologous to Homo sapiens putative p150,accession number U93568,Smith-Waterman Score=3707.
  misc_feature (1)...(3420): n = a,t,c or g
ctaacgaatgttcaggagggaagagtgaatataagtgtggcctgagtgaaaaggagattcagacacgtctgtaagctggtgaggccgggcatcggaaaccctatttacgcgactctgaggagcctcctgagaagccaagctctgtgccgatgggatcagacaccactgaacatgtccacggtgcttgggggcttggacaacagcagtctgacactgagacaccagacacaaagaaggagagagactgtactgaacacaaagttcatattgaatggtgaatccccaacatcgcttctccagtccagctcccagaatgtctgaggctagccttgtactattaggcaagagaatgtgagtctttcccttcttaggcacagctgcagccagccaagccatggctgtggacctggcatctctgcactcttgggggcttgggaagttcggaaggtttcccctcactgcccctgcaggctccgaggtgtctgctccctgcttctggtacccacatgctgttttggttactgtagccttgtagtatagtttgaagtcaggtagtgtgatgcctccagctttgttcttttggcttaggattgacttggcaatgcgggctcttttttggttccatatgaactttaaagtagttttttccaattctgtgaagaaagtcattggtagcttgatggggatggcattgaatctgtaaattaccttgggcagtatggccattttcacgatattgattcttcctacccatgagcatggaatgttcttccatttgtttgtctcctcttttatttccttgagcagtggtttgtagttctccttgaagaggtccttcacatcccttgtaagttggattcctaggtattttattctctttgaagcaattgtgaatgggagttcacccatgatttggctctctgtttgtctgttgttggtgtataagaatgcttgtgatttttgtacattgattttgtatcctgagagttngctgaagttgcttatcagcttaaggagattttgggctgagacgatggggttttctagataaacaatcatgtcgtctgcaaacagggacaatttgacttcctcttttcctaattgaatagcctttatttccttctcctgcctgattgccctggccagaacttccaacactatgttgaataggagcggtgagagagggcatccctgtcttgtgccggttttcaaagggaatgcttccagtttttgcccattcagtatgatattggctgtgggtttgtcatagatagctcttattattttgaaatacgtcccatcaatacctaatttattgagagtttttagcatgaagggttgttgaattttgtcaaaggctttttctgcatctattgagataatcatgtggtttttgtctttggctctgtttatatgctggattacatttattgatttgcgtatattgaaccagccttgcatcccagggatgaagcccacttgatcatggtggataagctttttgatgtgctgctggattcggtttgccagtattttattgaggatttttgcatcaatgttcatcaaggatattggtctaaaattctcttttttggttgtgtctctgcccggctttggtatcagtatgatgctggcctcataaaatgagttagggaggattccctctttttctattgattggaatagtttcagaaggaatggtaccagttcctccttgtacctctggtagaattcggctgtgaatccatctggtcctggactctttttggttggtaaactattgattattgccacantttcagagcctgttattggtcgattcagagattcaacttcttcctggtttagtcttgggagagtgtatgtgtcaaggaatgtatccatttcttctagattttctagtttatttgcgtagaggtgtttgtagtattctctgatggtagtttgtatttctgtgggatcggtggtgatatcccctttatcattttttattgtgtctatttgattcttctctctttttttctttattagtcttgctagcggtctatcaattttgttgatcctttcaaaaaaccagctcctggattcattgattttttgaagggttttttgtgtctctatttccttcagttctgctctgattttagttatttcttgccttctgctagcttttgaatgtgtttgctcttgcttttctagttcttttaattgtgatgttagggtgtcaatttcagatctttcctgctttcccttgtgggcatttagtgctataaatttccctctacacactgctttgagtgcgtcccagagattctggtatgttgtgtctttgttctcattggtttcaaagaacatctttatttctgccttcatttcgttatgtacccagtagtcattcaggagcaggttgttcagtttccatgtagttgagcggctttgagtgagattcttaatcctgagttctagtttgattgcactgtggtctgagagatagtttgttataatttctgttcttttacatttgctgaggagagctttacttccaactatgtggtcaattttggaataggtgtggtgtggtgctgaaaaaaatgtatattctgttgatttggggtggagagttctgtagatgtctattaggtctgcttggtgcagagctgagttcaattcctgggtatccttgttgactttctgtctcgttgatctgtctttctctctggctgcccttaacattttttccttcatttcaactttggtgaatctgacaattatgtgtcttggagttgctcttctcgaggagtatctttgtggtgttctctgtatttcctgaatctgaacgttggcctgccttgctagattggggaagttctcctggataatatcctgcagagtgttttccaacttggttccattctccacatcactttcaggtacaccaatcagacgtagatttggtcttttcacatagtcccatatttcttggaggctttgctcatttctttttattcttttttctctaaacttcccttctcgcttcatttcattcatttcatcttccattgctgataccctttcttccagttgatcgcatcggctcctgaggcttctgcattcttcacgtagttttcgagccttggttttcagctccatcagctcctttaagcacttctctgtattggttattctagttatacattcttctaaatttttttcaaagttttcaacttctttgcctttggtttgaatgtcctcccgtagctcagagtaatttgatcgtctgaagccttcttctctcagctcgtcaaaatcattctccatccagctttgttctgttgctggtgaggaactgcgttcctttggaggaggagaggcgctctgcgttttagagtttccagtttttctgttctgttttttccccat

SEQ ID NO: 28179 - DNA, 3171 bp, Homo sapiens; identical to SEQ ID NO: 6603
  SIMILAR (712)..(2862): 991254mologous to Homo sapiens unknown,accession number AF148856,Smith-Waterman Score=3720.

SEQ ID NO: 28180 - DNA, 4374 bp, Homo sapiens
  SIMILAR (918)..(4): 891254mologous to Homo sapiens putative p150,accession number U93565,Smith-Waterman Score=1482.
ctatgtccctacaaaggacatgaactcatccttttttatggctgcatagtattccatggtgtgtatgtgccacatttccttaatccagtctatcattgttggacatttggcttggttccaagtctttgctattgtgaatagtgccacaataaatatacgtgtgcatgtgtctttatagcagcatgatttacaatcctttgggtatatacccagtaatgggattgctgggtcaaatggtatttctagttctagatccctgaggaatcgccacactgtcttccacaatgattgtactagtttacagtcccaccaacagtgtaaaagtgttcctatttctccacatcctctccagtacctgttgtttcctgactttttaatgatggccattctaactgctgtgagatggtatctcgttgtagttttgatttgcatttctctgatggccagtgatgatgagcattttttcatgtcccttttggctgcataaaagtcttcttttgagaagtgtctgttcatatccttcacccactttttgatgaggttgtttgttttttccttgtaagtttgtttgagttctttgtagattctggatattagccctttgtcagacgagtagattgcaaaaattttctcccattttgtaggttgcctgttcactctgatggtagtttcttttgctgtgcagaagctctttagtttaatgagatcccatttgtcagttttggcttttgttgccattgcttttggtgttttagatatgaagtccttgcccaggcctacgtcctgaatggtattgcctaggttttcttctagggtttttatggttttaggtctaacattgaagtctttgatccatcttgaatgaatttttgtataaggtgtaaggaagggatccagtttcagctttttccatatggcttgggcagtatggccattttcacgatgttgattcttcctacccatgagcatggaatgttcttccatttgtttgtgtcctcttttattttgttgagcagtagtttgtagttctccttgaagaggtccttcacatcccttgtaagttggattcctaggtattttattctgtgtgcatgtgtctttatagcagcatgatttatactcatttgggtatatatccagtaatgggatggctgggtcaaatggtatttctagttctagatccctgaggaatcgccacactgacttccacaatggttgaactagtttacagtcccaccaacagtgtaaaagtgttcctatttctccgcatcctctccagcacctgttgtttcctgactttttaatgattgccattctaactggtgtgagatgatatctcatagtggttttgatttgcatttctctgatggccagtgatgatgagcatttcttcatgtgttttttggctgcataaatgtcttcttttgagaagtgtctgttcatgtccttcgcccactttttgatggggttgtttgtttttttcttgtaaatttgtttgagttcattgtagattctggatattagccctttgtcagatgagtaggttgcgaaaattttctcccatgttgtaggttgcctgttcactctgatggtagtttcttttgctgtgcagaagctctttagtttaattagatcccatttgtcaattttggcttttgttgccattgcttttggtgttttggacatgaagtccttgcccatgcctatgtcctgaatggtaatgcctaggttttcttctagggtttttatggttttaggtttaacgtttaaatctttaatccatcttgaattgatttttgtataaggtgtaaggaagggatccagtttcagctttctacatatggctagccagttttcccagcaccatttattaaatagggaatcctttccccattgcttgtttttctcaggtttgtcaaagatcagatagttgtagatatgcggcattatttctgagggctctgttctgttccattgatctatatctctgttttggtaccagtaccatgctgttttggttactgtagccttgtagtatagtttgaagtcaggtagtgtgatgcctccagctttgttcttttggcttaggattgacttggcaatgcgggttcttttttggttccatatgaactttaaagtagttttttccaattctgtgaagaaagtcattggtagcttgatggggatggcattgaatctgtaaattaccttgggcagtatggccattttcacgatattgattcttcctacccatgagcatggaatgttcttccatttgtttgtctcctcttttatttccttgagcagcggtttgtagttctccttgaagaggtccttcacatcccttgtaagttggattcctaggtattttattctctttgaagcaattgtgaatgggagttcacccatgatttggctctctgtttgtctgttgttggtgtataagaatgcttgtgatttttgtacattgattttgtatcctgagactttgctgaagttgcttatcagcttaaggagattttgggctgagacgatggggttttctagataaacaatcatgtcgtctgcaaacagggacaatttgacttcctcttttcctaattgaataccctttatttccttctcctgcctgattgccctgtccagaacttccaacactatgttgaataggagcggtgagagagggcatccctgtcttgtgccggttttcaaagggaatgcttccagtttttgcccattcagtatgatattggctgtgggtttgtcatagatagctcttattattttgaaatacgtcccatcaatacctaatttattgagagtttttagcatgaagggttgttgaattttgtcaaaggctttttctgcatctattgagataatcatgtggtttttgtctttggctctgtttatatgctggattacatttattgatttgcgtatattgaaccagccttgcatcccagggatgaagcccacttgatcatggtggataagctttttgatgtgctgctggattcggtttgccagtattttattgaggatttttgcatcaatgttcatcaaggatattggtctaaaattctcttttttggttgtgtctctgcccggctttggcatcagaatgatgctggcctcataaaatgagttagggaggattccctctttttctattgattggaatagtttcagaaggaatggtaccagttcctccatgtacctctggtagaattcggctgtgaatccatctggtcctggactctttttggttggtaaactattgattattgccacaatttcagagcctgttattggtctattcagagattcaacttcttcctggtttagtcttgggagagtgtatgtgtcgaggaatgtatccatttcttctagattttctagtttatttgcgtagaggtgtttgtagtattctctgatggtagtttgtatttctgtgggatcggtggtgatatcccctttatcattttttattgtgtctatttgattcttctctctttttttctttattagtcttgctagcggtctatcaattttgttgatcctttcaaaaaaccagctcctggattcattgattttttgaagggttttttgtgtctctatttccttcagttctgctctgattttagttatttcttgccttctgctagcttttgaatgtgtttgctcttgcttttctagttcttttaattgtgatgttagggtgtcaattttggatctttcctgctttctcttgtaggcatttagtgctataaatttccctctacacactgctttgaatgcgtcccagagattctggtatgtggtgtctttgttctcgttggtttcaaagaacatctttatttctgccttcatttcgttatgtacccagtagtcattcaggagcaggttgttcagtttccatgtagttgagcggctttgagtgagattcttaatcctgagttctagtttgattgcactgtggtctgagagatagtttgttataatttctgttcttttacatttgctgaggagagctttacttccaagtatgtggtcaattttggaataggtgtggtgtggtgctgaaaaaaatgtatattctgttgatttggggtggagagttctgtagatgtctattaggtctgcttggtgcagagctgagttcaattcctgggtatccttgttgactttctgtctcgttgatctgtctaatgttgacagtggggtgttaaagtctcccattattaatgtgtgggagtctaagtctctttgtaggtcactgaggacttgctttatgaatctgggtgctcctgtattgggtgcataaatatttaggatagttagctcctcttgttgaattgatccctttaccat

SEQ ID NO: 28181 - DNA, 3048 bp, Homo sapiens
  SIMILAR (2754)..(16): 721254mologous to Homo sapiens putative p150,accession number U93574,Smith-Waterman Score=3204.
tcacagtccgctgatcctgttgtttcctgactttttaatgattgccattctaactggtgtgagatgatatctcatagtggttttgatttgcatttctctgatggccagtgatgatgagcatttcttcatgtgttttttggctgcataaatgtcttcttttgagaagtgtctgttcatgtccttcgcccactttttaatggggttgtttgtttttttcttgtaaatttgtttgagttcattgtagattctggatattagccctttgtcagatgagtaggttgcgaaaattttctcccatgttgtaggttgcctgttcactctgatggtagtttcttttgctgtgcagaagctcttgagtttaattagatcccatttgtcaattttggcttttgttgccattgcttttggtgttttggacatgaagtccttgcccacgcctatgtcctgaatggtaatgcctaggttttcttctagggtttttatggttttaggtctaacgtttaaatctttaatccatcttgaattgatttttgtataaggtgtaaggaagggatccagtttcagctttctacatatggctagccagttttcccagcaccatttattaaatagggaatcctttccccattgcttgtttttctcaggtttgtcaaagatcagatagttgtagatatgtggcattatttctgagggctctgttctgttccattgatctatatctctgttttggtaccagtaccatgctgttttggtgactgtagccttgtagtatagtttgaagtcaggtagtgtgatgcctccagctttgttcttttggcttaggattgacttggcgatgcgggctcttttttggttccatatgaactttaaagtagttttttccaattctgtgaagaaagtcattggtagcttgatggggatggcattgaatctgtaaattaccttgggcagtatggccattttcacgatattgattcttcctacccatgagcatggaatgttcttccatttgtttgtgtcctcttttatttccttgaccagtggtttgtggttctccttgaagaggtccttcacatcccttgtaagttggattcctaggtattttattctctttgaagcaattgtgaatgggagttcactcatgatttggctctctgtttgtctgttgttggtgtataagaatgcttgtgatttttgtacattgattttgtatcctgagactttgctgaagttgcttatcagcttaaggagattttgggctgagacgatggggttttctagataaacaatcatgtcttctgcaaacagggacaatttgacttcctcttttcctaattgaataccctttatttccttctcctgcctgattgccctggccagaacttccaacactatgttgaataggagcggtgagagagggcatccctgtcttgtgccagttttcaaagggaatgcttgcagtttttgcccattcagtatgatattggctgtgggtttgtcatagatagctcttattattttgaaatacgtcccatcaatacctaatttattgagagtttttagcatgaagggttgttgaattttgtcaaaggctttttctgcatctattgagataatcatgtggtttttgtctttggctctgtttatatgctggattacatttattgatttgcgtatattgaaccagccttgcatcccagggatgaagcccacttgatcatggtggataagctttttgatgtgctgctggattcggtttgccagtattttattgaggatttttgcatcaatgttcatcaaggatattggtctaaaattctcttttttggttgtgtctctgcccggctttggtatcagaatgatgctctggtagaattcggctgtgaatccatctggtcctggactctttttggttggtaaactattgattattgccacaatttcagagcctgttattggtctattcagagattcaacttcttcctggtttagtcttgggagagtgtatgtgtcgaggaatgtatccatttcttctagattttctagtttatttgcgtagaggtgtttgtagtattctctgatggtagtttgtatttctgtgggatcggtggtgatatcccctttatcattttttattgtgtctatttgattcttctctctttttttctttattagtcttgctagcggtctatcaattttgttgatcctttcaaaaaaccagctcctggattcattgattttttgaagggttttttgtgtctctatttccttcagttctgctctgattttagtgatttcttgccttctgctagcttttgaatgtgtttgctcttgcttttctagttcttttaattgtgatgttagggtgtcaattttggatctttcctgctttctcttgtaggcatttagtgctataaatttccctctacacactgctttgaatgcgtcccagagattctggtatgtggtgtctttgttctcgttggtttcaaagaacatctttatttctgccttcatttcgttatgtacccagtagtcattcaggagcaggttgttcagtttccatgtagttgagcggctttgagtgagattcttaatcctgagttctagtttgattgcactgtggtctgagagatagtttgttataatttctgttcttttacatttgctgaggagagctttacttcccagtatgtggtcaattttggaataggtgtggtgtggtgctgaaaaaaatgtatattctgttgatttggggtggagagttctgtagatgtctattaggtctgcttggtgcagagctgagttcaattcctgggtatccttgttgactttctgtctcgttgatctgtctaatgttgacagtggggtgttaaagtctcccattattaatgtgtgggagtctaagtctctttgtaggtcactcaggacttgctttatgaatctgggtgctcctgtattgggtgcataaatatttaggatagttagctcctcttgttgaattgatccctttaccattatgtaatggccttctttgtctcttttcat

SEQ ID NO: 28182 - DNA, 3534 bp, Homo sapiens; identical to SEQ ID NO: 2327
  SIMILAR (1)..(1566): 941254mologous to Homo sapiens putative p150,accession number U93563,Smith-Waterman Score=2537.

SEQ ID NO: 28183 - DNA, 3129 bp, Homo sapiens
  SIMILAR (1171)..(3006): 971254mologous to Homo sapiens putative p150,accession number U93563,Smith-Waterman Score=3195.
atggtaaagggatcaattcaacaagaggagctaactatcctaaatatacatgcacccaatacaggagcacccagattcataaagcaagtcctgagtgacctacaaagagacttagactcccacacattaataatgggagactttaacaccccactgtcaacattagacagatcaatgagacagaaagtcaacaaggatacccaggaattgaactcagctctgcaccaagcagacctaatagacatctacagaactctccaccccaaatcaacagaatatacatttttttcattaccacaccacacctattccaaaattgaccacatagttggaagtaaagctctcctcagcaaatgtaaaagaacacaaattataacaaactatctctcagaccacagtgcaatcaaactagaactcaggattaagactctcactcaaagccgctcaactacatggaaactgaacaacctgctcctgaatgactactgggtacataacgaaatgaaggcagaaataaagatgttctttgaaaccaacgagaacaaagacacaacataccagaatctctgggatgcattcaaagcagtgtgtagagggaaatttatagcactaaatgcccacaagagaaagcaggaaagatccaaaattgacaccctaacatcacaattaaaagaactagaaaagcaagagcaaacacattcaaaagctagcagaaggcaagaaataactaaaatcagagcagaactgaaggaaacagagacacaaaaaacccttcaaaaaatcaatgaatccaggagctggttttttgaaaggatcaacaaaattgatagaccgctagcaagactaataaagaaaaaaagagagaagaatcaaatagacacaataaaaaatgataaaggggatatcaccaccgatcccacagaaatacaaactaccatcagagaatactacaaacacctctacgcaaataaactagaaaatctagaagaaatggatacattccttgacacatacactctcccaagactaaaccaggaagaagttgaatctctgaatagaccaataacaggagctgaaattgtggcaataatcaatagtttaccaaccaaaaagagtccaggaccagatggattcacagccgaattctaccagaggtacaaggaggaactgcatataaacagagccaaagacaaaaaccacatgattatctcaatacatgcagaaaaagcctttgacaaaattcaacaacccttcatgctaaaaactctcaataaattaggtattgatgggacgtatttcaaaataataagagctatttatgacaaacccacagccaatatcatactgaatgggcaaaaactggaagcattccctttgaaaactggcacaagacagggatgccctctctcaccgctcctattcaacatagtgttggaagttctggccagggcaatcaggcaggagaaggaaataaagggtattcaattaggaaaagaggaagtcaaattgtccctgtttgcagacgacatgattgtttatctagaaaaccccatcgtctcagcccaaaatctccttaagctgataagcaacttcagcaaagtctcaggatacaaaatcaatgtacaaaaatcacaagcattcctatacaccaacaacagacaaacagagagccaaatcatgagtgaactcccattcactattgcttcaaagagaataaaatacctaggaatccaacttacaagggatgtgaaggacctcttcaaggagaactacaaaccactgctcaaggaaataaaagaggatacaaacaaatggaagaacattccatgctcatgggtaggaagaatcaatatcgtgaaaatggccatactgcccaaggcaatttacagattcaatgccatccccatcaagctaccaatgactttcttcacagaattggaaaaaactactttaaagttcatatggaaccaaaaaagagcccgcatcaccaagtcaatcctaagccaaaagaacaaagctggaggcatcacactacctgacttcaaactatactacaaggctacagtaaccaaaacagcatggtactggtaccaaaacagagatatagatcaatggaacagaacagagccctcagaaataacgccgcatacctacaactatctgatctttgacaaacctgagaaaaacaagcaatggggaaaggattccctatttaataaatggtgctgggaaaactggctagccatatgtagaaagctgaaactggatcccttccttacaccttatacaaaaatcaattcaagatggattaaagatttaaacgttagacctaaaaccataaaaaccctagaagaaaacctagaaattaccattcaggacataggcgtgggcaaggacttcatgtccaaaacaccaaaagcaatggcaaccaaagccaaaattgacaaatgggatctaattaaactcaagagcttctgcacagcaaaagaaactaccatcagagtgaacaggcaacctacaacatgggagaaaattttcgcaacctactcatctgacaaagggctaatatccagaatctacaatgaactcaaacaaatttacaagaaaaaaacaaacaaccctatcaaaaagtgggcgagggacatgaacagacacttctcaaaagaagacatttatgcagccaaaaaacacatgaaaaaatgctcatcatcactggccatcagagaaatgcaaatcaaaaccactatgagatatcatctcacaccagttagaatggcaatcattaaaaagtcaggaaacaacacgtgctggagaggatgtggagaaataggaacacttttacactgttggtgggactgtaaactagttcaaccattgtggaagtcagtgtggcgattcctcagggatctagaactagaaataccatttgacccagccatcccattactgggtatatacccaaatgactataaatcatgctgctataaagacacatgcacacagctttcagctgacgagaattgtgctgatagcatttggaggggaagggatgactgcgaacacctctgcatacccactggaggtcaaggttttggggatgaacaggaagtaccagcagggaatgattag

SEQ ID NO: 28184 - DNA, 3573 bp, Homo sapiens
  SIMILAR (2073)..(184): 631254mologous to Mus musculus endonuclease/reverse transcriptase,accession number AF016099,Smith-Waterman Score=2234.
ttattgtctttctcctccaattagagtggaaagctcaatgtaagtagcatcattcattttgcggcctgaagccagggcagtggcatcctgcatcgaactaccaatgtcatttttcacagaataagaaaaagctattctaaaattcatatggaacttcaaaagagcctgaatagccaaatcaatcctgttgtttcctgactttttaatgattgccactctaactggtgtgagatggtatctcattgtggttttgatttgcatttctctgatggccagtgatgatgagcattttttcatgtgttttttggctgcataaatgtcttcttttgagaagtgtctgttcatgtccttcacccactttttgatggggttgtttgtttttttcttgtaaatttgtttgagttcattgtagattctggatattagccctttgtcagatgagtaggttgcaaaaattttctcccattttgtaggttgcctgttcactctgatggtagtttcttttgctgtgcagaagctctttagtttaattagatcccatttgtcaattttggcttttgttgccattgcttttggtgttttagacatgaagtccttgcccatgcctatgtcctgaatggtattgcctaggttttcttctagggtttttatggttttaggtctaacgtttaagtctttaatccatcttgaattgatttttgtataaggtgtaaggaagggatccagtttcagctttctacatatagctagccagttttcccagcaccatttattaaatagggaatcctttccccattgcttgtttttctcaggtttgtcaaagatcagatagttgtagatatgcggcgttatttctgagggctctgttctgttccattgatctatatctctgttttggtaccagtaccatgctgttttggttactgtagccttgtagtatagtttgaagtcaggtagtgtgatgcctccagctttgttcttttggcttaggattgacttggtgatgcgggctcttttttggttccatatgaactttaaagtagttttttccaattctgtgaagaaaggcattggtagcttgatggggatggcattgaaactgtaaattaccttgggcagtatggccattttcacgatattgattcttcctacccatgagcatggaatgttcttccatttctttgtatcctcttttatttccttgagcagtggtttgtagttctccttgaagaggtccttcacatcccttgtaagttggattcctaggtattttattctctttgaagcaattgtgaatgggagttcactcatgatttggctctctgtttgtctgttgttggtgtataagaatccttgtgatttttgcacattgattttgtatcctgagactttgctgaagttgcttatcagcttaaggagattttgggctgagacaatggggttttctagatatacagtcatgtcatctgcaaacagggacaatttgacttcctcttttcctaattgaataccctttatttccttctcctgcctaattgccctggccagaacttccaacactatgttgaataggagtggtgagagagggcatccctgtcttgtgccagttttcaaagggaatgcttccagtttttgcccattcagtatgatattagctgtgggtttgtcatagatagctcttattattttgaaatacatcccatcaatacctaacttattgagagtttttagcatgaagggttgttgaattatgtcaaaggctttttctgcatctgttgagataatcatgtggtttttgtctttggctctgtttatatgctggattacatttattgatttgtgtatattgacccagccttgcatcccagggatgaagcccacttgatcatggtggataagctttttgatgtgctgctggattcgttttgccagtattttactgaggatttttgcatcaatgttcatcaaggatattggtctaaaattctctttttttgttgtgtctctgcctggctttggtatcagaatgatgctggcctcataaaatgagttagagaggattccctctttttctctggtagaattcggctgtgaatccatctggtcctggactcttttggttggtaagctattgattattgccacaatttcagagcctgttattggtgtattcagagattcaacttcttcctggtttagtcttgggagggtgtatgtgtcgaggaatttatccatttcttctagattttctagtttatttgcgtagaggtgtttgtagtattccctgatggtagtttgtatttctgtgggatcggtggtgatatcccctttatcattttttattgcgtctatttgattcttctctctttttttctttattattcttgctagcggtctatcaattttgttgatcccttcaaaaaaccagctcctggattcattaattttttgaagggttttttgtgtctctatttccttcagttctgctctgattttagttatttcttgccttctgctagcttttgaatgtgtttgctcttgcttttctagttcttttaattgtgatgttagggtgtcaattttggatctttcctgttttctcttgtgggcatttagtgctataaatttccctctacacactgctttgaatgcgtcccagatattctggtatgttgtgtctttgttctcgttggtttcaaagaacatctttatttctgccttcatttcgttatgtacccagtagtcattcaggagcaggttgttcagtttccatgtagttgagcggttttgagtgagattcttaatcctgagttctagtttgattgcactgtggtctgagagatagtttgttataatttctgttcttttacatttgctgaggagagctttacttccaagtatgtggtcaattttggaataggtgtggtgtggtgctgaaaaaaatgtatattctgttgatttggagtggagagttctgtagatgtctattaggtctgcttggtgcagagctgagttcaattcctgggtatccttgttgattttttgtcttgttgatctgtctaatgttgacagtggggtgttaaagtctcccattattaatgtgtgggagtctaagtctctttgtaggtcactcaggacttgctttatgaatcttggtgctccttttattttgagcctatgtgtgtttttcatttcattcatttcatcttccattgctgataccctttcttccagttgatcacatcggctcctgaggcttctgcattcttcatgtagttctcgagccttggttttcagctccatcagctcctttaagcacttctctatatcagttattctagttatacattcttctaaatttttttcaaagttttcaacttctttgcctttggtttgaatgtcctcccgtagctcagagtaatttgatcgtctgaagccttcttctctcagctcatcaaagtcattctccatccagctttgttccgttgctggtgaggagctgtgttcctttggaggaggagaggccctctgctttttagagtttccagtttttctgttctgtttttttcccat

SEQ ID NO: 28185 - DNA, 7769 bp, Homo sapiens
  SIMILAR (2751)..(172): 951254mologous to Homo sapiens putative p150,accession number U93563,Smith-Waterman Score=4225.
ctagcccatctgtgagttaagaggagccccatagatgtatgatgagcaaaggtgaaagctggctaagcctggaggagcttctgactctttggcaatttcatctggtttggatcttaattttttacagttgacagcagtgttatctgagctagtcagtggcatctggctgctgttgtttcctgactttttaatgattgccattctaactggtgtgagatgatatctcatagtggttttgatttgcatttctctgatggccagtgatgatgagcatttcttcatgtgttttttggctgcataaatgtcttcttttgagaagtgtctgttcatgtcctttgcccactttttgatggggttgtttgtttttttcttgtaaatttgtttgagttcattgtagattctggatattagccctttgtcagatgagtaggttgcgaaaattttctcccatgttgtaggttgcctgttcactctgatggtagtttcttttgctgtgcagaagctctttagtttaattagatcccatttgtcaattttggcttttgttgccattgcttttggtgttttggacatgaagtccttgcctacgcctatgtcctgaatggtaatgcctaggttttcttctagggtttttatggttttaagtctaacgtttaaatctttaatccatcttgaattgatttttgtataaggtgtaaggaagggatccagtttcagctttctacatatggctagccagttttcccagcaccatttattaaatagggaatcctttccccattgcttgtttttctcaggtttgtcaaagatcagatagttgtagatatgcggcattatttctgagggctctgttctgttccattgatctatatctctgttttggtaccagtaccatgctgttttggttactgtagccttgtagtatagtttgaagtcaggtagtgtgatgcctccagctttgttcttttggcttaggattgacttggcgatgcgggctcttttttggttccatatgaactttaaagtagttttttccaattctgtgaagaaagtcattggtagcttgatggggatggcattgaatctgtaaattaccttgggcagtatggccattttcacgatattgattcttcctacccatgagcatggaatgttcttccatttgtttgtgtcctcttttatttccttgagcagtggtttgtagttctccttgaagaggtccttcacatcccttgtaagttggattcctaggtattttattctctttgaagcaattgtgaatgggagttcactcatgatttggctctctgtttgtcggttgttggtgtataagaatgcttgtgatttttgtacattgattttgtatcctgagactttgctgaagttgcttatcagcttaaggagattttgggctgagacgatggggttttctagataaacaatcatgtcgtctgcaaacacggacaatttgacttcctcttttcctaactgaataccctttatttccttctcctgcttgattgccctggccagaacttccaacactatgttgaataggagcggtgagagagggcatccctgtcttgtgccagttttcaaagggaatgcttccagtttttgcccattcagtatgatattggctgtgggtttgtcatagatagctcttattattttgaaatacttcccatcaatacctaatttattgagagtttttagcatgaagggttgttgaattttgtcaaaggctttttctgcatctattgagataatcatgtggtttttgtctttggctctgtttatatgctggattacatttattgatttgcgtatattgaaccagccttgcatcccagggatgaagcccacttgatcatggtggataagctttttgatgtgctgctggattcggtttgccagtattttattgaggatttttgcatcaatgttcatcaaggatattggtctaaaattctcttttttggttgtgtctctgcccggctttggtatcagaatgatgctggcctcataaaatgagttagggaggattccctctttttctattgattggaatagtttcagaaggaatggtaccagttcctccttgtacctctggtagaattcggctgtgaatccatctggtcctggactctttttggttggtaaactattgattattgccacaatttcagagcctgttattggtctattcagagattcaacttcttcctggtttagtcttgggagagtgtatgtgtcgaggaatgtatccatttcttctagattttctagtttatttgcgtagaggtgtttgtagtattctctgatggtagtttgtatttctgtgggatcagtggtgatatcccctttatcattttttattgtgtctatttgattcttctctctttttttctttattagtcttgctagcggtctatcaattttgttgatcctttcaaaaaaccagctcctggattcattgattttttgaagggttttttgtgtctctatttccttcagttctgctctgattttagttatttcttgccttctgctagcttttgaatgtgtttgctcttgcttttctagttcttttaattgtgatgttagggtgtcaattttggatctttcctgctttctccggttgttcctttccatgtttagcgcttccttcaggagctcttttagggcaggcctggtggtgacaaaatctctcagcatttgcttgtctataaagtattttatttctccttcacttatgaagcttagtttggctggatatgaaattctgggttgaaaattcttttctttaagaatgttgaatattggcccccactctcttctggcttgtagggtttctgccgagagatccgctgttagtctgatgggctttcctttgagggtaacccgacctttctctctggctgcccttaacattttttccttcatttcaactttggtgaatctgacaattatgtgtcttggagttgctcttctcgaggagtatctttgtggcgttctctgtatttcctgaatctgaacgttggcctgccttgctagactggggaagttctcctggataatatcctgcagagtgttttccaacttggttccattctccacatcactttcaggtacaccaatcagacgtagatttggtcttttcacatagtcccatatttcttggaggctttgctcatttctttttattcttttgtctctaaacttcccttctcgcttcatttcattcatttgatctttaatcactgataccctttcttccacttgatcggattggctcctgaagcttgtgcatgcgtcacatagtttttgtgccatggttttcagctccatcaggtcctttaaggtcttctctacgctctttattctagtcagccattcgtgtaatcttttttcaaggtttttagcttctttgcaatgggttcgaacatccttctttagctcggagaagttcgttattaccgatcttctgaagcctacttctgtcaactcgtcaaagtcattctccgtccaggtttgttccattgctggtgaggagctgtgatcctttggaggagaagaggcgctctgatttttagaattttcagcttttctgctctggattctccccacctttgtggttttatctacctttggtctttgatgatggtgtctgggaggtgtctcccagttaggatactcagggggcaggggcccacttaaggaagcagtctgtccgttctcagatctcacactccgttctgggagagccactactctcttcaaagcgctgcttttcagcagtttggctgtgatttgtttaggtgctgctttttccttatttattctccttgtgggtgcgttaaggttcttggttctcctcccacccccaactctcccctgacacacaacgtggatgtggaacttcttgattctgtcttgttttggttgataaggtacaaatagtctcacgtaaccctgtacatctggtagaaatcccccagataactgcctcttactgggtggcttgttaaacatacagattctcttgtcaaaacttctgggaatgggacccagagagctgtgtttggaaggcttctgggggattttaggtggccaatgtgatgtttgggaagcaccgggccacagcactttgctcaaggttttgctcacagttggcctaccatgtctgttgtttcctgacttttttcatgattgccattctaactggtgtgagatgatatctcatagtggttttgatttgcatttctctgatggccagtgatgatgagcatttttttcatgtgttttttggctgcataaatgtcttcttttgagaagtgtctgttcatgtcctttgcccactttttgatggggttttttgtttttttcttgtaaatttgtttgagttcattgtagattctggatattagccctttgtcagaagagtaggttgcgaaaattttctcccatgttgtaggttgcctgttcactctgatggtagtttcttttgctgtgcagaagctctttagtttaattagatcccatttgtcaattttgtcttttgttgccattgcttttggtgttttggacatgaagtccttgcccacgcctatgtcctgaatggtaatgcctaggttttcttctagggtttttatggttttaggtttaacgtttaaatctttaatccatcttgaattgatttttgtataaggtgtaaggaagggatccagtttcagctttctacatatggctagccagttttcccagcaccatttattaaatagggaatcctttccccattgcttgtttttctcaggtttgtcaaagatcagatagttgtagatatgcggcattatttctgagggctctgttctgttccattgatctatatctctgttttggtaccagtaccatgctgttttggttactgtagccttgtagtatagtttgaagtcaggtagtgtgatgcctccagctttgttcttttggcttaggattgacttggcaatgcgggctcttttttggttccatatgaactttaaagtagttttttccaattctgtgaagaaagtcattggtagcttgatggggatggcattgaatctgtaaattaccttgggcagtatggccattttcacgatattgattcttcctacccatgagcatggaatgttcttccatttgtttgtatcctcttttatttccttgagcagtggtttgtagttctccttgaagaggttcttcacatcccttgtaagttggattcctaggtattttattctctttgaagcaattgtgaatgggagttcactcatgatttggctctctgtttgtctgttgttggtgtataggaatgcttgtgatttttgtacattgattttgtatcctgagactttgctgaagttgcttatcagcttaaggagattttgggctgagacgatggggttttctagataaacaatcatgtcgtctgcaaacagggacaatttgacttcctcttttcctaattgaataccctttatttccttctcctgcctgattgccctggccagaacttccaacactatgttgaataggagtggtgagagagggcatccctgtcttgtgccagttttcaaagggaatgcttccagtctttgcccattcagtatgatattggctgtgggtttgtcatagatagctcttattattttgaaatacgtcccatcaatacctaatttattgagagtttttagcatgaagggttgttgaattttgtcaaaggctttttctgcatctattgagataatcatgtggtttttgtctttggctctgtttatatgctggattacatttattgatttgcgtatattgaaccagccttgcatcccagggatgaagcccacttgatcatggtggataagctttttgatgtgctgctggattcggtttgccagtattttattgaggatttttgcatcaatattcatcaaggatattggtctaaaattctcttttttggttgtgtctctgcccggctttggtatcagaatgatgctggcatcataaaatgagttagggaggattccctctttttctattgattggaatagtttcagaaggaatggtaccagctcctccttgtacctctggtagaatttggctgtgaatccatctggtcctggactctttttggttggtaagctattgattattgccacaatttcagatcctgttattggtctattcagagattcaacttcttcctggtttagtcttgggagagtgtatgtgtcgaggaatgtatccatttcttctagattttctagtttatatgcgtagaggtgtttgtagtattctctgatggtagtttgtatttctgtgggatcggtggtgatatcccctttatcattttttattgtgtctatttgattcttctctctttttttctttattagtcttgctagcggtctatcaattttgttgatcctttcaaaaaaccagctcctggattcattgagtttttgaagggttttttgtgtctctatttccttcagttctgctctgattttagttatttcttgccttctgctagcttttgaatgtgtttgctcttgcttctctagttcttttaattgtgatgttagggtgtcaattttggatctttcctgctttctcttgtgggcatttagtgctataaatttccctctacacactgctttgaatgtgtcccagagattctggtatgttgtgtctttgttctcattggtttcaaagaacatctttatttctgccttcatttcgttatgtacccagtagacattcaggagcaggttgttcagtttccatgtagttgagcggctttgagtgagattcttaatcctgagttctagtttgattgcactgtggtctgagagatagtttgttataatttgtgttcttttacatttgctgaggagagctttacttccaactatgtggtcaattttggaataggtgtggtgtggtgctgaaaaaaatgtatattctgttgatttggggtggagagttctgtagatgtctattaggtctgcttggtgcagagctgagttcaattcctgggtatccttgttgactttctgtcttgttgatctgtctaatgttgacagtggggtgttaaagtctcccattattaatgtgtgggagtctaagtctctttgtaggtcactcaggacttgctttatgaatctgggtgctcctgtattgggtgcatatatatttaggatagttagctcctcttgttgaattgatccctttaccattatgtaatggccttctttgtctcttttgatctttgttggtttaaagtctttctctctggctgcccttaacattttttgcttcatttcaactttggtgaatctgacaattatgtgtcttggagttgctcttctcgaggagtatctttgtggcgttctctgtatttcctgaatctgaacgttggcctgccttgctagattggggaagtcctcctggataatatcctgcagagtgttttccaacttggttccattctccgcatcactttcaggtacaccaatcagacgtagatttggtcttttcacatagtcccatatttcttggaggctttgctcatttctttttattcttttttctctaaacttcccttctcgcttcatttcattcatttcatcttccattgctgataccctttcttccagttgattgcgtcggctcctgaggcttctgcattcttcacgtagttctcgagccttggttttcagctccat

SEQ ID NO: 28186 - DNA, 2022 bp, Homo sapiens
  SIMILAR (700)..(1413): 991254mologous to Klebsiella pneumoniae ES-beta- lactamase,accession number Y10279,Smith-Waterman Score=1211.
atgagattgaccccgcgcgcgctgtgcagcgccgcccaggccgcctggcgggagaacttccccctgtgcggtcgcgacgtggcgcgctggttcccgggccacatggccaaggggctgaagaagatgcagagcagcctgaagctggtggactgtatcatcgagaaaattatgcaacacttagaaggagaaggcctaaaaaatgtcatttttaccaactgtgtaaaggatgaaaatgtcaagcagatcatcccgatggtcactgaactgattgggagaagccaccgctaccaccgaaaagagaacctggagtactgtatcatggtcattggggtccccaacgtgggcaagtcctccctcatcaactccctccggaggcagcacctcaggaaagtggactcacagtacttggccttttgtgactggctgatgtcaccgatcgtgatgtcctcaagggaaagcaccagggtgggtggcgagcctgggatcaccagagctgtgatgtccaaaattcaggtctctgagcggcccctgatgttcctgttggacactcctggcgtgctggctcctcggattgaaagtgtggagacaggcctgaagctggccctgtgtggaacggtgctggaccacctggtcggggaggagaccatggctgactacctgctgtacaccctcaacaaacaccagcgctttgggaagagtatgagtattcaacatttccgtgtcgcccttattcccttttttgcggcattttgccttcctgtttttgctcacccagaaacgctggtgaaagtaaaagatgctgaagatcagttgggtgcacgagtgggttacatcgaactggatctcaacagcggtaagatccttgagagttttcgccccgaagaacgttttccaatgatgagcacttttaaagttctgctatgtggcgcggtattatcccgtgttgacgccgggcaagagcaactcggtcgccgcatacactattctcagaatgacttggttgagtactcaccagtcacagaaaagcatcttacggatggcatgacagtaagagaattatgcagtgctgccataaccatgagtgataacactgcggccaacttacttctgacaacgatcggaggaccgaaggagctaaccgcttttttgcacaacatgggggatcatgtaactcgccttgatcgttgggaaccggagctgaatgaagccataccaaacgacgagcgtgacaccacgatgcctgcagcaatggcaacaacgttgcgcaaactattaactggcgaactacttactctagcttcccggcaacaattaatagactggatggaggcggataaagttgcaggaccacttctgcgctcggcccttccggctggctggtttattgctgataaatctggagccgaagtaaggttccttcacaaagatccggaccaaagcggccatcgtgcctccccactcctgcagttcgggggcatggatgcgcggatagccgctgctggtttcctggatgccgacggatttgcactgccggtagaactccgcgaggtcgtccagcctcaggcagcagctgaaccaactcgcgaggggatcgagcccggggtgggcgaagaactccagcatgagatccccgcgctggaggatcatccagccggcgtcccggaaaacgattccgaagcccaacctttcatagaaggcggcggttgggcgtcgcttggtcggtcatttcgaaccccagagtcccgctcagaagaactcgtcaagaaggcgatagaaggcgatgcgctgcgaatcgggagcggcgataccgtaaagcacgaggaagcggtcagcccattcgccgccaagctcttcagcaatatcacgggtagccaacgctatgtcctgatagcggtccgccacacccagccggccacagtcgatgaatccagaaaagcggccattttccaccatgatattcggcaagcaggcatcgccatgggtcacgacgagatccttcgccgtcgggcatgcgcgccttga

SEQ ID NO: 28187 - DNA, 1266 bp, Homo sapiens
  SIMILAR (268)..(714): 731254mologous to Homo sapiens testis-specific RING Finger protein,accession number AB037682,Smith-Waterman Score=588.
atgtacacccactgctatattgggagtaacgtcatactccaccctctggatattcggatcaatatcaccgggtgggtgtacacctacggcaatattgaaagtaataccatgctctctccctccatggacattgggaacaatatcatagatataagcactagaggaaaagctctacctgatatagctggcctagacacatgcagatttattaattgtagaagaaagaattatacttttcagggttttggagacatattacacagaaacatgaattctggaatcttgcaagtcttccagagggaactcacctgtcccatctgcatgaactacttcctagacccagtcaccatagactgtgggcacagcttttgccggccctgtttctacctcaactggcaagacatggcagttgttgctcagtgctctaaatgcaaggagacaacatggcagagaaacctcaacactgacatttgtttgaagaacatggcttccattgccagaaaagccagcctccggcaattccttagctctgaagagcaaatatgtgggatgcacagagagacaaagaagatgttctgtgaagtggacaagagcctgctctgtttgctgtattccaactctcaggagcaccggaatcacagacactgtcccattgagtgggctgctgaggaacgccggtcttttggagacatattacaaaggtatgagtctctgctgctgcaagtgtctgagcctgtgaatccagatttcagtgcagggcccatcattggactgatggacaggctcaagagattcagagaaatagatcttcagaggcatcacttacccagtgttcctcagcagcccactcagcgggacagtgtctgtgataccggtgctcctgagagctggagcacagcaaacagagcaggctcctgtccacttcacagaacatcttctttgtctccctgtgaatgccacacatttgctcctcagagctcaggaatagccagagactggcttttctggcaagggaagccatcttcttcaatcgaatcactgagtaagaattgggatgtcttgccagttgaggtagaaacagggcctgcaaaagctgtgcccacagtctatggtgaccgggtctatgaagtagttcatgcagatggggcaggtgagttccctctggaagacttgcgagattccagaattcatgtttctgaggaagaaagagcagcatgtcattttggggtctgggttgatgaaaagcttctgaacatgtggagataa

SEQ ID NO: 28188 - DNA, 1047 bp, Homo sapiens
  SIMILAR (199)..(65): 351254mologous to Homo sapiens p8 protein,accession number AF216972,Smith-Waterman Score=66.
tcacatgtgggctttgcagaatgggtgcaaggttttattgagtggaagtagctcagcgaaagtcagaagtgggtagagtgggagggctttcctcgggagctgggccactcggtggcctgggctttcctcggactgccccagccaaactctgcattgttctccttctgctggttggtggcctgctggcgcctgccggtgcgttcctgtggttgtccaccgcctgtgtgttcctccaccgatgtgctcctctcgatgtccacctgcccctgtctctgccttgctggggtctcgggagtttttataggcacaggatgggttgtggcaggccagagtggtcttgggaaatgcaacatttgggcaggaaatgcctgtcctcaccgaggtccgtgggggttggaatccttcatcatagtatctctcaactgttgacattcctgcatcgttctccctggggagcgggaggctccaagcgcggctggggcgctgtgggcagatgcgctcggtcctcaccagcggcgttgtgcggcgaaccctgcggtgcttcgggaaggcggtcgttcctccctgctcccaccgttttccagcgtgtgcgctcttaccttctctaaagatggctccacttagtcctctggcaccacccacattcttcttatgggcacgtgtcattgcattgtcattattgtttgcgcagtcgtctcctgaactcacccctgagcagggcgcagaactttcctttcccattttggtgatccagctccttctggagcatctgggggtaaaaactgtttgtagacacataagcttataggccctttgcagttccgctagtctccaagcctgtgcttcaccttctctcctccatgtcttattctgctgtcccatatctgcagtgccttccccttcctcttgaccctccaaattctcactccatgcctgaaacttattttgtactgctatcagccttgcactgcagctgtcagcagtcattctaggacatacaggtttgtctgttggtgtctttgaattatctgtgaatactttaatcat

SEQ ID NO: 28189 - DNA, 759 bp, Homo sapiens
  SIMILAR (373)..(489): 901254mologous to Homo sapiens CDM protein,accession number U36341,Smith-Waterman Score=158.
atggccatggccctggccctggccctgctctggctgttccctggccctgcccagttggggcatgttcacgcagagtccactggccaccctgcggtaggcctggaaagtcagcaggtggcgctgggacaccagctttctgctggctgggggcagaggagccccgacccggaaagtgccacgttccgggacctcatgctgtatcgaggctcttcccagcccccaggctcctgcttccagcccctcccagagctgagggtggccgttgggcacagcggcagaggacagctcctgggctccaccttttccctcacgctgccagcaccaggttggcggcttctcgctcagctgccttggcaagagggcagatgcctggtgactctcatcttgcagcaggccacactgttggcctccaatgaagcctttaaaaagcagatggagagtgctagtgaggcggccaagaagtacacggagaatgaccagctcaagaagtcagacccttccctgagaaaaatggcccctcaggaagtccagaggagcgtcctctgcccgctgctgcccattttgtgccaaagtactagtaacaagccttgcacgcatgctcgagggctgtgtgaaaacaaacaaatagcaccctatgcctccaaccccaatgcagccatgcttagccggcaggccaaactagagaaagctgaaaaccaggttctggccatgcagaagcagtctgagggcctcaccaaggagtacgaccgcttgcagtag

SEQ ID NO: 28190 - DNA, 825 bp, Homo sapiens
  SIMILAR (101)..(274): 981254mologous to Homo sapiens tumor-associated antigen,accession number X81109,Smith-Waterman Score=272.
cagcagcgcacgctgctggcttccaatgaagcctttaaaagccaggcgaagagtgctagtcagccggcaagtaagtacatgaaggagaatgaccagctcaaaaaaggaagctgctgttgacggaggcaagttggatgtcggcaatgctgaggtgaagttggaggaagagaacaggagcctgaaggctgacctgcagaagctaaaggacgagctggccagcactaagcaaaaactagagaaagctgaaaaccaggttctggccatgcggaagcagctcctgagggcctcaccaaggagtacgaccgcttgctggaggagcacgcaaagctgcaggctgcagtagatggtcccatggacaagaaggaagagtaagggcctccttccttcccctgcctgcagctggcttccacctggcacgtgcctgctgcttcctgagagcccggcctctccctccaagtacttctgtttgtggccttcctgcttcccccatttcctttccacagctcatagctccgtcatctcggcccttgtccacactctccaacgcacattacagggggccttgattgctacacgttcagaatgcgtttgctgtcatcctgcttggcctggccaggcctggcacagccttggcttccacgcctgagcgtggagagcacgagttagttgtagtccggcttgcggtggggctgacttcctgttggtttgagcccctttttgttttgccctctgggtgttttctttggtcccgcaggagggtgggtggagcaaggtgaattggagtttctcttgagggcaataaaagttgtcatggtgtgtaaaaaa

SEQ ID NO: 28191 - DNA, 1157 bp, Homo sapiens
  SIMILAR (975)..(1109): 581254mologous to Homo sapiens MRJ,accession number AB014888,Smith-Waterman Score=114.
atgttgttgtcagcttttcagtacgccaaaaactggaccacagtgcagatgtcccatcaacagggtgggcatccccttgcttttgagcgccacccacctcgtggctttctggaggccaagtcgctgtgcattgctggccatggggctgaggccagcagggagtggtgctgtcagcagaggaccgcttcaccattgactgcccagaggaacaatgggtttaattccctcagcgtgctgacccgggtggtgctgcggctttaccaggtccccacaacagttcagcaagcccagccaccccccaccctcatctggatacctctactcctgcaccagagccctgatcagaagtcaaggcacctaggcctccccgacccccagcgggatgcctcccattcctgcaccagagccttgatcagagtcacagcatcatatgtcttccattacctgtcagtcagccaagtcccatctccaccctgtgtaggcctgacctgcagcaccttcccggccaccccacccagcgctaacccagtgcatagggtgcttctgttggtcgatgagtatgggatgaagaaagaggaaggacatgatttttcttcattccagtacctacctttagaaggatggggagctcactccgagaacagggaaatcaacattgcagtaacaagtaagtgggggcctccgctcaggcacaggcatgtggctgcctatgtgggcattcgggaccatcaggagagtcaaggactcgcctcagcctgcaacacagactgtaaccaagaaagtgatgtgtgtgctgttaaaacaggctctgaaaaggtaaaggagaatatctggatggagagagagagacagtctagtaaacatccttattgttgtaagcaccagaggttttcagctctgtggtggccaagtacccgatgaggaaacaggcttggagaaatccagtaacttgccaggttgccctgctgtggaatggcaacttcaaatctatatcaacttctactagaaatgttaacggcagaaacatcactaaaaagagttgttgggaatggcggagaaaggtagaaatgggagaagacggccagcataaggagcagctgctgcgcttgatgcaaagtcatcgaacaaaaacgttcagctacagaagcaccatctga

SEQ ID NO: 28192 - DNA, 1104 bp, Homo sapiens
  SIMILAR (627)..(196): 441254mologous to Xenopus laevis p33 ringo,accession number AJ249978,Smith-Waterman Score=260.
ctagatgatctgcacaaatggttcctctcctctttcctgttgtctgccattagcattggaataaagttcctgctgaaaatccacatctcccctgggtccggtgttctcctccaactcctcccgggaaacccaagccctgccgctcatggaacagaagaactggaaccgaagtttctggaacagggctatctgagagcggttcttcctggccctcgggttcaagcaacggcataactggaaccgacggttacggaccaagggtatgcgagagcgggtcttcccatacaggaagtagaagatgttttgtttggggtcctcgtcgtcctcctccatgtcattggccaggtagagagccaggaagaaatgaatgcgttggtattgccaggaggggaggccggcccggctgaaatacgctatgaccatagccaggagatacttgtccgacaccctcagatctttgtcccaggccaggaatcttttaatgacaggatcctcaagcagcctgttgaaggcctcgtggtgctcagggagcacgagcgacactcgccgtcgcttcagcttcatcttgaggccacacagcatctccgccacccagatctcctcaggctcaggggcgagcaccttccgtggctcctcctccaacgactcctcagattcgtcccaccactccctcttccttttccagcaaaaggacctatgcggggggctgggatctaccccaggggcaagctgactgttgaagtccttgtggtgctcagggaggatgggtgacactcgctgttgcttcagcttcatcttgagcccacacagcatctccactacccaggtctcctcaggctcaggggcgagctccttctccggctcctcctcagattcatctgaccactccttcttccttttccagccaagggacctacatggggggctgggatctaccccaggggctgatgatcccaacacttcatcatccaccacctcctggagggagtaccccgaggtgctccgctggggactctgctcattctgggggtgcggttgacggctggtcgtgatctttcccttaatctgtcccctcttacggaacctagtctccgttctgtccat

SEQ ID NO: 28193 - DNA, 2172 bp, Homo sapiens; identical to SEQ ID NO: 492
  SIMILAR (268)..(687): 901254mologous to synthetic construct InsB peptide,accession number Z37515,Smith-Waterman Score=652.

SEQ ID NO: 28194 - DNA, 698 bp, Homo sapiens
  SIMILAR (154)..(255): 821254mologous to Homo sapiens hPMSR2,accession number U38964,Smith-Waterman Score=140.
gccttcaaatcctcctggactgcaagtccgtaagaaacaggacctccaggttccgccccagggaggttggaattcaccaatataaaaagggtggtggtgccgcaagaaagggtggaactggaaacgctcctggtttcttacttttctccaaggactcctagaaggaccccaccccccttcccccacccctgctcctaggaggacaacgtgatcactgtattcagctccatcaagaatggtccaggttcttctagatgatctgcacaaatggttcctctactcctgcctggtgtctgccattagcattggaataaagttcccgctgaaaatccacatctcccctgggtccggtgttctggaagcgagagagacaatgtcacacttcaaggaggcagctctctagacaggaaagttattcacgtcccatgtcaattgagaaatgcaattttatctgctgcctttcattctataccctgcttctgaaccatcgtgttcaactgtgaaactcacactttggtgaccacgactccaaaactcacttaatacacccaaggtcagccccagtgatctgcttcatagcaaggactttgggtgggtctgcccagggagtagggcaccctcagagaatgtggctttggactttatcacagctggggccttttgtgtcacttaagatctaaacttgtaaccatgctaga

SEQ ID NO: 28195 - DNA, 1338 bp, Homo sapiens
  SIMILAR (120)..(404): 361254mologous to Haliotis rufescens lustrin A,accession number AF023459,Smith-Waterman Score=89.
ctagatgatctgcacaaatggttcctctcctctttcctgttgtctgccattagcattggaataaagttcctgctgaaaatccacatctcccctgggtccggtgttctcctccaactcctcccgggaaacccaagccctgccgctcatggaacagaagaactggaaccgaagtttctggaacagggctatctgagagcggttcttcctggccctcgggttcaagcaacggcataactggaaccgacggttacggaccaagggtatgcgagagcgggtcttcccatacaggaagtagaagatgttttgtttggggtcctcgtcgtcctcctccatgtcattggccaggtagctgaggacagaaatcaggttggtgctcaggggcaccaccaggagaggcctccggctgaggtcagcttcccagagaggaaggtaagggactgtccctagctcaggactggcacccaccctcagtgttggggtgactgtactcatttggaaattgcgggatggaggggtattcgaaggtcggatgcaaatctgagaagccagaggaagggttttgggtgatgctcccaggatggtgggctccgatgggatcttgtccgacaccctcagatctttgtcccaggccaggaatcttttaatgacaggatcctcaagcagcctgttgaaggcctcgtggtgctcagggagcacgagcgacactcgccgtcgcttcagcttcatcttgaggccacacagcatctccgccacccagatctcctcaggctcaggggcgagcaccttccgtggctcctcctccaacgactcctcagattcgtcccaccactccctcttccttttccagcaaaaggacctatgcggggggctgggatctaccccaggggcaagctgactgttgaagtccttgtggtgctcagggaggatgggtgacactcgctgttgcttcagcttcatcttgagcccacacagcatctccactacccaggtctcctcaggctcaggggcgagctccttctccggctcctcctcagattcatctgaccactccttcttccttttccagccaagggacctacatggggggctgggatctaccccaggggctgatggtcccaacacttcatcatccaccacctcctggagggggtaccccgaggtgctccgctggagactctgctcattctgggggtgcggttgacggctggtcgtgatctttcccgtaatctgtcccctcttacggaacctagtcttcgttctgtccatggccttcttctggacacacggagtccggtccctccaatcaggaaggtcggaatctctgatgtcatcgttcat

SEQ ID NO: 28196 - DNA, 857 bp, Homo sapiens
  SIMILAR (99)..(332): 341254mologous to Pseudorabies virus glycoprotein gX,accession number U27488,Smith-Waterman Score=89.
ctagatgatctgcacaaatggttcctctcctctttcctgttgactgccattagcattggaattaagttcctgctgaaaatccacatctcccgtgggtccggtgttctcctccaactcctcccgggaaacccaagccctgccgctcatggaacagaagaactggaaccgaagtttctggaacagggctatctgagagcggttcttcctggccctcgggttcatgcaacggcataactggaaccgacggttacggaccaagggtatgcgagagcgggtcttcccatacaggaagtagaagatgttttgtttggggtcctcgtcgtcctcctccatgtcattggccaggtagctgaggacagaaatcaggttgctgctcaggggcaccaccaggagagcgtccggctcagtgttggggtgactgtactcatttggaaattgcaggatggaggggtattcgaaggtcagatgcaaatccgagaagccagaggaagggttttgggtgatgctcccaggatggtgggctccgatgggatctttggagggggtgtgtctaggtcggctggtgtcaggagggtcttttgtgtgccaggcagagaactgtcccgaagagctgagagtagaggggctaggagcttcagggctgcggccagactgtggcccagagctcagatcccaaaggacccataggagaggcaggggccacttcattcactctgcaagagaccagcagaatcctgagggaagatgctgacaaatcattaaaaagaccaagaattagcccggagttgccgctcaagcctgttgatcccagtacttttttaagaggttgaagacaggaggatcatgttaagcccaaa

SEQ ID NO: 28197 - DNA, 1713 bp, Homo sapiens
  SIMILAR (1168)..(737): 451254mologous to Xenopus laevis p33 ringo,accession number AJ249978,Smith-Waterman Score=251.
  misc_feature (1)...(1713): n = a,t,c or g
aaaatatttatagagaaaanagccccactataccaccagaggaccaccagtcagcgtaaaccaggtattttttaacgcctacttgtgcgccataaggaatttcaaaggaatattaagaagtgagtgagcgctcatgggatctggttgtttagaagcatgcagcacctcctgcttcactctctctgtctctcctgctccaccatggccagaaacgtgcctgcttccccttcgccttctgccgtgattgtcagtttcctgaggcctccccagccatgcttcctgtacagcctgcagaactgactcctagaagtacccccaccccacccctgctccttggaggacaacgtgatcactgtattcagctctgtcaagaatggtccaggttcttctagatgatctgcacaaatggttcctctcctccttcctggtgtctgccattagcattggaataaagttcctgctgaaaatccacatctcccctgggtccggtgttctcctccaactcctctggggaaacccaagccctgcagctcatggaacagaagaagtggaaccgacgtttctggaacaggactatctgagagcggttcttcctggccctcgggttcatgcaacggcgtaactggaaccgacgcttacggaccaagggtatgtgaagagcggttccttccctggccctcgggttcgtggaacggtataactggaaccgacgcttacggagcaagggtatgcgagagcggttcttcctggccctcgggttcatggaatggcctaactggaaccaacgcttacggagcaagggtatgcgagagcggttcttcctatacaggaagtggaagatgttttgtttggagtcctcgtcgtcctcctccatgtcattggccaggtagagagccaggaagaaatgaatgcgttggtattgccaggaggggaagccggcccggctgaaatacgctatgaccatagccaggagatacttgtccgacaccctcagatctttgtcccaggccaggaatcttttaatgacaggatcctcaagcagcctgttgaaggcctcgtggtgctcagggagcacgagcgacactcgccgtcgcttcagcttcatcttgaggccacacagcatctccgccacccagatctcctcaggctcaggggcgagcaccttccgtggctcctcctccaacgactcctcagattggtcccaccactccatcttccttttccagcaaaaggacctatgcggggggctgggatttaccccaggggcaagctgactgttgaagtccttgtggtgctcagggaggatggatgacactcgctgttgcttcagcttcatcttgagcccacacagcatctccactacccaggtctcctcaggctcaggggcgagctccttctccggctcctcctcagattcatctgaccactccctcttccttttccagccaagggacctacatggggggctgggatctaccccaggggctgatggtcccaacatttcatcatccaccacctcctggagggggtaccccgaggtgctccgctggggactctgctcattctgggggtgcggttgacggctggtcgtgatctttcccgtaatctgtcccctcttacggaacctagtctccgttctgtccatggccttcttctggacacttccagaggacttgggctccaggacccagtaacgcagccctggacttgacc

SEQ ID NO: 28198 - DNA, 1722 bp, Homo sapiens
  SIMILAR (1722)..(1123): 1001254mologous to Homo sapiens PMS2L13,accession number AB017004,Smith-Waterman Score=1042.
  misc_feature (1)...(1722): n = a,t,c or g
tgggggaggattatggattaggcttctggactcgtggttcgtgatgttgtcacgttagaaacagatctagcacggttacaagtttagatctgaagtgacacaaaaggccccagctgtgatgaagtccaaagccacattctctgaagggtgccctactccctgggaagacccacccaaagtccttgctatgaagcagatcactggggctgaccttgggtgtattaagtgagttttggagtcgtggtcaccaaaatgtgagtttcacagttgaacacgatggttcagaagcagggtatagaatgaaaggcagcagataaaattgtatttctcaattgctctgaactctagctagacttgacatgggacgtgaataaccttcctgtctagagagctgtctccttgaggtgtgacattgtctctctcacttccagaacaccggacccaggggagatgtggattttcagcaggaactttattccagtgctaatggcagacatcaggaaggaggagaggagccatttgtgcagatcatctagaagaacctggaccattcttgacaagagctgaatacagggatcacgcttgtcctccaaggagcaggggtggggtggggtacttctaggaaatncaaattttgcagggctgtacaggaagcatggctggnggaggcctcaggaaactgacaatcacggcagaaggcgaaggggaagcaggcacgtttcttcttaatattcctttgaaattctttatggtgcacaggtagcgtagaaaataactgcttcacgctgactgtcatccctctggggtggggggtagggggttttctgggatgattttcccatcgtgatccaacaccagtcagagtcccaacccttcgctgatacacgggaggtagaaatggtgacatcactcagtgcacaaagtgaggctcagagcttccccccgaaaagccaaagtttcaacccgagttaggtcggcaaactctcgaatcttagatgtgtgatgtttcagagctgaaagagattaaggccttcgaagttttcttcttctaccccacatccattgcctgaaacttcaatgagatccactccatagtccttaagctttagatcaatattagtgggcaccagcatccagactgttttctactaactccttcaccgcagtgcttagactcggtaccaccggcccagagcaaatctgatggactgacttccgatcaataggtttgatggccttagcaggttctgtactcgagctctcagctcgctccaaggatgcaacaccggatccgcctcggggactgggaaagttccctccacggctcccacaggcgccccgcctcctgggctcccaacggctgctttcgacgttgtgctccaccctttccgggcggggcggaaaaaatacttcccgtctctccttttcgcctagtggctctgtcaaaggtcgagtccgtgacgtcaaagagcctggaccaatcagagcacaccggactgcgttttttccgaacgccagcagcagggtcagaagggaggtagtcgccctccgtcgtggcctggcgtggattccgagcgttggtgtctggcggtttccgaccgttggtgtctggcacgcgccaccccgatgtaccaggtaaagccctatcacggggtcggcgcccctctccgtgtggagcccacctgcatgtactggctccccaacatgcacggcaggagcggc

SEQ ID NO: 28199 - DNA, 548 bp, Homo sapiens
  SIMILAR (169)..(384): 1001254mologous to Homo sapiens Similar to mitogen-activated protein kinase kinase 1,accession number BC000471,Smith-Waterman Score=390.
  misc_feature (1)...(548): n = a,t,c or g
cgggcttgncgtacctcgngagaagcaccagatcatgcaccgagatgtaagccctccaacattcctcgtgaactctagaggggagatcaagctgtgtgacttcgggttgagcngccagctcatagactccatggccaactccttcgtggcacgcgntcctacatggctccacctcctaagctgcccaacggtgtgttcacccccgacttccaggagtttgtcaataaatgcctcatcaagaacccagcggagcgggcggacctgaagatgctcacaaaccacaccttcatcaagcggtccgaggtggaagaagtggattttgccggctggttgtgtaaaaccctgcggctgaaccagcccggcacacccacgcgcaccgccgtgtgacagtggccgggctccctngtcccgctggtgacctgcccaccgtccctgtccatgccccgcccttccagctgaggaacagtggcgcctccacccaccctcctgcctcaccctgcggagagcaccgtggcggggcgacagcgcatgcaggaacgggggtctcc

SEQ ID NO: 28200 - DNA, 612 bp, Homo sapiens
  SIMILAR (1)..(438): 951254mologous to Homo sapiens Similar to mitogen-activated protein kinase kinase 1,accession number BC000471,Smith-Waterman Score=715.
  misc_feature (1)...(612): n = a,t,c or g
tccctggaccaggtgctgaaagaggccaagaggattcccgaggagatcctggggaaagtcagcatcgcggttctccggggcttggcgtacctccgagagaagcaccagatcatgcaccgagatgtgaagccctccaacatcctcgtgaactctagaggggagatcaagctgtgtgacttcggggtgagcggccagctcatcgactccatggccaactccttcgtgggcacgcgctcctacatggctccggagcggttgcagggcacacattactcggtgcagtcggacatctggagcatgggcctgtccctggtggagctggccgtcggaaggtaccccatccccccgcccgacgccaaagagctggaggccatctttggccggcccgtggtcgacggggaagaaggagagcctcacacgtggcgcctccacccaccctcctgcctcacncctgcggagagcaccgtggcggggcgacagcgcatgcaggaacgggggtctcctctcctgccagtcctggccggggtgcctctggggacgggcgacgctgctgtgtgtggtctcagaggtctgcttccttaggttacaaaaccaaaaccctcgttgccgaat

SEQ ID NO: 28201 - DNA, 1905 bp, Homo sapiens
  SIMILAR (202)..(813): 721254mologous to Homo sapiens transportin-SR,accession number AF145029,Smith-Waterman Score=729.
atgagcagaattgcctggaagctgctctggaagctcattcaaggttacctgggccagccagctggaactgcaagaaggcacccaggcattggtatttttaaaagtcccccaggtgatttcacctgcaatgggttgatagccgtgattaagaatcagagtgacaaccagagaggaatgagtcctggaagttggagtcctggaagggaaaacaatccaacacttgtggaagtcctagaaggagttgtccgcctcccggagaccgtacatacggctgtgcgatacaccagcattgaattggttggagagatgagtgaagtcgttgatcgaaatcctcagttccttgaccctgtgttgggctatttgatgaaaggcctgtgtgaaaagcccctggcttctgctgcagccaaagccattcataacatttgctctgtctgccgagatcacatggctcagcactttaatggactcctggagattgcccgctccctcgattccttcctgttgtctccagaagctgctgtgggcttgctaaaagggacagcacttgtcctagcccgattacctttggataagattaccgaatgtcttagtgaactatgttctgttcaggttatggcattgaaaaaggtatttgttggtgcaacttcccgtagagttgccaagctatttcgggaaggcttgaaggcacacgggaattcttttgaaacctcgggagaggcggagaggtgttgcacgtggaggccaaaagagatgacctgtgtagaaaaagcaggaacagatgagaaaatgcttatgaaggtttttcgctgtttgggaagttggtttaacttgggagttttggacagtaacttcatggctaacaataaattactagcactcctttttgaggttttgctctctgattcctatacttgccagcagcaatcacgaccgccagcaccaaaaggacagagggagtctgggtcagccctgctttatgcaaaacaaggtgatgcctttgttcttactggtgtctgtgtagcagaatccaatggcacctgtcttccacccaaagagaccatggagctatttgaagctatatattgttacatccagtcatcctacagtggtatagaacaggggtccccagcccctgagccatggtcgcataacaacggtctatggcctgttaggaaccgggccacacagcaggagtggcgtctgagtcagggtcctggaatctgcattttaacaagcacagctgattctggtgctagtgacaattgggcacaatttgagcagcacaggagcaaatggtcttttaggtcccttctggctctgatgtgtgtgattcagctcagtgtggccatatcgccctcttgcggtagaaagcgggactccgcctggctaggggaacagacgccaggggctgactgtaacaaagaccggaagctcttcttggatccaaggcaggttcatgcatgggagatctcagaccagttgttacagatccggcaggatgtggagtcatgctattttgctgcacagaccatgaaaatgaagattcagacctcattttatgagctccccacagactctcatgcctctttacgggactcattgctaacccatatccagaacttgaaagacttgtcacctgttattgtaacgcagctggctttagcaatagcagatcttgccctacagatgccttcctggaagggatgtgtgcaaacactggtggaaaaatacagcaatgatgtgacttctttgccttttttgctggagatccttacagtgttacctgaagaagtacatagtcgttccttacgaattggagctaatcggcgcacagaaattatagaagatttggccttctactctagtacagtagtatctctattggtgaatattcagttttcctag

SEQ ID NO: 28202 - DNA, 2022 bp, Homo sapiens
  SIMILAR (325)..(1443): 921254mologous to Homo sapiens Similar to mitogen-activated protein kinase kinase 1,accession number BC000471,Smith-Waterman Score=1757.
atgctactcctgctgcgtcactcagttctgcatggattaaatgaattaacacatttaaaatataagaagtttgaaaagctcttggactccggctgcagcgtcacctccctcgggcctcggcagcggcggcggctcgctcgcctcagccccagcgcccctcggctaccctcggaccaggcccgcagcgccgcccgccctcggccgccccgacgccggcctgggccgcggtcgcagccccgggctcgcgtaggcgccgaacgctcccggcccgcccactacgggcccaggctagaggcgccgccgccaccggcccgcggagcccggatgctggcccggaggaagccgatgctgccggcgctcaccatcaaccctaccatcgccgagggcccgtccccaaccagcgagggcgcctccgaggcaaacctggtggacctgcagaagaagctggaggagctggaacttgacgagcagcagaagcggctggaagcctttctcacccagaaagccaaggtcggcgaactcaaagacgatgacttcgaaaggacctcagagctggacgcgggcaacggcggggtggtcaccaaagtccagcacagaccctcgggcctcatcatggccaggaagctgatccaccttgagatcaagccggccatccggaaccagatcatccgcgagcaccaggtcctgcacgagtgcaactcaccgtacatcgtgggcttctacggggccttctactgtgacagggagatcagcatctgcatggagcacatggatggcggctccctggaccaggggctgaaagaggccaagaggattcccgaggacatcctggggaaagtcagcattgcggttctccggggcttggcgtacctccgagagaagcaccagatcatgcaccgaaatgtgaagccctccaacatcctcgtgaactctagaggggagatcaagctgtgtgacttcggggtgagcggccagctcatcgactccatggccaactccttcgtgggcacgcgctcctacatggctccggagcggttgcagggcacacattactcggtgcagtcggtcatctggagcatggacctgtccctggtggagctggccatcgaaaggtaccccatccccccgcccgacgccaaggagctggaggccatctttggccagcccgtggtcgacagggaagaaggagagcctcacagcatctcctcttggccagggtcccccgggcgccccaacagcggttacgggatggacagcctgcccgccatggccatcttcgaactgctggactatattgtgaaagagccgcctcctaagctgcccaacggtgtgttcacccccgagttccaggagtttgtcaataaatgcctcatcaaaaacccaacggagcgggcggacctaaagatgctcacaaaccacgccttcatcaagcggtccgagctcaggccctttgctgaaccgcttcgtcaacttccttgccctccttttcccatgaccgagggtcccatccagcacgtacccctgtccgcaaagtccgggatctgctcctccaaatctcccgcgtgctgtaccgcaatcatcaagaagctcacggccatgacgacctgcctcatccccaagaggtatctaattctttggattctccaaatactctatcagtgtgtcctctccccaggtgatgcctttgttcttactggtgtctgtgtagcagaatccaatggcacctgtcttccacccaaagagaccatggagctatttgaagctatatattgttacatccagtcatcctacagtggtatagaacaggggtccccagcccctgagccatggtcgcataacaacggtctatggcctgttaggaaccgggccacacagcaggagctcagtgtggccatatcgccctcttgcggtagaaagcgggactccgcctggctaggggaacagacgccaggggctgactgtaacaaagaccggaagctcttcttggatccaaggcaggtgcaaggagggaaaaaagaatga

SEQ ID NO: 28203 - DNA, 1755 bp, Homo sapiens
  SIMILAR (258)..(1439): 351254mologous to Homo sapiens Similar to mitogen-activated protein kinase kinase 1,accession number BC000471,Smith-Waterman Score=357.
  misc_feature (1)...(1755): n = a,t,c or g
ctcggcagcggtagcggctcgctcgcctcagccccagcgcccctcggctaccctcggcccaggcccgcagcgccgcccgccctcggccgccccgacgccggcctgggccgcggccgcagccccgggctcgcgtaggcgccgaccgctcccggcccgccccctatgggccccggctagaggcgccgccgccgccggccccgcggaagccccgatgctggcccggaggaagccggtgcgggcggcgctcaccatcaacccctaccatcgccgagggcccatccccctaccagcgagggcgcctccgaggcaaaccttggtgcacctgcagaagaagctggaggagctggaaacttgacgagcaggcagaagaagcggctggaagcctttctcacccagaaagcccaagggtcggcgaactcaaagacgatgacttcgaaaggatctcagagcctgggcgcgggcaacggctggggtggtcaccaaaagtccagcacaagacccttcgggcctcatcatgggccaggaagctgatccacccttgagattcaagccggcgcatccgggaaccagatcatcccgcgagtctgcaggtcctgcacgatggcacctggccgaccatgggggggcttttacggggccttctacagtgacggggaggatcagcatttgcatagaacacatggacggcggctcccttggaccaggtgctgaaagagggccaagaggattcccgaggagatccctggggaaagtcagccatcgcggnttctccgggggcttggcgtacctccgagagaagcaccagatcatgcacccgagatgtgaagccctccaaacatcctcgtgaaactctagaggggagatcaagctgtgtgacttcggggtgagcggccagctcatagactccatgggccaactccttcgtggggcacgcgctgctacatgggctccggagcggttgcaagggcacacattactcggtgcagtcggacatcttggagcatgggcctgtccctggtggagctggccgtcggaagggtaacccatccccccgcgcgacgccgaagagctggaggccatctttggccggcccgtggtcgacggggaagaaggagagcctcacagcatctcgcctcggccgaggccccccgggcgccccgtcagcggtcacgggatggatagccggcctgccatggccatctttgaactcctggactatattgtgaacgagccaccttcctaagctgcccaacggtgtgttcacccccgacttccaggaggtttgtcaataaatgcctcatcaagaaccccagcggagcgggcggacctgaagatgctcacaaaccacaccttcatcaagcggtccgaaggtggaagaagtggattttgccggctggttgtgtaaaacccctgcgggctgaaccaagcccggcacacctcacgcgcaccgccgtgtgacagtggccgggcttcccttggtcccgctgggtgacctgcccaccgtccttgtccatgccccgcccttccagctgaggacaggctggcgcccccacccacccctcctgcctcacccctgcggagagcaccgtggcggggcgacaactgcgcacgcaggaacgggggtctcctctcctgctggtccctgccggcgtgcctctggggacgggcgacgctgctgtgtgtggtctcagagcctctgcttccttaggttacaaaacaaaacagggagagaaaagcaaaaaaaaaaaaaaaaaa

SEQ ID NO: 28204 - DNA, 396 bp, Homo sapiens; identical to SEQ ID NO: 22141
  SIMILAR (157)..(345): 981254mologous to Homo sapiens ribosomal protein S10,accession number U14972,Smith-Waterman Score=331.

SEQ ID NO: 28205 - DNA, 427 bp, Homo sapiens
  SIMILAR (414)..(340): 921254mologous to Homo sapiens ribosomal protein S10,accession number U14972,Smith-Waterman Score=122.
  misc_feature (1)...(427): n = a,t,c or g
tgatgttcaatctgcgtggaaaacgcctatctgcaatggacgtgtcttctctcttcaggccnctaaacaacagaagtaaccaggaggcacagaggattccttgatgcctcaggaccatcncncaaatttttgataaaagaaattaaattgggtgttcccaggtttttcccaatcaggggtgtttaaaaccccggcccgggcaagaattttgggggcccctttaaaaaaacataattttgctgggcccgcgttccaaaaatgtgattttttaaagggggcccccnnnnnnnnnnnnnggctgtaagtttattcaatgcaaaagaatcctctccaattttactgaggtggatgaccacgtccacgaccaaatccgcctataaactggaattcggttgctgacccagccccagcctcgcccacgcgtccg

SEQ ID NO: 28206 - DNA, 367 bp, Homo sapiens
  SIMILAR (229)..(357): 691254mologous to Homo sapiens carcinoembryonic antigen,accession number M22433,Smith-Waterman Score=140.
atggagatacagcaagaaagcagcatctgcaagaaagccctcaccaggaccaaatcagctgacacctcaaccttggactacccagcttcccgaactgtgagtttctccatcaacttagctggcagctcctgtccccagcagcatcagaggccccatgaaaagagctccagcaggggctcagcctgcatgggtcccatgcggcagcctcagtgtcagagcctggatggcagtgatcaggagacgataaacttctatgcatgcctgctgatccataacgtgacccaaaatgacacaggattctacacccttgaagttataaagctaaatcttatgaatgaagaaataaccatacaattcagcttacgcc

SEQ ID NO: 28207 - DNA, 1506 bp, Homo sapiens; identical to SEQ ID NO: 6845
  SIMILAR (1177)..(1485): 921254mologous to Homo sapiens NAG13,accession number AF194537,Smith-Waterman Score=478.

SEQ ID NO: 28208 - DNA, 1830 bp, Homo sapiens
  SIMILAR (604)..(888): 731254mologous to Homo sapiens biliary glycoprotein,accession number D12502,Smith-Waterman Score=372.
atacagcaagaaagcagcatctgcaagaaagccctcaccaggaccaaatcagctgacacctcaaccttggactacccagcttcccgaactgtgagtttctccatcaacttagctggcagctcctgtccccagcagcatcagaggccccatgaaaagagctccagcaggggctcagcctgcatgggtcccatgcggcagcctcagtgtcagagcctggatggcaggggcttgaccaggtccaaatcctcaggacagaccccaggagatgtcaacatgaaaagggctgagcacatcctggcttcagagtctcagagagctgtgtcctacagggtccctgggcagctccccactccttgctctgccagccatggggaaggtggggtgaccacaggacaatcagccatgcagaggacagaggacacccaagatgaggctcagtgcagaagaaggaaaacagcacagctgacagctgtgttcagaaagtttctggatcccatgctcatctccacaaaggaggacaagcaggcagcagagaccatggtgatttcctcagctcctccctgcagatggcatgtttcctggcagaggctcctgctcacagcagagctgtccaagccctccgtcaccagcaacaactccaaccccatggaggacaaggatgctgtggccttaacttgtgaacctgagacccagggcacaacctacctgtggtgggtaaatggtcagagcctcccggccagttccaggctgcagctgtccaataacaacaggaccctcactgtactcaatgtcacaaggaattacacaggaccctataagtgtgaaatctggaatcgagtgagtgtcagtcacagttaccctgtcaccctggatgtcctctgtagcccaggctgccaacccaaattgacatggccagaatccaggcctctcagtccttctcaggtccaagaacagagactctcagccctggatatcaaagctgtccatgactgcctgccccaggcaaattttgagggacactgtggcctttctacagaccaggagtattcttggcttatcaatgaaaagctccagcaatacacacaagagctctttatccccaaaatcactgcaaagaatagcggggtctatgcttgttttgtccgtaactcagccactgacctcagaacatctgaagctttgaaacaagctcacactttttcccaaatgagaggaggacgccccttggatgaggaagaagcagctcagactctgctctctgctctgcttcaggctcacttggtgactggccctgccctgactccacctggtgtgagaacagggtggtggaaaaggtgcctgggtggcctgtcccgaatctggctaaatctagctgccagcagaagcaaagcctcccccaggttaggctgcagggaaatgggaagagagggagcctcagggcagactcctgagctgtgtcctggctctgaagtcactggctgtatgaggctgtgggcacagcacatgggacacagcacagaggacagcatccagtatctccgtgattatcttcatctgcccctggagattgtgcctgccaccctacgccacaaccgtccagagactggcaggcctccgcctaaaggtctggagggtgagccacctgcaagactcaaaagagaggaaaccgacagagatacctacagacggagtgctgtgccccctggtgccgacaagaaaaccgaggctggggccgggtcagcaaccaaattccagtttagaggcggatttggatgtggacgtggtcaaccacctcagaaaaattggagaggattattttgcattgaataa

SEQ ID NO: 28209 - DNA, 770 bp, Homo sapiens
  SIMILAR (441)..(355): 1001254mologous to Rattus norvegicus ribosomal protein S10 (AA 1-165),accession number X13549,Smith-Waterman Score=153.
  misc_feature (1)...(770): n = a,t,c or g
agagtcaagcctagtactcgtttgcacagttttcatgtgagtgtgtagctccccaggcgggtttttcctccaaatgcgcaaagtacaattaagaagtaaatagggttnacanannctgtttnaattcttgtcccaaggggattaaatgtgggtacccccgggttttccccctcccagcggttttaaaacggggccccgggatttatttttggggcccctataaaaaaatttttcgtcggccaccccggggggataaaagtgggctccttaaagggggccccccnnnnnnnnnnnnggctgtaagtttattcaatgcaaaagaatcctctccaattttactgaggtggctgaccaacgtccacgaccaaatccgcctctaaactggaattcggttgctgacccagccccagcctcggctttcttgtcggcaccaggtggcacacgcactccgtctgtaggtatctctgtcagcttcccctcttgtgagtctcgcaggtcgctcaccctccagacctttaggccgaggcctgccagtctctggacggctacggcgtagggtggcaggcacaatctccgggggcagatgaaggtaatcacggagatactggataccctcattggtaaggtaccagtagaaatgtctccaggcaaactgttcaaacacgtagcctcgggacttgagagactgcatggccttcatcacatgaaggcggacgcgtgggtcgagccggttcctacggacatcaactaggctttcaatcctttcttct

SEQ ID NO: 28210 - DNA, 400 bp, Homo sapiens; identical to SEQ ID NO: 212
  SIMILAR (5)..(55): 881254mologous to Homo sapiens peptidylprolyl isomerase,accession number X52851,Smith-Waterman Score=73.
  misc_feature (1)...(400): n = a,t,c or g

SEQ ID NO: 28211 - DNA, 945 bp, Homo sapiens
  SIMILAR (289)..(714): 511254mologous to Homo sapiens peptidylprolyl isomerase,accession number X52851,Smith-Waterman Score=253.
ggcacgagggacgccaccgccgaggaaaaccgtgtactattagccatggtcaaccccaccgtgttcttcgacattgccgtcgacggcgagcccttgggccgcgtctcctttgaggtaaggggcctggataccaagaagtgactgctcatctaatccataaagctatgttaacagattggaggtagtagcattttcattacaagtgactaaaagaacagctgtttacccctgatcgtgcagcagtgcttgctgttccttagaattttgccttctgtttgcagacaaggtcccaaagacagcagaaaattttcgtgctctgagcacctggagagaaaggatttgggttataaggggttccctgctttcacagaattattccagggtttatgtgtcagggtggtgacttcacacgccataatggcacctggtggcaagtccatcttatggggagaaatttgaagatgagaacttcatcctaaagcataccgggtcctgggcatcttgtccatggccaaatgctgggacccaacacaaaatggttcccagtttttcaatctggcacttgccaagactgagtggttgggatgggcaagccatgtgggtgttttggcaaagtgaaagaaaggcatgaatattgtggaggccatggagcgctttgggtccaggaatggcaagaccagcaagatgatcaccactgctgactgtggacaactccgaataaagtttgaccttgtgttttatcttaaccaccaagatcattccttctggaagccccagggagagcacccctccaacccatttgctcgcaggatcctaagaattttgtggctctcgcttgcagttcccttttgggttccatgttttccttgttccctcccatgcctagctggattgcagagttaagtttatgattattgaaataaaaactaaataacaaaaaaaaaa

SEQ ID NO: 28212 - DNA, 683 bp, Homo sapiens; identical to SEQ ID NO: 6646
  SIMILAR (414)..(623): 821254mologous to Homo sapiens cysteine-rich secretory protein-2/type I,accession number X95239,Smith-Waterman Score=297.

SEQ ID NO: 28213 - DNA, 193 bp, Homo sapiens
  SIMILAR (106)..(192): 1001254mologous to Homo sapiens cysteine-rich secretory protein-2/type I,accession number X95239,Smith-Waterman Score=178.
ggttataaaattatacaccatggccctcctaaagacactctaggaaaaccatgtcatcctgatcttaaaacacctgcaagaaagagcacagtacttcaccattatggtaataatatgaatagaaagaataccccgtaccaacaaggaacaccttgtgccggttgccctgatgactgtgacaaaggactatgca

SEQ ID NO: 28214 - DNA, 570 bp, Homo sapiens
  SIMILAR (1)..(378): 981254mologous to Homo sapiens dJ417L20.2 (phosphoglycerate kinase 2),accession number AL121974,Smith-Waterman Score=620.
atggtgggagtgaatctgccccataaagcatccggattcttgatgaagaaggaactagattactttgctaaagccttggaaaacccagtgagaccctttctggctatacttggtggagccaaagtggcagacaagatccaacttatcaaaaatatgctggacaaagtcaatgagatgattattggtggtggaatggcttataccttccttaaggtactcaacaacatggagattggtgcttccctgtttgatgaagagggagccaagatcgttaaagatatcatggccaaagcacaaaagaatggtgtaaggattacttttcctgttgattttgttactggggacaagtttgacgagaacgctcagggaaccaaagccctcatggatgaaattgtgaaagccacttccaagggctgcatcactgttatagggggtggagacactgctacttgctgtgccaaatggaacactgaagataaagtcagccatgtcagcactggaggcggtgccagtctagagcttctggaaggtaaaatccttcctggagtagaggccctcagcaacatgtag

SEQ ID NO: 28215 - DNA, 1386 bp, Homo sapiens; identical to SEQ ID NO: 6647
  SIMILAR (241)..(969): 1001254mologous to Homo sapiens cysteine-rich secretory protein-2/type I,accession number X95239,Smith-Waterman Score=1346.

SEQ ID NO: 28216 - DNA, 2258 bp, Homo sapiens
  SIMILAR (1005)..(2255): 1001254mologous to Homo sapiens dJ417L20.2 (phosphoglycerate kinase 2),accession number AL121974,Smith-Waterman Score=2144.
tggaccagcgtggtggaattccgcggagagaggggcgcgccgcagctcctcaacgccgcaacgcgccggcccaactgcaggaagggttataaaattatacaccatggccctcctaaagacactctaggaaaaccatgtcatcctgatcttaaaacacctgcaagaaagagcacagtacttcaccattatttccagcaatggctttactaccggtgttgtttctggttactgtgctgcttccatctttacctgcagaaggaaaggatcccgcttttactgctttgttaaccacccagttgcaagtgcaaagggagattgtaaataaacacaatgaactaaggaaagcagtctctccacctgccagtaacatgctaaagatgggactggcaccaaagttggaaacggaccatttgggaatgcaagaattcaaaaaccttaggctcccatgggcctcccataggttttggtggttgctaaaaggagctccatataattccctgtctcacatcggaatctccaaaactagaaggccaaggaggagcaagggcatatcttatatggtggcaggcaagagagcatgtgcagacactcaatgtgagctcgtgaaagcggctgggagaggggatgtaccctgcaaagtcacaggggcagagctgcccaaggccatggaagcccacctcttgaatcagcatgacctggatgtgagacatggagtcaaaggaaatcattttgaaactttaagggttaatgactgcccatttgtatttcaagagaaggttgttcaatttctacgtagttgtgtggttttcaatacaggaacctacaaacctgagagggcctttaggggtttattaacagccagccaaaagcaggtagctcagtcctataattgcaaggaactgaatcctgccaaaagcctaaatgagcttagagaaagtttgagagaatacaggtttttgatgtccttggatgaatatctagaaataggattgatgacttgtatgatgtctctttctaagaagttgactttagacaaactggatgttagagggaagcgagtcatcatgagagtagacttcaatgttcccatgaagaagaaccagattacaaacaaccagaggatcaaggcttccatcccaagcatcaagtactgcctggacaatggagccaaggcagtagttcttatgagtcatctaggtcggcctgatggtgttcccatgcctgacaaatattccttagcacctgttgctgttgagctcaaatccttgctgggcaaggatgttctgttcctgaaggactgtgtaggcgcagaagtggagaaagcctgtgccaacccagctcctggttcagtcatcctgctggagaacctgcgctttcatgtggaggaagaagggaagggccaagatccctctggaaagaagattaaagctgagccagataaaatagaagccttccgagcatcactttccaagctaggggacgtctatgtcaatgatgcttttggcactgcacaccgcgctcatagttccatggtgggagtgaatctgccccataaagcatccggattcttgatgaagaaggaactagattactttgctaaagccttggaaaacccagtgagaccctttctggctatacttggtggagccaaagtggcagacaagatccaacttatcaaaaatatgctggacaaagtcaatgagatgattattggtggtggaatggcttataccttccttaaggtactcaacaacatggagattggtgcttccctgtttgatgaagagggagccaagatcgttaaagatatcatggccaaagcacaaaagaatggtgtaaggattacttttcctgttgattttgttactggggacaagtttgacgagaacgctcaggttggaaaagccactgtagcatctggcatatctcctggctggatgggtttggactgtggtcctgagagcaacaagaatcatgctcaagttgtggctcaagcaaggctaattgtttggaatgggccgttaggagtatttgaatgggatgcctttgctaagggaaccaaagccctcatggatgaaattgtgaaagccacttccaagggctgcatcactgttatagggggtggagacactgctacttgctgtgccaaatggaacactgaagataaagtcagccatgtcagcactggaggcggtgccagtctagagcttctggaaggtaaaatccttcctggagtagaggccctcagcaacatgtag

SEQ ID NO: 28217 - DNA, 570 bp, Homo sapiens
  SIMILAR (324)..(100): 681254mologous to Homo sapiens dJ185D5.1 (novel gene),accession number AL118498,Smith-Waterman Score=216.
tttttttttttttttttaacccccaaattataggattttattagccttgaaacaggccctgtggctgtcgtcccgctgggcacacagcaggggtgtctactggaggaatgcccggaggaagtcgttgtaggagatttttgaagacagcgtcttatcgtaatactccagaatatggaagaactcttcctcagagaggttgatgctgtactgtctcaggaccgtcctgaaatctgcgacgcttagcagccctgttccagcctcatcatagcttttgaacgtgcgccgcattggccctccagcagtgcacaattttgggctgaatacgcagcagagcagagtaaaaagatggcgtctccgcgccggcttctttcatcttgtgtgcattctggatcttcatcctgtgcatcagtgagctttcctttgcttttagcaggaggacacagctctgaatgaagtcacagtatgcaaatttcccgttgctctttaagtcgtattttataatgagctgctgacactcctctttgcttatgtccaggttgaatttctccacaagagccaggaaatcggagg

SEQ ID NO: 28218 - DNA, 1446 bp, Homo sapiens
  SIMILAR (651)..(1361): 1001254mologous to Homo sapiens dJ185D5.1 (novel gene),accession number AL118498,Smith-Waterman Score=1257.
ctccgagtccagctcaaacaggagggtgcaagcctaccgggtcctcccctacggggctcgtcctctcctgctccatgagagggcctcaggaggaggggtcagaacagcgttctgcaccttccattgccctcaccttgaagcatccttcccctgggtctgaccagtctgaccatagtcttcctgaggcctccgccgagcgaaggccaaatgggcgttttatttttttaattttcttcttcaccagtcactttgacagactctggaacgagatgccagtcaatgccaaggggaggctgaaatacccggacttcctgagcaggttcagttccgagacagcagccacaccaatggccactggtgactcggccgtggcccagagagggagcagtgtccctgacgtctcggaaggcaccagatctgccctctcattgcccactcaggagctgagaccagggtcaaagtcgcagagccacccctgtactccagcgagcaccaccgtgatcccgggcactccacccttgcagaactgtgatcccatagagagcaggctccggaagagaatccagggctgctggcgccagctcctgaaagaatgcaaggagaaggacgtggccagacagggggacatcaacgcctccgatttcctggctcttgtggagaaattcaacctggacataagcaaagaggagtgtcagcagctcattataaaatacgacttaaagagcaacgggaaatttgcatactgtgacttcattcagagctgtgtcctcctgctaaaagcaaaggaaagctcactgatgcacaggatgaagatccagaatgcacacaagatgaaagaagccggcgcggagacgccatctttttactctgctctgctgcgtattcagcccaaaattgtgcactgctggaggccaatgcggcgcacgttcaaaagctatgatgaggctggaacagggctgctaagcgtcgcagatttcaggacggtgagcacagctctgcgcccagtgcctctgcagggagcagctgccaaatgccagcggccagaaacttcccacggggagccctctacctgctgccgaaggcccggtgtgacctggctgcttcagatctcacttccctgggacccccaagttatccagtcctgggtccactcgcctcaccttcagaccccgggttctccttcccaaaggttgctggagccctgcgtggatgccccatacctgcatcgccagctcctcagggtcctgagacagtacagcatcaacctctctgaggaagagttcttccatattctggagtattacgataagacgctgtcttcaaaaatctcctacaacgacttcctccgggcattcctccagtagacacccctgctgtgtgcccagcgggacgacagccacagggcctgtttcaaggctaataaaatcctataatttggaaaaaaaa

SEQ ID NO: 28219 - DNA, 999 bp, Homo sapiens
  SIMILAR (486)..(686): 471254mologous to Arabidopsis thaliana putative protein,accession number AL162506,Smith-Waterman Score=147.
atggggaaaaccaccccaatgattcaattacctcccaccaggtccctcccgcaacatatggggattgtggagattacaattcaagatgagattttggatggcgacaccgccaaaccgtatcattggtttttctatataaaccagtgtatagagaagccctttaaagagaatagaatggtggtgtcattactcatacctgcactcttggctgacccgaggataattagcatgaccaacaaagaaaattcatccagtgtgactgtatcagaccctgagatggaaaataaggcaggccagactctggagaacagctcattaatggccgagctcctgagcgatgtgccgttcaccctggccccgcatgtgctggcagtacagggcaccatcactgaccttcccgaccacttactctcctatgatggcagcgaaaacttatcacggttttgcctggttgacagagtgagaccctgccaaaaaaaaagaaagggagaaggagaaggaagcaataagaggaagaagaagaaggaggaggaggaggagaaggaggaagaagaaagaagaagaaagaagaggaagaagaagaaaggaagaaggaagaaggagaaggaggagaaggagaaaaagaggaagaggaagaagaagaagaggaagaagaagaagaaaagaagaagcagcaataaaaggaaaccaatcttcttttggaggggaaaagtgcccaagaatctcataattttacttctcattagcgaaagctcactgcatgctaaaagcagcaatggcagacaagacactctgtactcgaaaccaattatatccgaaataaaacattctggtttgctgctggacttcctggaagtgggtaaaaccatctggcaggaagtggtgacagacaagactggggagaaaagcagggaccagatcacaaagggcctgatgttccatactaaaggaacttgtaccttgttctccaggcagcggcaagctgttgaaaggttttaa

SEQ ID NO: 28220 - DNA, 782 bp, Homo sapiens
  SIMILAR (119)..(63): 941254mologous to Homo sapiens super cysteine rich protein; SCRP,accession number U63332,Smith-Waterman Score=165.
  misc_feature (1)...(782): n = a,t,c or g
gccgacctttggttttgcagctccggtgctggtgcggcgggggactgcggggccagcctcaggtagcagcagcagcagcagcagcagcagcagcagcagcagcagcagcagcagcagcagctgcttcattgtttcacttcttcagaaagcctccggattctaaaaagccctcagtaccagagacagaagcagatggattcgtccttttaggagatacaacagatgagcaaagaatgacagcaagaggcaaaacttcggacatagaggccaaccaacctttgggagaccattctaagaaacttcatccagtgtgactgtatcagaccctggagatggaaaataagggaggccagactctggganaacagctcattaatggccgaagctcctggaacgatgtgccggttcaccctggccccgcatgttgctggcagtacagggcaccatcactgaccttcccgaccacttactctcctatgatggcagcgaaaacttatcacggttttggtatgatttcactcttgaaaattcagtgctctgtgattcataacctttatgtctgtttgcaccttaacagctttaaaatatgttcgcctattttatctaacctgtttgatgttctttgccgtttcactgtttaaggtcctcagcaaggatcataaagcaaagaaaatagcattatgttcactactctatttttaagaaaaaaggtacatttggtatacaaattggaacttaagttccacttcctttctcccatataataaatatacaaattaggc

SEQ ID NO: 28221 - DNA, 1068 bp, Homo sapiens
  SIMILAR (486)..(686): 471254mologous to Arabidopsis thaliana putative protein,accession number AL162506,Smith-Waterman Score=147.
atggggaaaaccaccccaatgattcaattacctcccaccaggtccctcccgcaacatatggggattgtggagattacaattcaagatgagattttggatggcgacaccgccaaaccgtatcattggtttttctatataaaccagtgtatagagaagccctttaaagagaatagaatggtggtgtcattactcatacctgcactcttggctgacccgaggataattagcatgaccaacaaagaaaattcatccagtgtgactgtatcagaccctgagatggaaaataaggcaggccagactctggagaacagctcattaatggccgagctcctgagcgatgtgccgttcaccctggccccgcatgtgctggcagtacagggcaccatcactgaccttcccgaccacttactctcctatgatggcagcgaaaacttatcacggttttgcctggttgacagagtgagaccctgccaaaaaaaaagaaagggagaaggagaaggaagcaataagaggaagaagaagaaggaggaggaggaggagaaggaggaagaagaaagaagaagaaagaagaggaagaagaagaaaggaagaaggaagaaggagaaggaggagaaggagaaaaagaggaagaggaagaagaagaagaggaagaagaagaagaaaagaagaagcagcaataaaaggaaaccaatcttcttttggaggggaaaagtgcccaagaatctcataattttacttctcattagcgaaagctcactgcatgctaaaagatgtagaagaaatgaagatgatttagagaatggaatgatcccgatgaagaatagcactttcacttacagcagcaatggcagacaagacactctgtactcgaaaccaattatatccgaaataaaacattctggtttgctgctggacttcctggaagtgggtaaaaccatctggcaggaagtggtgacagacaagactggggagaaaagcagggaccagatcacaaagggcctgatgttccatactaaaggaacttgtaccttgttctccaggcagcggcaagctgttgaaaggttttaa

SEQ ID NO: 28222 - DNA, 1206 bp, Homo sapiens
  SIMILAR (1206)..(925): 961254mologous to Leishmania major probable levansucrase precursor,accession number AL160371,Smith-Waterman Score=478.
ttactgtgtctgtgtcacgtgtgcgttcagcagtgcctgctcctttatggtctgctgtaaccgccactggaggaccgcttctctgcagctcgaggactggagggtgaagaagtgagaagtttcaatctggggatcccgggcagtgcccattaattgcgttgcgctcactgcccgctttccagtcgggaaacctgtcgtgccagctgcattaatgaatcggccaacgcgcgggggagaggcggtttgcgtattgggcgccagggtggtttttcttttcaccagtgagacgggcaacagctgattgcccttcaccgcctggccctgagagagttgcagcaagcggtccacgctggtttgccccagcaggcgaaaatcctgtttgatggtggttccgaaatcggcaaaatccattaattgcgttgcgctcactgcccgctttccagtcgggaaacctgtcgtgccagctgcattaatgaatcgggccaacgcgcggggagaggcggtttgcgtattgggcgccagggtggtttttcttttcaccagtgagacgggcaacagctgattgcccttcaccgcctggccctgagagagttgcagcaagcggtccacgctggtttgccccagcaagcaaaaatcctgtttgatggtggttccgaaatcaggaaaatcccatgcagcgaagttgttggtggcagctgtgatcatcatggcaaactggggttcctcatagggagcattggaaagagcaggagaaggatgggcaaaggcaacttcataatctcttttggagcctaatcttaaaagggaaggtattacttttggctgaatcaaattgttgttcttagtatcttctagacgttccagaactgatgtcagatttgggtcttcagaatccacaaaccatatcggtgaagaagatggataggattccaccggccagctgtcccacacatcaagtccttttgcagactcaatatttttaatcgttgattgatcgaattgaggcacttggtatttttcgttttgctgctgtttagggatctgcagcatatcatggcgtgtaatatgagagacgccgtacgtttctttgtatgctttttggttattttctttcgcgaaggcttgagtcgctcctcctgccagaagtgcagtcgtaaaagtcagaactgtggcttgttttacaatttttttgatgttcatgttcat

SEQ ID NO: 28223 - DNA, 506 bp, Homo sapiens
  SIMILAR (3)..(215): 1001254mologous to Homo sapiens SLP-1,accession number AL109664,Smith-Waterman Score=357.
cagacaccgtggagatggtgagtgaagttgagccacctgcccctcaagttggtgccaggtccagtccgaagcagcctctggcggaggggctactgactgctctacagcccttcctgtctgaggccctggtcagccaagtcggggcctgctaccagttcaatgtcgtcctgcccagcggcacccaaagcgcctacttcctggacctcactacaggtacccttggagggactgagatcctggggatgcctggagcctggctgcatggcctggccgccctgatgccctcgtgctctccatggcaggccagcaaggctgaggagaatgtctccgacagcttcatgcactccatggacccacagctggagcagcaaatggagaccactcagagcctggtggactcctatgtgaccattgtcaacaagaccgtgtgggacctcatggttggtctcacgcccaagaccatcatgcacctcatgatcaacaacatccaggagataatcaactaa

SEQ ID NO: 28224 - DNA, 1519 bp, Homo sapiens
  SIMILAR (376)..(558): 751254mologous to Mus musculus dynamin,accession number L29457,Smith-Waterman Score=216.
atggatacagggcttatggcaggtctggggttggcagtgctgctgtgggagcctgtaggagggctcgtctttggaatcccccaggaggactggaattcaaaacaagtgtcccctgccctgtggctgggggacatcctctacttccaagcccagacatacaccagctgccacaagcccctgaggctctttagaggaccaatggacagccacacccacaatgggccagcctgctgggccacctgcaccctggtgattccagcctcgttcctccatgggccaaatatcctaaacaaaggcctggacagggggtctttatctgactgcccagaaaacacacgcagaaaggctctgcatgccctctgtggcctgccaggggccagcaaggccgaggagaatggctccgacagcttcatgcactccatggacccacagctggtgtggcaaatggagaccactcagagcctggtggactcctatgtggccattgtcaacaagaccgtgtgggacctcatggttggtctcacgcccaagaccaccatgcacctcatgatcaacaacatgcatgcaccacctcatgggggcaggggctcctgtagcactggggacacaggtggctgtgttggcctggcagagatgacaaccagccctaccaaggagttcatcttctcagagctgctggccaaactgtactcatgtggagacgagaacatgctgatggaggattccacggagcaggcaaaatggtgcaacgagacgctgtgcatgcaccatgtgctgagggaggcgcccaacatcatcggcgacatcaaaacaaccatggaatcctatccatcttcttcaccgatatggtttgtggattctgaagacccaaatctgacatcagttctggaacgtctagaagatactaagaacaacaatttgcttcgtcagcaattgaagtggttgatatgtgaactctgcagtttatataaccttcctaagcacctggatgttgagatgctagatcaaccactacccacgggtcagaatgggacaacagaagaagtgacttcagaagaagaggaagaagaagaagagatggctgaagtaggaacatggatggagctggaggccattatccttagcaatactaacgcaggaacagaaaaccaaatactgcatgttctcacttataagtgggagcaaaatgatgagaatcaatgagcacaaagaggggaacaacagacactggagcctacttgagggtggagggtgggaggaaggggagaatcagaaaaaataactattggcttagtacctgggtgatgaaataatctgtacatcaaacctctgtgacacgagtttacctatattacaaacctgcacatgtatacctgagcctaagataaaagttttaaaaacaacgagtcccttaataaaatctctaattttctagatccgaagatgcactttcttcctttttcacgtattaatagtaaatgcaaggtggggtcttgaagtgaataaaaacaagtcctct

SEQ ID NO: 28225 - DNA, 5160 bp, Homo sapiens
  SIMILAR (4857)..(1609): 991254mologous to Homo sapiens Human RSC ligase protein,accession number Y25169,Smith-Waterman Score=5578.
gggaaaaaaaatatttaatgtaaatgtttagccattagaacatacaaataaataaataagctcagaatagctgagaaaaaaaccacaaataagtgaattgtcaatttctcctcagtctcagatatgctatttccaaaatactaataaaatatacaaattaactaataagatatagaacattcaacataaaacctaaaataaaaaagaccaaccctaattattttatttctgtatatcaagactacaaatagcatttaaacgcttattattcaaattaagaaattatacattttgttttgataatgttcattgtcttaaaagtgtcattcagctttcccactttaaaagtatattgctaattatggtcaattaactatgacagcccacagagcctccagtgacagtaaaatactagacatagaagagataaatgaggatttagatcccctccccccagcatcagcaaagggtcactctgctcccacagctgacgctttgaaacgctttctgtttgtagagactaaaatcacccagcaacaggtcaggtcctgataaagtgcctactgcaagaactaccgacactcctcttccctggatgtgcaccagggactgtcccgtcttcgagtcagagcagcaccaggaagcagagggtgccaagcatggcgagtcacccccaaatatccaggaagacaagtgggcgcagcccaggggaaaggagggcgagcggatgatgggagaccggcacggctagcatcgggacaaagatgcagccgccactttggttcaaacaactttaatgacaccacagtgtctgtcctcccccaagtaactgggtatagtgggtgacagatgttgcagtagcttggcagaccctcctcctccacctcccctgaaagctctccaggcacaaagtggagatagaaataggacaatgaatgaagtccccacctcacatccacagacagtatctccaaaccatcatgaggcaggccacggtatactgaaaacaagcatgctagtcccatttggggaaatggcttaaaaagcacaaataaaatattaccatcatcatctcttttccaaacctaaccactttgggaaaggcagcagaaaaaaaaaatgccttcagttttaataatgaggcttgtaaacaatccaaccacataagcagcagcggccccatggcgtctcagccctcagaccctgtatctctgccgcctgtgcagccctgtctgaaccctggagtggcgctgcctgctcaggagggctctgatctcaccagcaaagccaaagcttcatctttggttaatttcactgagatgccactagtgtaaaaactgtgctcttcttggcaatattactaaagtagccacatggcacataacgtgttattttaagttatttgaaaagcaatgtccatctaaataagtgaccacaccgtaataaaaatcatttaaaaaaggaagggagggaggaatggcagaatgaaagaaggagcttaggagagcctcaggcgtgcagtgtgagtatcctcgtgggtctggggaggcgctgctgacgaaggaagcactggttctctgtaggggtctgaccccagcatcagcttcagctcagctcaaagccagcggcacattcaatcgcatagagaagtttacttcgcaaaagtgtctcgtcatagaactcggggagcttcagcaggttcatgcaggtgctggctgtggggagccgctcaaggtcggagcctccgttgtgaatacaaaatgcgggatacaactccttaaaccccaagagagggggtcgagagcagcttgttacaaacttcagcagtttgcgcttttcttcatcagtgaacccttccacaactctccagaagaccttaataacaggatggtctgcagaatagcctcctgaatagtttgtaaaggattttaggtcctctaggcttatgggaacttgtgcaccagaaattaatacctgaatttcttgctgatcaaacattcggagccactcgaggctgacgacattggcaaggccctggcggaaagccaggcagtgctggcggatctgcctgttcagcctgtagtctgccaccaagtggatgtacgcaatccggttggcgctggtgacagggatgtctttcccaccgaattttagttcaactacctgcgcctctcccaggtcattgttcaccacagtgaagttcagcccaagctcctccacatcgtcttcgtagctcttcagaaagagcaaattcttatacacctcagggtctagggaggcgaggtggtgaatgtccacgtcggcactggttccaagcaacttggaaagaaagaagcctgcaaagggcagctccaccagcatgttctcatagagagcctttccaagcattctggctaggaagtagtaatgtctggcaaaagaatctcccacaagcatctgagcagccgggttggggtacagaagcccttcattagtagtcttaaagaacccctggttggggttaaatcctgacttcagtagttcatttaaaaactctctgaaaataccaccaccatcaatgccagcttcatccaggccatgggcattgagcaagtgcacacggatccgctttttcaaatcaggctcattttctggagaaagtttgtcataagcatcttcataaatgtaatttcttcttattgtgacattaattccatccagaaatggaccatctccttgaacttcttgcttatctgcataaatcaacctctgaaagatctttactcgttcctcaaatggaaccacaaaaggcaactctgtcaggacagcaagctgtctttcctcagacacagacagcggcggggactccaaacccacgtccagggtggactgcagcgggcctatcctccccatccgccggaacctccacacatgtctggatgctggcacatagagctgagtgaccttatctgctttaatatcttcttgttctgacagccagtggtttggaggacaaaaatttctcctcgtgtctctggacttcaacattttcactagattggtgataaccttaaataactgaatccatcttttctgttccatctgtatgcattgttgcatttcagagctagtagtaactccaatactctgaaatgctgtaatatattcttctcgaacttctggcttggtttctggataagccaacttgatgatccccaggcatgcatctcgaaggcatcgagacaacattatcagctcttctaaagtaaaaggcatcattgatgattgtctttgacctacaacttctatgggatcaccgaagaattcgttatcatgtatggaaattagtgaatgactaaacaaggagctaaaaaggtaaaagagtgggatgattcgactagaatcttcaaaagacataggagaacccctggatatcacctgaagcaacggtaccatagaccctgtgatcatccgtgttgacatggaagatattagaaaccaaagatgtctcagaaacctggcattaaaggctaaactgtagagaagcctgactttgggtaccatcatgcggtgctgcaccatcagcgtgtggcagacggaggccatggtggtgaagacctcctcgctcgcagagtccctccacaccaggttgagcagggtgttggtctgctgctttgtgtccagcttcttcaggcattcctctgttatgtatgatactgacagtctgccatcctccgggcttgagggcttgtcggcttcttcactctcctcctcagagtcactggctgagtcgtgacagctcgcgctggcaggagagactggtaactgagagaggaaggtctgcagcacccgcaaatacaccagcagcccttcctcagagagggcccccaaataattttcgccaacagttaaaacgaaatagaaaagccagggtgctccaccactctttcttgaacatctactctctattaacaacagtgcattcagaaagggctcgtaagggaaaacggtctgcgcatctgcaagcgccggaatgatgaaatgaaaaatctgatctgtaaaaggtgctgccagaaactcctctgtgaaggctgtaaaaacttgttgcctcgcaccttccggacaggagttgtaagtaaagtgcaatggttttagaacattctctagcaaaatttttgctataggaactcgagataaatcagaatattcaatacttgatggaagcttgctgttaatcaacaaatatagagacctataatacccattgtgaatcatgtagtgcaaaatttgttcaatcactgacaccacatagctagcatcttgtaaaacaggcaagtaagtattctcagacgaaaatacttcaagcattctcattggaagtgcaacattcaaactgtcatcattacagttttgcagcaacctgcaacagaggctcatcaatctttttatctgaaataagcatgtaagtctctcagatccatccaactgcttgacaaacagagagctgtgtttaattaagttctgatacagccatatcaaacgttttgagtcttcattttgtttgtaaaaaaacagaagctgccttaccaaaagggtaaggttggggccattagcaatgggaaaagcgcccccggactgtgacaaggtagcacagcgatcaaatgcacttctttggatggaatattgctgttttctgtctctatagcctcgaataaatgactggataattattgcatttttcaaccttcgcctttcttcctctctctttcttctttcttcctgagtacgatgtaaaagagaagccttttcctccttcctgctcgcgccgccaagggacaccttgggccgcgtcttgaagtcgccttcgaagctgaacatcctggcagcctagcccatgtgcgggcagcgccgccgcggaagcagccgggcgggcggggcacggggcgggctgggaggctctcggcgcccgcccgcccggcccggggcagcgaggacgcggcggccgggaggcgacccgagcccgcccccgggctgtaccctcccagccctgccctggggcgggaggggcggcaatactggaggggcggccctgcctcgcctgcccctcatccacgccggccacagctcgggccgctgcaggggcgcccagcgggcagcaaacccggcgcttgcacctggaac

SEQ ID NO: 28226 - DNA, 801 bp, Homo sapiens
  SIMILAR (643)..(798): 551254mologous to Mus musculus open reading frame 2,accession number M29622,Smith-Waterman Score=132.
gaagaaaggcgaaggttgaaaaatgcaataattatccagtcatttattcgaggctatagagacagaaaacagcaaggccacctcaaggtctgcccagcagatagggagactcggatccttcgttgccacttcccgtgtgcacagacacctctgggactccagggcagcattgccgcgtgtctgaacacccgccgacaggatccagccagaagccagcggtctgcggagctgcagggtcagccagctggggccccagcagagcaggggaagcctaaacagcacatgctccaggtggatcagcccgccctgtcgaagggcagcttccctagcagcgacccttgtgctgggggcgatgcctgcacgttttcgcggtgtgctgttgaagaagccttgcgggagaaggcacggaacaggcaggaccagggcttggcctttaccatgccccagacactcttccagatgccgaggacaacagcagagaacaacacagatctgattcttggtctcatggagcacacactgtcccaccgagggatctctatcaccatggccctgcaagcccaggctctgctctttcaggccctcatcgcgatggccgcggctttccacagggaaacctgctgtcctcatctagaatccacaaggacagaggaggggggaccacttcccaactcattttacaagtctactattttgctgacatcaaagccagataacgacacagccagaagagaaaatgacagaccaatatccctgataaacatggatggaaaaatccgcaacaaaacaccagcaaactga

SEQ ID NO: 28227 - DNA, 4557 bp, Homo sapiens
  SIMILAR (767)..(3064): 1001254mologous to Homo sapiens hSIM1,accession number U70212,Smith-Waterman Score=4081.
atggtttcagagaaacgagaaagagaaaataactccccaaaccggcctcgcgcacgccgtcggccagcgactgccagcgggatgggcctttgggcgaaccctgcctcctccgccggtagacctaacccgcaggcccgacctccgctgcctccggacgttcccggttctgctgggccgccgcgctggactgagcgctcaaccacccgaccccagggagctcgaggagcgcgggtcgcgcacgacgtcgggaaggcccaggaggccgcgagcagcggcggcaaccggacagcgccgacccggcaccctgagctcattaggagtccagcggtcccgcgggtagggctcggagataccttaaatgccgcgagactgaagagcaaacgtcagggattattatgtcgattttccgaggaccagggttcgcagctggcagtagaaaaaaaggctggctcctcaggggtcccactggcatttgataccctgaacgaccctcaggattgcccaaattcggtggatcgcccaaattcggtggatcagcaactttcctatactgcatcccgaattttcaaagaacatattttccgttcacccccgctggtcttttactgccatcaatacactgttcttggtgcaaatacttcagcctctttattcaaagtatgttttatgaaggctcccgctggagtcctctaattgaaagtttatttttggttttggatgaatctgcggagcttaagttgtgagaagaaagggggaacaagacacaatgaaagaaaagtccaaaaatgctgcgcggactaggagggagaaggaaaacagcgaattttatgaactggctaaattactgcctttggcctcggctatcacctcgcaggtggacaaagcatccataatcagactcacgaccagctatctcaaaatgagagtggtgttcccagaagggctcggcgaggcgtggggccactcaagtcggaccagccccctggacaacgttggccgagaactgggctcccatctgctccagaccctggatggcttcatcttcgtggtagccccagatgggaagatcatgtacatctcagagacagcctcagtccacttgggtctttctcaggtagagctgaccggaaacagcatttatgaatacattcacccggcagaccacgacgagatgacggcggtgctcaccgcccatcaaccctaccactctcacttcgtgcaggagtatgagatcgagcgctccttcttcctgaggatgaagtgcgtcttggccaagcgtaacgccggcctcacctgtggcggctacaaggtcatccactgcagcggctacttgaagatccgccagtacagcctggacatgtcccccttcgacggctgctaccaaaacgtgggcctggtggccgtgggccactcgctgcctcccagcgccgtcacggagatcaagctacacagcaatatgtttatgttccgcgccagcctggacatgaagctcatctttctggactccagggtggcggagctgacggggtacgaacctcaggacctgattgagaagactctgtaccaccatgtgcacggctgcgacaccttccacctgcgctgcgcgcaccatttgctgctggtgaagggacaggtgaccaccaagtactacaggttcctggcgaaacacggcggctgggtatgggtgcaaagctacgcgaccatcgtgcacaacagtcgctcctccaggccacactgtatcgtcagcgtcaactatgtcctcacagacacagaatacaaagggctgcagctctccctggatcagatctcagcctccaaaccagccttctcctataccagcagctccacccccaccatgactgacaacagaaagggggccaaatcccggctctccagctcaaagtcaaaatccaggacttccccataccctcagtattcgggatttcacacagaaagatcggaatctgatcatgacagccagtggggcggaagtcccttgaccgacacggcctctccgcagcttctggaccccgccgataggcctggctcccagcacgacgcatcgtgcgcctacagacagttttcggaccgcagctctctctgctatggctttgcgcttgaccactcgaggctggtggaagagaggcatttccatacccaggcctgtgaaggaggccgatgtgaggcaggcaggtacttcctgggaacgccgcaggccgggagggagccctggtggggctctcgcgcagccttgcccctgacaaaggcctccccagaaagcagagaagcctatgaaaacagcatgcctcacatcgcttcagtccacaggatccatgggcgaggtcattgggatgaagatagtgtggtcagttctccagaccctgggtcggccagtgaatcaggtgaccgatatcgtactgagcagtatcaaagtagcccacatgaacccagcaaaattgaaactcttataagagccactcagcaaatgattaaagaagaagagaacagattacagctaaggaaagccccctcagaccaactggcttccattaatggggctgggaaaaaacactccctgtgttttgcaaactaccaacagcccccaccaacaggtgaagtctgccatggctctgctcttgccaacacttcaccatgtgaccatatccagcagagagagggaaaaatgttgagcccccatgaaaatgactatgacaacagtcccaccgcactatctcggataagtagtcccaattcggatcgcatttcaaaatccagtttgatcctagctaaagactatctgcattcggatatatctcctcatcagacagcaggagaccaccctactgtctctccaaactgctttggctctcaccggcagtattttgacaagcatgcttacacattaactggatatgccctggagcacttatatgacagcgaaaccattagaaactattccttgggctgtaatggctcacactttgatgtaacttcccatctgaggatgcaaccagacccagcacaaggacacaagggaacatctgttataataaccaacggaagctgatgttttgctgaaatattttgttctttaaggatctctgaaacatatttatagtttaataccccattaccagcatttactatgccacagattgttagagagtataacttaagttactgggtatttgatacgtgttcctataaaatcaaagaaaacatagcactagcattcagggttatacacagaaaagggagctaaattgaatacacaaatttcccctctaattatatgggaaccagaatagataaattttgacttgaaaaatattcatgtagatcaagtgtgcatatatactacatgagaggactgatgaatgacaacattgcattgtgactatccagtgatcctcaaacacacaaactattacttacaaactgcggtatacattttacatatggaaatataggctatgtaatgtaaatacatcaaaaatgggtaattttctttgactctgtcacactaaacttcttaacgaaatttccattcccaaaataactgagaaagagagagatacatcttataaactgacttctttgtggtttcaaatcagccagctcatttggttcaggcataaattagagaaatggttctggatatggtgcaaaaatgagttttcacctggtatccattataaacaatcaggaagaggtaatttttcaccttgcttttcagttagacaaggaccaggattgcactgacatggcgctgagggtttttctaagtaagaacactgagatattgggacacacatcaaaaacctggagtgctcaattggaagtagttctatgaatatggaaaggccagaggcagagtgaaataaaatgctatctcaaagtttaacacaatttaagggctcagcataagtaaacaacatatttggggtttgcttgtaaaaccaactaaataaaaaattcaaaccaattcacccagaaaaaagaccaataggtgcaaaaataaaaggaaaaccagtgaagtgccacatgacagcagtgttaagtgtttgaaaacgtttcaaagcacatatgtgccaatgtgacaacatgtggaaagcctcaggagagagtctaagataaaagcttaggctgatagacaagtagttaagagctaagagcagtactctgaaggaataggcaaaatgtttattttccttattgtttgtaaacaacaaacttggtcttacatctgtgtggtatagtagaaaggccagctgactagatctctggattctaattttggccctacctgtaacttaattttgtgaccacagttgtaccattcaccgtgcctgggctctagtttcctggtttgtaaggcagccccagcgttcatgttctgtgatagagcagaactgaacttattacctaattaactctctgctatgagttgtcaagactgatcattctgttttttctgtacacagaagtttagatgctttgtgacttaagcaggtgtgtgggctcctttaggcaggttacagttaatttctagagtcg

SEQ ID NO: 28228 - DNA, 295 bp, Homo sapiens
  SIMILAR (2)..(295): 801254mologous to Homo sapiens R33590_2, partial CDS,accession number AC005620,Smith-Waterman Score=378.
  misc_feature (1)...(295): n = a,t,c or g
cacgggccggctctgcaccgtggctaaggcaagggggntgcgagcctgcaggtgagccacccccacccatgccctgggctccaggggaggctgcgaggcccctgaggactctcctcagcttcctcattgcaggggagagctgagggacaccatcctagactgggaggactccctgcccgaccgggacctggcactcgccgatgaggccagcaggaacgccgacctgtccatcacgctgggtacatcgctgcaggatccggnccagcgggaactgccgctggntaccaagcgccgg

SEQ ID NO: 28229 - DNA, 376 bp, Homo sapiens
  SIMILAR (12)..(197): 981254mologous to Homo sapiens R33423_1,accession number AC006930,Smith-Waterman Score=322.
ggcctgccaccttcaggggtccccacggagtctggaccatggaggagcgaggtctggcccccaagttcgacaccacctttgagagcgcgcggcccacgcagacccacatggcgctggtgcagctggagcgcgtgggcctcctccgcttcctggtcagccagaacgtggacgggctccatgtgcgctcaggcctcccttctgggccccctacagcccaccctacccctcctccatgggccctgcaggaggggagacccaccttgaagtgggggatcagtagaggcttgcactgcctttggggctggagggagacgtgggtccaccaggcttctggaaaagtcctcaatgcaataaaaacaatttctttcttgcaaaa

SEQ ID NO: 28230 - DNA, 1197 bp, Homo sapiens
  SIMILAR (100)..(1194): 961254mologous to Homo sapiens Human nucleic acid-binding protein, NuABP-40,accession number B21036,Smith-Waterman Score= 1849.
atgtcaccattacctggtcacatgtttgtgtccacccgcagccaccagggcatagatggtaccacctttgctctccagtgtgcccagtacaaatcgaggatgtcggtgaattacgcggcggggctgtcgccgtacgcggacaagggcaagtgcggcctcccggagatcttcgaccccccggaggagctggagcggaaggtgtgggaactggcgaggctggtctggcagtcttccagtgtggtgttccacacgggtgccggcatcagcactgcctctggcatccccgacttcaggggtccccacggagtctggaccatggaggagcgaggtctggcccccaagttcgacaccacctttgagagcgcgcggcccacgcagacccacatggcgctggtgcagctggagcgcgtgggcctcctccgcttcctggtcagccagaacgtggacgggctccatgtgcgctcaggcttccccagggacaaactggcagagctccacgggaacatgtttgtggaagaatgtgccaagtgtaagacgcagtacgtccgagacacagtcgtgggcaccatgggcctgaaggccacgggccggctctgcaccgtggctaaggcaagggggctgcgagcctgcaggggagagctgagggacaccatcctagactgggaggactccctgcccgaccgggacctggcactcgccgatgaggccagcaggtctgaccccccacccccagggagcccatggaacgccgacctgtccatcacgctgggtacatcgctgcagatccggcccagcgggaacctgccgctggctaccaagcgccggggaggccgcctggtcatcgtcaacctgcagcccaccaagcacgaccgccatgctgacctccgcatccatggctacgttgacgaggtcatgacccggctcatgaagcacctggggctggagatccccgcctgggacggcccccgtgtgctggagagggcgctgccacccctgccccgcccgcccacccccaagctggagcccaaggaggaatctcccacccggatcaacggctctatccccgccggccccaagcaggagccctgcgcccagcacaacggctcagagcccgccagccccaaacgggagcggcccaccagccctgccccccacagaccccccaaaagggtgaaggccaaggcggtccccagctga

SEQ ID NO: 28231 - DNA, 951 bp, Homo sapiens
  SIMILAR (429)..(578): 321254mologous to Drosophila petalopeza hunchback protein,accession number U93017,Smith-Waterman Score=80.
tcacggtgctttcgcaagtgaggcctcagatctgcgctcttcaaatcctacataaagagcccagaggttctccccatgctcagcactgggctcgctttcctgcagaggaaacgatggcaggtagagcttaagaatgacgttctcccccaggtcggccgagagtgatgtagaaccgtagaatcctagagttggggaaaagaggtcttgggggacatctggacggctcccctccagagtagaaccttctcccccgtgggttccacattgctcttttttcatcatcagctgcagaagacaccctgtcatggccaccaagagtaaattcacaggcttgtaaaagcctaactcaagtactgccaaccgcaggtggctctgctcatcagccttgtccagtgatttagtgatggggggagggcccttctctgcaggtgatgaatcattatcatcatggtcatcgtcatcatgatcatcaccggctaaacttgttttattatccagagagtacaggcaagatgagtgtagaattacctgcttcctgcccaccagtgaatgaggatagctggtttgagccatcactaccaacagccacagctgtgtcacgctgtaggtgagattagtaaacttgctccagctcaggatattctgaaatgtgtgtttcatcttcttccagtatggaaaagcgggctcagtgaagagggaagagcgagcatccactgccagctttccagttggacacgagccatgcaaaggcatccaggaagaatctgcatccagctcttcaagctgcagttcaggcttggttgaggtgtccggcggcggcaattttacccaaagcggtgtggaggtgggggtggctgttgagcagcacggcacttccaagttggttccacggtagccgtccttaccctcctgctcgttcctgtgccaggaaccacggtcggggtgccacat

SEQ ID NO: 28232 - DNA, 4199 bp, Homo sapiens
  SIMILAR (573)..(2459): 921254mologous to Homo sapiens dJ202O8.1 (novel rat Espin LIKE protein containing Ank repeats),accession number AL031848,Smith-Waterman Score=3120.
ctgtgcagaccatgacaactagtttagattttattgtcagctcattaaaaactcgttctcgttttgtgtttttaaaaaattccactgatacagccgttttctctaccgaaaaagactataaccgcattatttcaccagtggaagctacagacaaagggcccttgagaggcggcatcttcacctacgggaatttttcctgttgacagacattgccagacacacggaatccctcgcagaacaccgatgggcccacaaagcacgcggaggccgcggccgctgacgatgtgagcaaattcggttcacggtgtctgggcttctctccttccaagagcgtcatttcttggtcctctctacagcggctcagcagtaagcccaaggtccagcacgcgaatcaggaacctgatgattcttcggtggtgaccgcattgccttcaaacctgaagtccgagtgcttccaccctggggaatatgcagaccgctgggtcactggacgccaggccgcggcattccctgagcccctgggagtcagggctgtggccctgggcctggagccagtctcctgccatgacaaccaggacaaagacaattctggtcccacagtcttgcatctgactgcccgctttggccaccccaaggtggtgaactggctcttgcatcatggcggtggggatcccaccgcggccacagacatgggcgccctgcctatccactacgctgcagccaaaggagacttcccctccctgaggcttctcgtcaggcactaccctgagggagtgaatgcccaaaccaagaacggtgccacgcccctgtacctggcgtgccaggagggccacctggaggtgacgcagtacctggtgcaggaatgcggcgcggacccgcacgcgcgcgcccacgacggcatgaccccactgcacgccgcggcgcagatgggccacagcccggtcatcgtgtggttggtgagctgcaccgacgtgagcctgtcggagcaggacaaagacggcgccaccgccacgcacttcgcggcgagccgcggccacagcaaggtgctcagctggctgctgctgcacggcggggagatctcggctgacctgtggggcgggaccgcgctgtacgacgccgccgagaacggggagctagagtgctgccagatcctggtagtgaacggcgcggagctggaagtccgcgaccgcgacgggtacgcggccgctgacctgtcggacttcaacggccacagccactgcacccactgcctgcgcacggtggagaacctgagcatggagcactgcgtgctctcccgggatccatccgtggagctggaggcgaagcagccggattcaggcatgtcctcacccaacaccacggtgtcggtccagcctctgaactttgacctcagctcgcccaccagcaccctctccaactacgactcctgctcctccagccactccagcatcaagggccagcaccctccacgtgggctttccagcactagagctgcagacatacagagctacatggacatgctgaacccagagctgggcctgccttggggcacgattgggaagcccatacccccaccacccccacccagcttccccccgccacccccgcccccaggcacccaactgcccccacccccacctagctacccatctcccaagcctcctgtgggaccacaggcagctgacatctacatgcagaccaagaacaaactccgccacgtggagacagaggccctcaagaaggagccgagctcctgcgacggccacgacgggctacggaggcaggactccagccgcaagccccgcgctttcagcaagcagcccagcacgggggactactaccggcagctgggccgctgccccggcgagacgctggtcgcacgcccgggcatggcgcaccgcgaggaggcggaactccctgggaaccacgtgcctaacggctgcgccgcggaccccaaggcgtccagggagcagcagctgccgccgccgccgccgccgccgcccctgcccgaggccgcgagttcgccgccgccggtcccgcctctgcccctcgagggcgctggccctggctgcgggcagcgccgctcctcctcgcccaccggcagcaccaagtctttcaacgtgatgttcccgatgggcgacaactcggagctactggctgagattaaggcaggcaagagcctgaagccgacgccacagagcaaggggctgaccacagtgttctcaggcagcaggcagccggccttccagcccgattggccgctgccgtctgtgtcacctgcactgttaccagtccggagccccacaccgccagctgcggggtttcagccgctgcttcaatggaagcttggtttcccgttgccgcccactactcctgcgccgggggtgcagctggacgtggaggcgctcatccccacgcacgatgagcagggccgtcccaagcccgagtggaagcgccagggtcaagatgaatcagggacctctgtggaggcgatggcaggcccaggggggaaaactggacatcagaggggttttggcgatggcaggcccaggggggaaaactggacatcagaggtggagaaaacagcgagcagcaaccggccgtgccccccgccagcgaccaaagtggacactgcccagagcctggagcggcggctcaggccgaagcctcaccccagcgtcaccccccgccggccagacgcggtccctccctgcagacgcagccccgcggagccattacaccacccaggacatgcaaaagctgacggccgccagctcgtgctgctacccccgcgagggctggaggtacccccgcgagggctggaggtactcccgcgagcacaacgccatcctctggccctttggcgagctcatgaccgaggccgacatcctccgcatcgagcagcaatcgagaacctgcaggtgctgcacaaggcgcagaagctggaggcgcgcctggagcaactggagctgagcagctgctgcccatctccgtcgccctgtggagccgcgcttcaccgtcgacccgcgccgaatgcatggccgcgccgccagcctgcccgcctggctgtggcgcgcgagatcctcgagtgcggcgtctccgtgcagcatcaccgcgccacctacgagctgcgcgcactggacgcggcgcccccgcgctgtccgcgccgcaagcccccgcagtccgctggcgccccggaggactacgtggcggccggctctggccagcccagcgccgccgccgcccacggcccgctggccgactgggagcccctggacaccctgggcccgcctgaggcacaggattgccaggcggcgctacctgagcccgagcagctggcgcgccggccgcccctctgcacggaactgcgcggcgtccaggactacctcgacctgcgcaaggagcgcatcgtttacctcttcctggagcactggcgccgctgggccttccgcggaccgggccttccgcggaccaggccgccgcgcccaggcgcgcctaggcagactgctgcctggcgtgacggccgcccgtgctggccggagctggaggccacagacgccccccggctgccgctgctgaggcagcggcaggcagtgggcaagctgctgcaccactggcggagcctgcggcggcacgtgccgccaagcccgggcctggcgcacggcgtgtactggccccagcacttcctgtcgcccctagacggcggcgcacccccgcgctacgaaagcctcacgctcgacctcttcatgctcggctacttccagctaccggagatgggcctgagccgcgaggatcgcaagttccgccacctactgtgctacgagatgttccaccggctggacagccacccgtgggagcgcatccgcctcttccaccgcgtggtgctggaggaggtggaggccggccggcgcggctggagcgacggcttcgaggacctcaggcacaggttcttcggaaacggcctggaggctgagccggcccccgaagaacaggcgaagaaaaaggaagagaaggggaaagaacaggagcggaccgaagaggccgctccggttcagaagggggacccgcccaaggggcagcgcgaggccctggcccctgtgccgcagccgccgcgcccgcccgcccgccgcgcctcccccgatctcagactctccgggttccgaagcccccgccgaagaccctttggaactggtgtctga

SEQ ID NO: 28233 - DNA, 3415 bp, Homo sapiens
  SIMILAR (640)..(2019): 971254mologous to Homo sapiens OTRPC4,accession number AF258465,Smith-Waterman Score=2313.
atggatgggaggaggcagggctgggacagaccatgcagcaatgatggatttggaccccaaccagaagcccctgggtcatctgggaccatgaacagaggtgagaggtcacgcatgcagggcaggttaccttctactgagtttggtcccagctcacttgtcacctccactgggaagttctcactgatgctcctccatgaggggccaagcaacatctttacacgccccaccctcaacttcatcacaatacccctatcatctactcacatgctggcctttgcacctgctaggccacctgcctgcaaagcctctcagctccttaacctggctaaactccccctcatccttcagagttcatcctataagaagcaccccttcctcaagggagccttccttagttgctctgactgggcagagtttcacaacctccaatttggcaattgtcaatttagagcccctggctacagcaccccaccctgggcagagccacttcgccacctggtggctggttcctggaactgcatgttccacctcatctctgggaagatgctgctcctgacatcttctcccaggacccaggcgtcccctccctgggggcaccagtgtaaatgcttcatgggaaaaggattcgatgctctgacagagccatctacggggaagacctgcctgcccaaggccttgctgaacctgagcaatggccgcaacgacaccatccctgtgctgctggacatcgcggagcgcaccggcaacatgagggagttcattaactcgcccttccgtgacatctactatcgaggtcagacagccctgcacatcgccattgagcgtcgctgcaaacactacgtggaacttctcgtggcccagggagctgatgtccacgcccaggcccgtgggcgcttcttccagcccaaggatgaggggggctacttctactttggggagctgcccctgtcgctggctgcctgcaccaaccagccccacattgtcaactacctgacggagaacccccacaagaaggcggacatgcggcgccaggactcgcgaggcaacacagtgctgcatgcgctggtggccattgctgacaacacccgtgagaacaccaagtttgttaccaagatgtacgacctgctgctgctcaagtgtgcccgcctcttccccgacagcaacctggaggccgtgctcaacaacgacggcctctcgcccctcatgatggctgccaagacgggcaagattgggatctttcagcacatcatccggcgggaggtgacggatgaggacacacggcacctgtcccgcaagttcaaggactgggcctatgggccagtgtattcctcgctttatgacctctcctccctggacacgtgtggggaagaggcctccgtgctggagatcctggtgtacaacagcaagattgagaaccgccacgagatgctggctgtggagcccatcaatgaactgctgcgggacaagtggcgcaagttcggggccgtctccttctacatcaacgtggtctcctacctgtgtgccatggtcatcttcactctcaccgcctactaccagccgctggagggcacaccgccgtacccttaccgcaccacggtggactacctgcggctggctggcgaggtcattacgctcttcactggggtcctgttcttcttcaccaacatcaaagacttgttcatgaagaaatgccctggagtgaattctctcttcattgatggctccttccagctgctctacttcatctactctgtcctggtgatcgtctcagcagccctctacctggcagggatcgaggcctacctggccgtgatggtctttgccctggtcctgggctggatgaatgccctttacttcacccgtgggctgaagctgacggggacctatagcatcatgatccagaagattctcttcaaggaccttttccgattcctgctcgtctacttgctcttcatgatcggctacgcttcagccctgcgcctgcgcattgagcgcctgcgcttgagcccctgcagctcccacgggcccgcatctggcactggacctggcatacagcccattccagggcatgttttcttccagcttatcccccagacatcctcagagagcccctccatgccaggcgaggcggtggccagcgccatgcattcctcccgctacccgagcccagcagaactggacgcctatgccgagaaggtggccaacagcccgctgtccatcaagatcttccccaccaacatccgtgtgccccagcacaagcacctcagccgcacagtcaatggctatgacaccagtggccagcgctacagcccctacccacagcacaccgctggctaccagggccttctggccattgtcaaggccgcggtttcctcctccagcacggccgcaccagctgggcccgccaaaagtgtgctcaagagcgccgagggcaagcggaccaagctgtcaccggccgccgtgcaggtgggcattgcgccctacccagtgcccagcactctgggtcccttggcctaccccaagccacctgaggcgcctgctccaccacccggcctgcccgcagccgccactgccgcctccgtcatccccctgccgggccggggcctgcccctgccaccttccaacctgccctccatccacagcctcctgtaccagctcaaccagcagtgccaggccccgggcgccgcaccccctgcctgccagggcatggctattccccatcccagccctgccaagcacggcccagtgcccagcttccccagcatggcctactcggctgcagccggtctgcccgactgccggaaaggcactgagctgggccagggagccacccaagccttgacgttggctggggccgccaagcctgcagggtacgcagacagcggcctggattacctgctgtggccgcagaaaccgcccccaccgccgccccagccactgcgtgcctacagtgggagcacggtggccagcaagtcccctgaggcttgcgggggccgggcatacgagcgggccagcgggtcacccctcaactgtggcgtggggctgcccaccagcttcaccgtaggccagtactttgcggccccgtggaacagtgtgctggtgacacccaccagcgactgttacaacccagcggcggcggtggtggtcacggagctggggccgggggcaagcccgggaagcttggcttgggccccccttgcaaggaatcgtctcgggccttgcccagcaaagagtgtgtgcaaacaacatcgggtgctgagcaagcagcctgcagtcacttggagtatctcatcaacgacatccggccgccctgcatcaaggagcagatgcttgggcaagggcttatgagacggtggccgtgccccggctactcgaccaccagcatgcccacatccgcctacccgtctacagataa

SEQ ID NO: 28234 - DNA, 3750 bp, Homo sapiens; identical to SEQ ID NO: 26033
  SIMILAR (1450)..(3690): 901254mologous to Homo sapiens KIAA0433,accession number AB007893,Smith-Waterman Score=3443.

SEQ ID NO: 28235 - DNA, 1215 bp, Homo sapiens
  SIMILAR (994)..(1110): 1001254mologous to Mus musculus kinesin family protein KIF1a,accession number D29951,Smith-Waterman Score=209.
atggagaaacaactgaaccttgaggactctcagcagataaaccagatgaagtggataaagactcgctgtgtggagaaggcagggcagcccacgcagaaaggtgggaggcaagtagacagaggaggtggtagagcggtgatggagtgtgagcatctagataaaaagctgcagtcagcttcccaaaaatcagggaaaataataaccggaaataataaagtagaatgcaagaacaaaccagcaatcctgagaggacccacagaccctctgaaggaagcagactgctactgcaggacccgggagacacctcaaatatactctgggaggcggaaagcgtcggcaagttttcaagcccgtctagccctctgcctggaaacagactcagggctgttttggtggggcaccgtgggagagggggcaggtgtttcttgggaaaacaacaacaacaacaacattatttctcaggccccagcaatggaaaccacatgccaaaataagaaccatccgatcaggagtgtagtggcactgcttccaagtggagctgcaaccttaggagtgaagctgcagaccttcgcagtgagtgttgcagctcttaaggtgtcgcctctggagttgttcgttcctcccggtgggctcgtggtctcgctggcttcaagagtgaagctgcagaccttcgcagtgagtgttacagctcataaaagcagtgtggacccaaagagtggagctgcctgccagtcccgtgccatgcgctcgcactcctcagcccttgggtggtcgatgggactgggcgccgtggagcagggggcggcgctcgtcggggaggctcgggctgcacaggaacccacggaggactatgagagcaagctggaggctctgcagaagcagatggactccaggtactacccggaggtgaacgaggaggaggaggagcccgaggatgaaggtgaggggtcactgggccagcacctgctgcgtcaggagggtctcagcatggagatcgcagtggaggtgaccaagtccttcattgagtacatcaagagccagcccattgttttcgaggtctttggccactaccagcagcacccgttcccgcccctctgcaaggacgtgctcaggttagcgccctgggtcggggggttcggggctgctgtcctcaaagcccctgcccagatcttttcatccagctgttttgagctgcaggaacttatgcacccctga

SEQ ID NO: 28236 - DNA, 543 bp, Homo sapiens; identical to SEQ ID NO: 6191
  SIMILAR (246)..(341): 661254mologous to Homo sapiens Human secreted protein, SEQ ID NO: 6536,accession number G02455,Smith-Waterman Score=104.

SEQ ID NO: 28237 - DNA, 2358 bp, Homo sapiens
  SIMILAR (1315)..(2355): 961254mologous to Homo sapiens complement protein C1s precursor,accession number X06596,Smith-Waterman Score=1825.
atgggctcctgtgctgcccgagcctccccgacgagcgccgccccctgctccacggcgcccagtcccatcgaccacccaagggctgaggagtgcaagcgcactgcacgggactggcaggcagcttcacctgcagccccggtgcgggatctactagagttccctctgaacaaggtccaggtatctccattcctcttgagtaaggtgcacagccacatcctcagatgtcacaaactgctgatacctggctgtcaggagcgcagctgcctgatctcctgggctgtcctcatggggaaaggcaggcacctggggaacaggtggaaccctagtgacactgagccccaggtgacgccgcaccaccaaagaaggtgcttgtgtttgtcagacaaatacagccaggcctgccaccccttaggctccaaagtccggaggtgcagaaagccaggaccaagagacaggcagctcaccagggtggacaaatcgccagagatgtggtgcattgtcctgttttcacttttggcatgggtttatgctgagcctaccatgtatggggagatcctgtcccctaactatcctcaggcatatcccagtgaggtagagaaatcttgggacatagaagttcctgaagggtatgggattcacctctacttcacccatctggacattgagctgtcagagaactgtgcgtatgactcagtgcagataatctcaggagacactgaagaagggaggctctgtggacagaggagcagtaacaatccccactctccaattgtggaagagttccaagtcccatacaacaaactccaggtgatctttaagtcagacttttccaatgaagagcgttttacggggtttgctgcatactatgttgccacagacataaatgaatgcacagattttgtagatgtcccttgtagccacttctgcaacaatttcattggtggttacttctgctcctgccccccggaatatttcctccatgatgacatgaagaattgcggagttaattgcagtggggatgtattcactgcactgattggggagattgcaagtcccaattatcccaaaccatatccagagaactcaaggtgtgaataccagatccggttggagaaagggttccaagtggtggtgaccttgcggagagaagattttgatgtggaagcagctgactcagcgggaaactgccttgacagtttagtttttgttgcaggagatcggcaatttggtccttactgtggtcatggattccctgggcctctaaatattgaaaccaagagtaatgctcttgatatcatcttccaaactgatctaacagggcaaaaaaagggctggaaacttcgctatcatggagatcctgtggactgtggcattcctgaatccattgagaatggtaaagttgaagacccagagagcactttgtttggttctgtcatccgctacacttgtgaggagccatattactacatggaaaatggaggaggtggggagtatcactgtgctggtaacgggagctgggtgaatgaggtgctgggcccggagctgccgaaatgtgttccagtctgtggagtccccagagaaccctttgaagaaaaacagaggataattggaggatccgatgcagatattaaaaacttcccctggcaagtcttctttgacaacccatgggctggtggagcgctcattaatgagtactgggtgctgacggctgctcatgttgtggagggaaacagggagccaacaatgtatgttgggtccacctcagtgcagacctcacggctggcaaaatccaagatgctcactcctgagcatgtgtttattcatccgggatggaagctgctggaagtcccagaaggacgaaccaattttgataatgacattgcactggtgcggctgaaagacccagtgaaaatgggacccaccgtctctcccatctgcctaccaggcacctcttccgactacaacctcatggatggggacctgggactgatctcaggctggggccgaacagagaagagagatcgtgctgttcgcctcaaggcggcaaggttacctgtagctcctttaagaaaatgcaaagaagtgaaagtggagaaacccacagcagatgcagaggcctatgttttcactcctaacatgatctgtgctggaggagagaagggcatggatagctgtaaaggggacagtggtggggcctttgctgtacaggatcccaatgacaagaccaaattctacgcagctggcctggtgtcctgggggccccagtgtgggacctatgggctctacacacgggtaaagaactatgttgactggataatgaagactatgcaggaaaatagcaccccccgtgaggactaa

SEQ ID NO: 28238 - DNA, 444 bp, Homo sapiens; identical to SEQ ID NO: 6194
  SIMILAR (46)..(258): 641254mologous to Homo sapiens hypothetical protein,accession number AL162044,Smith-Waterman Score=229.

SEQ ID NO: 28239 - DNA, 612 bp, Homo sapiens; identical to SEQ ID NO: 262
  SIMILAR (236)..(108): 651254mologous to Homo sapiens Human secreted protein, SEQ ID NO: 7678,accession number G03597,Smith-Waterman Score=133.

SEQ ID NO: 28240 - DNA, 753 bp, Homo sapiens
  SIMILAR (109)..(309): 391254mologous to Homo sapiens acrosin,accession number M77381,Smith-Waterman Score=123.
atgggcttggtgggcccctgcactcggagcagccagccagccctgctggccccgggcaatgggggacttagcacctgggccagtggctgtggagggtgtactgagtcccccagcagtgccggcccaccggcgctgtgcccgatttctcgccgggccttagctgccttcccgtggggcagggcttgggacctgcagcccgccatgcctgagcctccccctcctccgtgggctcctgtgccgcccgagcctcctcgacgagcaccaccccctgctccacggcacccagtcccatcgaccacccaagggctgaggaatgcgagtgcacggcgcgggactggcaggcagctccacctgcagccccggtgtgggatccactgggtgaagccagctgggctcctgagtctggtgggaatgtggagagtctctatatctagctcagggattgtaaatacaccaatcagcaccctgtgtttagctcaaggtttcatgtacttctccctgggaccacattcctgtgtgaacaagtgcaagcaaacctttgcattagaccctgctttgggagtaatccaggctcagaaagaaaagccatctgatgatgactttaaatcactcaacccactctatcaccttcggcctggacaagcactgtgcctcatatctgatgggctttctctacatcgtggagctgctcatcgctcaatgtggctcccctggggcaactctcatacaatggaggatggcatcaatggatag

SEQ ID NO: 28241 - DNA, 903 bp, Homo sapiens; identical to SEQ ID NO: 19470
  SIMILAR (230)..(42): 571254mologous to Homo sapiens Human secreted protein, SEQ ID NO: 7083,accession number G03002,Smith-Waterman Score=153.

SEQ ID NO: 28242 - DNA, 3174 bp, Homo sapiens
  SIMILAR (335)..(709): 281254mologous to Homo sapiens Con1,accession number S80905,Smith-Waterman Score=54.
atggagcgctatgaatggatcaaactccccgaggagatgggagaggctggtatccaaaccacaggtgaagaatttagttttaaagttgaaaaagagaaaaatccttcctgtgagaactcaggagcccagctggcttcacctagtggatcccgcaccagggctgcaggtggagctgcctgccagtcccgcgccgtgtgctcgcattcctcagcccttgggtggtcgatgggactgggcgccgtggagcagggggtggtgctcgttggggaggctcgggctgcacaggagcccatggagtggggccagcagggctggctggctgctccgagtgcagggcccaccaagcctacgcccaccggaaccccagctggcccacaagcgccgcacgcagccctggttcccgctcacgcctctccctccacacctccctgcaagctgaaggagtgggctccagccttggccagcccagaaaagggctcccacagtgcagccgcagccgccatggcgatgaactttggggaccatgccagcgggttccgccatgatgatgtgatcaggttcatcaacaatgaagtcctcaggaacggcggcagcccagccttttacacggccttccgctcgcggccgtggaacgaggtagaggaccggcttcgggccattgtggccgacccgcgggtgccccgtgccattaagagggcctgtacctggagcgctttggcgctgagtgtgcaagtggctgcgaggcagcaggaggagctgctgtaccaggtttggtggctgcaagggcatgtggaggagtgccaggcgacctcctgggctctaacttcccagctgcagcagctgcgcctggagcatgaggaggtggcaacacagctgcacctcacgcaggccgccctgcagcaggtgctgaatgagcgtgatgggttatgcgggaggctgctagaagttgagagatccatgcaggtctatccgatgcctcaggattttgtacccggtccagaagccggccagtatgggcctgtggccgggactttaaatgcagaacagagtgaggcggtggccacagaggcacagggaatgccacattcggaagcccaggtagcagccccaacagctgtgtattacatgcctgaaccccagagtggcagggtccagggcatgcaacctcttctgctaatgcaggcacctcatccagtcccattccatatgccttcaccaatgggactgccatactcaacacctctaccacccccagtagtaatggaatcagcagcagcaattgcaccacagatgcctcctgcagggatctatccacctggtctttgggccacagtgggatcccaggaggagacggcccctccgtgggaccagaagtgccatggccaggatggatatcctgagaatttccagggagtatatcacccaggagataacagaagctgcaaccaaaaggaaggttctgagtgtccccaaggaatgacttcccaaggggacagcagcagccacagcctgaagaaagatccagtgatgcaagagggcacagctcccccagagtttagcaggagccacagcctggagaaaaaaccagtgatgcccaaggagatggtccccctaggggacagcaacagccacagcctgaagaaagatccagttgtgcccaaggagattgtccccataggggacagcaacagccacagcctgacgaaaaatccagttgtgcacaaggagatggtctccctgggggacagcaacagccacagcatgaagaaagatccagtgatgccccagaagatggtccccctgggggacagcaacagccacagtctgaagaaagatccaatgatgtgccaggagatggtccccctgggggacagcaacagccatagcctgaagaaagatccagtggtggcccagggcacagctcccctgatgtatagcaggaggcacagccagaagaaagtgccaatgatgcccaaggagatggtccccctgggggaaagccacagccacagcctgaagaaagatctagttgtgcccaaggagttggtccccctgggggacagcaagagtcacaggatgaagaaagatccagtgatgccccagaagatggtccccctgggggacagcagaagccacagcctgaagaaagatccagtgatgccccagaacatgatccccctggaggacagcaacagccacagcctgaagaaagatccagtgatgccccagaacatgatccccctggaggacagcaacagccacagtctgaagaaagatccaatgatgcaccaggagatggtccccctgggggacagcaacagccatagcctgaagaaagatccagtggtgccccagggcacagctcccctgatgtttagcaggagacacagcctgaagaaagtgccagtgatgcccaaggagatggtccccctgggggacagccacagcctgaagaaagatccagtgatgccccagaacatggtccccctggaggacagcaacagccatagcctgaagaaagatccagtggtgccccagggcacagctcccctgacgtttagcaggagacacagcctgaagaaagtgccagtggtgccccaggggacagcctccctggggttcggcagaatccacagcctgaagaaagagttagtgatgcccgaggagatggtccccctgggggacagcaacagccacagcatgaagaaagatctagtgatgcccaaggagatggtccccctaggggacagcaacagtcacagcctgaagaaagatccagtggtgcaccaggaggtggtctccttgggggacagcaacagccacagcctgaagaaacatccagtgattccccagggcacagcctcactgaggtttagcaagagccacagccagaaggaagatcaggagaggccccaggcaacccctctggaggatagcaagagccatggtgtgaaaaatagcccatggaaacaccagcctcaggggcagaaggtcaaggaacaaaaaaggaaaaaggcctcagaatcccagcaacagaagcctgcctcatgctccagcccagtgaattgggcctgcccatggtgtaatgccatgaattttccacggaacaaggtgtgctctaaatgcaagagagtccgtatgccagttgagaatggcagcgttgacccagcgtaa

SEQ ID NO: 28243 - DNA, 843 bp, Homo sapiens; identical to SEQ ID NO: 14481
  SIMILAR (370)..(783): 941254mologous to Cloning vector pSacBII SacB,accession number U09128,Smith-Waterman Score=684.

SEQ ID NO: 28244 - DNA, 363 bp, Homo sapiens; identical to SEQ ID NO: 6199
  SIMILAR (239)..(9): 291254mologous to Homo sapiens Human secreted protein sequence SEQ ID NO:240,accession number Y87201,Smith-Waterman Score =88.

SEQ ID NO: 28245 - DNA, 579 bp, Homo sapiens; identical to SEQ ID NO: 23554
  SIMILAR (271)..(324): 441254mologous to Helicoverpa armigera nuclear polyhedrosis virus basic DNA-binding protein BDBP,accession number AF197913,Smith-Waterman Score=42.

SEQ ID NO: 28246 - DNA, 2277 bp, Homo sapiens
  SIMILAR (2232)..(595): 921254mologous to Homo sapiens glycerol-3-phosphate dehydrogenase,accession number U36310,Smith-Waterman Score=2585.
tcatacctctaaagctgcgtgcacagatgaggtatctgcaaggtctgtgcagagcccttgtgtattggcattgagactgaagccttgaatagtatagtctatctttgctgaactaattgggatgaagaaatagattttggccgatgtaagcatttttagtttgaggagctgagtggaggcagctccaagaaatcttaggtgatttctcggtgtcttagctgccttcccgcggggcaggacttgggacctgcagcccgccatgcctgagcctcccaccccctccatgggctcctgtgccgcccgagcctccccgatgagcactgccccgtgctccacggcgcccagtcccatcgaccacccaagggctgaggagtgcaggcgcagggcgcgggactggcaggcagctccacctgcagccccagtgcgggatccactgggtgaagccaactgggctcctgagttctttgggtccacactgcctttacgagctgtaacactcaccgtgaaggtctgcagcttcactccgctagggtccgcggcttcattcttgaagtcagtgagaccaagaacccaccaattccggacacagaaatacaatcctccacaactacggtccactggaattggaactcttctgtcgaggttctcttctgcagttttcattagtatagcaagccggcttccagatacccttcctttttgaatagcactcatcagctgcaaaaattcattgagttcaacctgtccatttttattcaaatcaacttcatttagaatttcatggagtgtattttcatccatttggacattgatactctctaatacacgctgcacctcaacaacggtcataaagcctctctggtccgcatcaaacttatgacatctcctcttatacctgtcaatgtctgaaggcagtaggctaatttcagagcgatctgttaactgttctgatcgagatttatagcccatttcataatatagaaacttcctggctgtttcaagttgttcctgcttcttataatcatcccaattcagttccctgcccatcagttcaacaatcctgggtagggcttcctctgctgcctggacatttagaaaggccaggcgagtacgacgtgaaatcatatccacagcagtgcaggcatactccttaatcccatatttcacctctgcttcaatatatggaaattctgacacaagacgtactccaacaataggccaccttttgccagtcacacttgccattttggccacctcaaaggccttatcaccataggtggcggcaagatgctgtgccacctcgctttcaagtccataatcctgcacaagcctaatgtagagtgtggggctccaatctttacccccttgaaggaaaagcccaactgttctacttggtcctgcttttaaattatgagttttgacagcagcatttatggtatcttctgccatagaccgataagttgtccactttccacctgctatagtaataaggccactctcactgatatcaacaacatgatttcgggagatagactgagtatctgcagatttggggtctgtaacaagaggacggattccactccatgctgccaggacatcccctcttctcacttcaacatcacaactcaggtaattacgcacttcattcaaaatgaagttgatatcttcttctgaaggaattggatggtgtgtaacatcagttggagtatcagtagtgccagcgatcgtcatcttttgccagggtaagaagaaaataactcgcccatcactggtcgctgggtcaagaagtcccatgctctctgggctgtaataaccaggcatcacaatatggacaccagcacttggctggcagatagctgctgcgtctttatcatccattttgcgcacagagtccgtgaaaggtcccgtggcattgataacacatttggctctcacgtcaaattcctgccctgtgaggacatccttgcaccgtgcgccgctcacacgcactttccctgtctgggggtctgtcttcttgagcaagctcactacctccatgtaattggctgtggcagccccatacctggcagcagtcagagcaatggcaaggttcatccgtgcatcgttatgttgtcctggctttgccagtccgacgctctcaacagtcttcgatctagaggtagtgacccaaagaacctctaatccagaggtagatgcaatgatagcagtaccatcccatttcctggctcctgcagctgcccttctgtgtgctccccctcccataaggggtttgagcat

SEQ ID NO: 28247 - DNA, 2679 bp, Homo sapiens; identical to SEQ ID NO: 19475
  SIMILAR (1295)..(1170): 661254mologous to Homo sapiens KIAA0544 protein,accession number AB011116,Smith-Waterman Score=133.

SEQ ID NO: 28248 - DNA, 1528 bp, Homo sapiens
  SIMILAR (136)..(372): 911254mologous to Cloning vector pCMVLacI lac repressor,accession number U64448,Smith-Waterman Score=346.
atgtgctcttgtgctcttcgcacagaagatttagagtcagatacttttttgtgttttgaaattgaactactaggtcatgctacggtgcaaagtatgctgatttgtaaattaacagggattttgccgatttcggaaccacccatcaaacaggattttcgcctgctggggcaaaccagcgtggaccgcttgctgcaactctctcagggccaggcggtgaagggcaatcagctgttgcccgtctcactggtgaaaagaaaaaccaccctggcgcccaatacgcaaaccgcctctccccgcgcgttggccgattcattaatgcagctggcacgacaggtttcccgactggaaagcgggcaacataaaggttctccatggccccaccagactcaggagcccagctggcttcacctagtggatcccgcactggggctgcaggtggagctgcctgccagtcctgcgccgtgcgctcgcattcctcagcccttgggtggtcgatgggactgggcgctgtggagcagggggtggtgctcgtcggggaggctcgggccacacaggagcccatggagtgggtgggaggctcaggcatggcgggctgcaggtcccgaaccctgcccttagactcagagccacagtggatgcctgaggccagcaggcccctctgctccacaggtggaaaagcctgaggttcgccgacctccagagcccgcagctgcaccacggagaggtgagtgctgctcttccctggctgcggcatatagggcgaaggctggttgacctctggccttctggggcaggtcacacagaaggaaggctccttctcagagccttcactgtggcatctgtcaaatggtcttgtattctttaccttgttcagtgcaaggatgaatgataggatgcctgtcaagggcttttggcagtgcctagtgatgcattcagcattgccaccactgttgctgttaccgttgccgtgcttcagcagctggagcagcctctttgcaaggcagtacccatgtgagaattcagcacatgcactccatgaccctgtgcttctgacgcccagtgtgcgactcagagacgtctgtaccaggtccatatggcccctggtggtcaccgggctgccatcagcaatgaatgtgagttcctggtgctccacatcctcgccagcatttggtgtgttagtgctttggatatgagccactccagtaggtgcgtggcagtatctcatggttggtttaacttgcagctccctaatgatatacctatgtggagcatctttcaggtgcttatttgccatctgtgtatcttcttgaatgaggtgtctgtttagatcttctgcccactttttaattgggttgttttcctgggagcagcctggacacgtgatcccagggaaagtgtggggtgcccctcggaggactccgtagcaggcaccagcaacagacaagatgtgcgccaacaggaaggaacacttaacactgctgaccgtcagggtcaggtggtttagaggacatcgttctgcaagccccat

SEQ ID NO: 28249 - DNA, 3342 bp, Homo sapiens; identical to SEQ ID NO: 3545
  SIMILAR (1786)..(2649): 541254mologous to Homo sapiens unnamed protein product,accession number AK001559,Smith-Waterman Score=754.

SEQ ID NO: 28250 - DNA, 385 bp, Homo sapiens
  SIMILAR (366)..(337): 701254mologous to Mus musculus SPR2F protein,accession number AJ005564,Smith-Waterman Score=52.
ggcacgagcctacagagcactttggggggtgtagttgcaggcatggtggtcacatgccctcaccaggactccccaagcccagggaacctcttgggcaaaggctccaaggcatgaaacagcctctcattgagggaactgcagaaagccccatgtgtcctcactgaggtcagcagcattctgctctcccagctcctcttcatgcctgcactcgagcagcactgacccgcccagccacttctgtgccggaaagaccgggtaacgaagacgacaacatccctgctctcttggggtgtgtcagcgggtgatggaatagtgaggagctatgaggaagacaaaacagggaccagggcacagagagggattgcattccgccttcttgagcgcc

SEQ ID NO: 28251 - DNA, 901 bp, Homo sapiens
  SIMILAR (104)..(538): 671254mologous to Homo sapiens Deleted in Colorectal Carcinomas,accession number R13144,Smith-Waterman Score=455.
tcaggatgttcgcaggctccattgacaaaagtgacttcccacgctttgcccacagagggcatccctgcgcattgatacgcagaccaggcaaatgcagctcctggaagcctcctcggtccgctcttttttccctaagccatagtctgtctgcccccacccccttcccgtggaatctttgcctgatccagttcgtttccctccggtctccacattttcccttccagccctccacttctccggatcaatgtgtagtacggttccaactcccagctcgcacaccgcggggctcgggatctcttggaccgaatggaactttttgctgcctgcttttgctgctgattctgtcagtggacaaggaaaaaggcttcgaaggcagcagaggcgcaggggaggtggagaaagaggtggaggaagaggacgaggaggaggaggaagccgaaggggctcggcgcgtgtgtgtgcatgtgtgcatgcgtgtgtgagtgcatgtgtgtgagtgctgccgctgcccgcgacccctggccccgaaggtgttggctccccaccagactcaggagcccagctagcttcacccagtggatcccgcaccagggctgcaggtggagctgcctgccagtcccgtgccgtgcgctcgcactcctcagcccttgggtggtcgatgggactgggcgccgtggagcagggggtggtgctccttggggaggctcgggccgcacaggagcccatggagtgggtgggaggctcaggcatggcgggctacaggtcccgagccctgccccgcgggaaggcagctaaggcacgctactcatttggtagtttttgttcaccacattgtgaagaagggaatggaaaaattacagaatatcagaatatgtcaaacaagttctcaggttctgagcca

SEQ ID NO: 28252 - DNA, 3098 bp, Homo sapiens
  SIMILAR (1536)..(3095): 1001254mologous to Homo sapiens leukotriene B4 omega- hydroxylase,accession number D26480,Smith-Waterman Score=2791.
ttaggaggatggaacaaacgagtaaggttcgtgctgttcagacaattgtaatcctggcagcaaacctgttgggcgactccaggcccacgcaatcgccaacccactctcattcagggcgttctgcccctctgcccctttccacggtccgtttacccccattcttgaacgattccatcggaattccccaaccctgttccaagtgtgaccccaagatatgaggccgcccttcctgaagccaccgcaggctcctccagcaggcagccccgggagcagggagctgggcggccgggggccccgcgcgccacgggaggcagaggtcgctccccgatcgcggaaaccgggactcacgtgtggatctgcttgtgcctgcgcctccatggtggctgacttcgagctgagggcggcggggacaccctggtgcttcccagagcagatggcagctgcgcccaggctcagaacgcagctggccccgccgctcgctcccactcctggcacgcgtgtcgcgagcgctgcgcggagggggttggggacgcaggcagccgccactagccgcttctggttacctccgccccttccagtccacctggcccaaaccaagctggaacaagctcgccgctgggcgccacctgccggcgctctgtacagccggcggaaggcacccactcccggcgcatctgagacatctgctccccgtttatcttctgccataaataaaagctccctggggccctcatcagaagccatgcagatgccagtgccatgctttgtatagacgagggcctggtgcttctgtctcacagctcttaagattctttcctccatcttaactttggataacctgattgtgtctggaattggtgggttctcggtctcactgacttcaagaatgaagccacggaccctcgcgatgagtgttacagttcttaaaggtggcgtgtccggagtttgttctttctgatgttcagatgtgttcggagtttcttccttctgactcagaagcccagctggcttcacccagtggatcccgcaccggggctgcaggtggagctgcctgccagtcccgcgccgtgcgctcgcactcctcagcccttgggtggtcgatgggactgggcgccctggagcagggggcggcgctcatcggggaggctcgggctgcacaggaacctacggaggccgggggctcaggcatggcgggctgcaggtcctgggccctgccccgcgggaaggcagctaaggcccggcgagaaatcgagcgcagcgccggtgggctggcactgctgggggaccgagtacaccttcccgagcagccgctggcccgggtgctaagcccctcattgcccggggctggcagggccggccggctgctccgagtgcggggcctgccaagcctacgcccacctggaactctagctggcccgcaagtgccgcgcgcagccccggttcgtactcgcgcctctccctccatacctccctgcaagctgagggagccggctctggccttggccagcctagaaaggggctcctacacctataagatgtcccagctgagcctgtcctggctgggcctctggccagtggcagcatccccttggctgctcctcctgctggtcggggcctcctggctcctggcccatgtcctggcctggacctacgccttctatgacaactgccgccgccttcggtgtttcccacaacccccaagacggaactggttttggggacaccagggcatggtcaaccccacagaggagggcatgagagttctgactcagctggtggccacctacccccagggctttaaggtctggatgggacccatctcccccctcctcagtttgtgccaccccgacatcatccggtctgtcatcaacgcctcagctgccattgcaccaaaggacaagttcttctacagcttcctggagccctggctgggggatgggctcctgctgagtgctggtgacaagtggagccgccaccgtcggatgctgacgcctgccttccatttcaacatcctgaagccctatatgaagattttcaatgagagtgtgaacatcatgcacgccaagtggcagctcctggcctcagagggtagtgcctgtttggatatgtttgagcacatcagcctcatgaccttggacagtctacagaaatgtgtcttcagctttgacagccattgtcaggagaaacccagtgaatatattgccgccatcttggagctcagtgcccttgtatcaaaaagacaccatgagatcctcctgcatattgacttcctgtattatctcacccctgatgggcagcgtttccgcagggcctgccgcctggtgcacgacttcacagatgccgtcatccaggagcggcgccgcactctccctagccagggtgttgatgacttcctccaagccaaggccaaatccaagactttggacttcattgatgtactcctgctgagcaaggatgaagacgggaagaagttatctgatgaggacataagagcagaagctgacacctttatgtttgagggccatgacaccacggccagtggtctctcctgggtcctgtaccaccttgcaaagcacccagaataccaggagcgctgccggcaggaggtgcaagaacttctgaaggaccgtgagcctaaagagattgaatgggacgacctggcccatttgcccttcctgaccatgtgcatgaaggagagcctgcggctgcatcccccagtcccggtcatctcccgccatgtcacccaggacattgtgctcccagacggccgggtcatccccaaaggcattatctgcctcatcagtgttttcggaacccatcacaacccagctgtgtggccggaccctgaggtctacgacccctttcgctttgacccagagaacatcaaggagaggtcacctctggcttttattcccttctcggcagggcccaggaactgcatcgggcagacgttcgcgatggcggagatgaaggtggtcctggcgctcacgctgctgcgcttccgcgtcctgcctgaccacaccgagccccgcaggaagccggagctggtcctgcgcgcagagggcggactttggctgcgggtggagcccctgagctga

SEQ ID NO: 28253 - DNA, 2263 bp, Homo sapiens
  SIMILAR (1330)..(1647): 791254mologous to Homo sapiens dJ102D24.3 (PUTATIVE novel protein),accession number AL021391,Smith-Waterman Score=400.
ctggacctgcgtggaggaattcgcgggagcgtctcgacctctgcggcgtcaatgggagcccgacgtttaactgcgcttaaggcttgtctttcccctgcccgaccgattgagccgaccttgcctgcgctacagcttccttattttcgtcgcctgttctcctgatcctgcgtgttctaaaaaccccttaggctttccatgggttcccagaccatggcggtggcgctgcccagggacttgcggcaggacgccaacctggcaaagaggaggcacgcggagctgtgcaggcagaagcgggtcttcaacgccagaaacaggataattgggggagacactgaagcctgggatgttcaagttcatgaccagaagataaaagaagctactgaaaaagctagacatgaaacctttgctgctgaaatgaggcaaaatgacaaaatcatgtgcatattggaaaaccggaaaaagagggataggaaaaatctctgtagggctatcaatgacttccaacagagctttcagaagccagaaactcgccgtgaatttgatctgtccgaccccctagcccttaagaaagatcttccagcccggcagtcagataatgatgttcggaatacgatatcaggaatgcagaaattcatgggagaggatttaaacttccatgagaggaagaaattccaagaggaacaaaacagagaatggtctttgcagcagcaaagggaatggaagaacgcccgtgctgaacaaaaatgcgcaggtaatgaaacagaagagacgagctggtctcaacgctctcttcaacaaaccaaccctacagttttttttaacgaagacgacaacatccctgctctcttggggtgtgtcagcgggtgatggaatagtgaggagctatgaggaagacaaaacagggaccaggcacagagatatgccctccctgctccactggaactgccctggccaacctcaccagtgacctccatgtcgcccaatccaaggtcggtttttgaccttcatctggacctaacagtcgatcacctcctgctcctggaaatgcgcatgcaagatagagcaggacagcaaggggcacaccaccagcctgtcccaggacgcaaaggcacgaacggccacacgtgggaaggtgctcctgtggccaggtcgatctgattgcttcttgcctcctttcagaggccctctacacagagacacaccaccagaaaggcagtttgtgcatctgtgaaagacttcaacaagagccaggtataggtactccgcgacctcgggctcgacgactggaggggaggatgagcccactacggcttcccaatcaccaacctcctgcgtggggacctgctctccgagaacccgcagcaggcagccagctccttcgggccccaccgcgtggtccctgaccgctggaagggcatgacccaggagcagctggagcagatccgcctagtccagaagcagcaaatccaggagaagctggtgactgccccgcccctttttccagagcccatagagccaggctctttgctcccactgccttccaggcccaccctgctgtttgagcggcagcagtggcggcggcagcgcgacctgcgcagagctctggacagcagcaacctcagcctggccaaggagcagcatttgcagtgagtgctgggtgggaccagggccaggtgggggaccgggtggagggaccgcggggctgtggaggtcggaagagcactgagtctgctgggggagtcaggaaggcttcctggaggaggcttcattggtgagacccaggaggaggatggcactgcctattcagggacggctttccaggtagagagaggggctcctgggctgccccagaaaagcctggagtctcttggttatagacaggactccaagagttcagagctccagctacaagaagatgtcaaatgcaagcaaacaggtgaacttgcacctgaaaaacacagtatttatttacttatttatctagctcttggcttaaactcaggagtcgatcaagtaatgctgccacccccaggctggtgtgggaccacgggtgggacccaggggactgcctcaggacctgtaactagagtgtggattgtgatggcctccccgacgagcgccgccccgtgctccacggcgcccagtcccatcgaccgcccaagggctgaggagtgcgagcgcacggcgcgggactagcaggcagctccacctgcagccccggtgcggaatccactggatgaagccagctgggctcctgagtctg

SEQ ID NO: 28254 - DNA, 731 bp, Homo sapiens
  SIMILAR (268)..(336): 431254mologous to Arabidopsis thaliana F24O1.6,accession number AC003113,Smith-Waterman Score=45.
gccttcagtgagaaaagtaactgcagatatggtggaaatactaagataactacaataatggagcctgaagctataactaagtttcagaaatcttgtgaaatacactcaggagcccagctggcttcacctagtggatcccgcaccggggctgcaggtggagctgcctgccagttccgtgccgtgcgcccagcactcctcagcccttgggtggtggatgagactgggcgccgtggagcagggggcggcgctcgttcggggaggctcgggccgcacaggagcccaccgagggggtgggaggctcaggcacggcgggctgcaggtcccgagccctgccccacgggaaggcggctaaggccccggcgagaaatcgagtgcagcgccggtgggccagcactgctgggggactcagtacaccctctgcagccattggcccgggtgctaagtctcccattttgcccagagccagcagggctggctggctgctccgagtgcggggcccaccaagtccatgcccacccggaactccagctggcccgcaagcaccgcacgcagccccggttcccactcgcgcctctccctccacacctccctgcaagctgagggagtgggctctggccttggccagcccagaaaggggctcccacagtgcagtgggggctgaggggctcctcaaatgccgccaaagtgggatcccaggcaggggaggtgccgagagcaagcgagggctctga

SEQ ID NO: 28255 - DNA, 405 bp, Homo sapiens; identical to SEQ ID NO: 2783
  SIMILAR (32)..(280): 951254mologous to Homo sapiens tyrosine kinase,accession number X78549,Smith-Waterman Score=421.

SEQ ID NO: 28256 - DNA, 438 bp, Homo sapiens
  SIMILAR (27)..(437): 861254mologous to Homo sapiens tyrosine kinase,accession number X78549,Smith-Waterman Score=631.
tttcgaattcccgggtcgagatcccgctcctgcaccagcagatgctgcagtcggagatccaggccattatgaagctgtttcacaaacacatcctggcgctgtacgccgtggtgtccgtgggggaccccgtgtacatcatcacggagctcatggccaagggcagcctgctggagctgctccgcgactctgatgagaaagtcctgcccgtttcggagctgctggacatcgcctggcaggtggctgagggcatgtgttacctggagtcgcagaattacatccaccgggacctggccgccaggaacatcctcgtcggtgaaaacaccctctgcaaagctggggacttcgggttagccaggcttatcaagtggacggcccctgaagcgctctcccgaggccattactccaccagatccgacgtctggtcctttgtgattctcg

SEQ ID NO: 28257 - DNA, 403 bp, Homo sapiens
  SIMILAR (38)..(388): 311254mologous to Ureaplasma urealyticum multiple banded antigen,accession number AF055358,Smith-Waterman Score=171.
cggacgcgtgggttcaaccagtgggaggatctgtgagagaccagggaagaggggcgtgtccgagccaggaactggactcacctgggcaacttcccgcacgagaccagggaagaggggcgtgtccgagccgggaactggactcacctgggcgacttcccgtgcgagaccagggaagaggggcgtgtccgagccgggaactggactcacctgggcgacttcccgtgcgagaccagggaagaggggcgtgtccgagccgggaactggactcacctgggcaccttcccgagagagaccagggaagaggggcgtgtccgagccgggaactggactcacctgggcaccttcctgtgtgagaccagggaagaggggcgtgtccaagccgggaaattgactcacctgggca

SEQ ID NO: 28258 - DNA, 1335 bp, Homo sapiens
  SIMILAR (1201)..(1061): 311254mologous to Sphaerechinus granularis metallothionein,accession number Z66530,Smith-Waterman Score=57.
atggttcctttcaaactattactgctcattgacaatgcatgtggtcacccaagagctctgccgaagatgtacaaggagataaatactgttttcatgcctgctaacacaacatccattctgcagcccatggatcaagaactaattttgactttcaagccttacttaagaaatacatttaataaggctatagctgccatagacagcaattcctctgatggatgtgggcaaaaacatacttcttactttttaaagaaagtctgtgaaaagcaaaaaagggacctttttaccagagctgactgtaatgtcagctacttgcggaatgtgacaactgcttgtcattctcaatgtccgatcaccagaaggtttctccccaatcatggattcatgcttcgaaccgtggccaacagttccagaggactgcgtggacccgtgagctcaggagcctcagacgcctacctggagagccaagctggtgttcgaggtggcgccttcagggtccaccctgctgtccaacagccccgtggccaccagagggccgtgcctggcccggatgtgtgccctggaaaatccagagaagacataaagagagtctctgagttaaatgaagatttaggcagtgcagcatggtcccccatccgtggcagctgtagcagcagcatcactttggaacttgtcagaagggcagattctcaggcccatccagacctcctgaatcaggaactctttgtaggcccagcctcctgtgttgtcataagccctccaagtgattctcattgcactcaaggtgacctggggtctcaggtcccaaataaactgtccccaaggtccacaggaaacaggaaagatgcccctgcagcattgtctgtggtgttggtggggcagtggtttagagatcatccacatgcccaccacgggacggatgaaaaacacgatcatgccggcttctgggagcagaggcctggagtgcttcctgagtccagccacctggtgggcacccccagagactcagccctgactccaggcggccagccggcagcacaggtacagccggatgcccgacacacagacatgcaggcacaaatgaacagacgcacgagcacatacatcctgaccgtttccaggggctccaggacaccccgccaagttctcccctgcaccccacacagccacccacaggtatgcacagctcacccaggtcacacacacgcaccagggtatggatgtaaccctgtgcctgcagccccactccgggacacactaagtcacccacaaggacagtcattcccacagtcacagcacatgggaaatccccggggtcccattgtggaggcctga

SEQ ID NO: 28259 - DNA, 2152 bp, Homo sapiens
  SIMILAR (962)..(2149): 951254mologous to Homo sapiens tyrosine kinase,accession number X78549,Smith-Waterman Score=2008.
gaggggtgtcatcttcgagtgcgtctctgactacatccagcctgtttgcacgttcgcctggcaccatgggttctacccagagaaaggccctctgctgaatcgctggcgccgtcctcgcaggcaagtaacctcaaggcctccccagtgtcccacgtcactgggctgcactaagcgaccagagaacatgaagattgtactgccagaactggctgctcctgccgatcaaggccagctcatctgtccccaaagtcctctggtgtcacaggtggcctcccacacgccccctcctatgccttcaggcaaatggagaagctgtggcaatcgtccccgttctgtggcagatatatcgacaaggtcatctagcgccacaccaggtggatggttcagaaaggctgggttctccaagctgcacaccagaggctgcacagagctgaagtccggcgagtcccaaggctcccagggcggcccgctgccccacaccctccggcaaacacgaaggcgccaccctcggcacccagcagcatctgcctcagcccctgcagagggcggcgctggtgtgggctgcagagagtatggcccgcaggcagccgccatgggcctgcccgagctgagtggctttcagcagaccaggcggccactcaggcctgcgtggactggatgtgtccccagaatccacatgctgaaaccctcactccagtgtgatggtgaaggtgcccaggtgagtccagttcccggctcggacacgcccctcttccctggtctctctcgggaaggtgcccaggtgagtccagttcccggctcggacacgcccctcttccctggtctcgcacgggaagtcgcccaggtgagtccagttcccggctcggacacgcccctcttccctggtctcgcacgggaagtcgcccaggtgagtccagttcccggctcggacacgcccctcttccctggtctcgtgcgggaagttgcccagccgggagttagtgcgcgcgagtggctgtgtgtgcgtgcgtgtgagcgtgtgggcaagtggttctttggctgcatctcccgctcggaagctgtgcgtcggctgcaggccgagggcaacgccacgggcgccttcctgatcagggtcagcgagaagccgagtgccgactacgtcctgtcggtgcgggacacgcaggctgtgcggcactacaagatctggcggcgtgccgggggccggctgcacctgaacgaggcggtgtccttcctcagcctgcccgagcttgtgaactaccacagggcccagagcctgtcccacggcctgcggctggccgcgccctgccggaagcacgagcctgagcccctgccccattgggatgactgggagaggccgagggaggagttcacgctctgcaggaagctggggtccggctactttggggaggtcttcgaggggctctggaaagaccgggtccaggtggccattaaggtgatttctcgagacaacctcctgcaccagcagatgctgcagtcggagatccaggccatgaagaagctgcggcacaaacacatcctggcgctgtacgccgtggtgtccgtgggggaccccgtgtacatcatcacggagctcatggccaagggcagcctgctggagctgctccgcgactctgatgagaaagtcctgcccgtttcggagctgctggacatcgcctggcaggtggctgagggcatgtgttacctggagtcgcagaattacatccaccgggacctggccgccaggaacatcctcgtcggggaaaacaccctctgcaaagttggggacttcgggttagccaggcttatcaaggaggacgtctacctctcccatgaccacaatatcccctacaagtggacggcccctgaagcgctctcccgaggccattactccaccaaatccgacgtctggtcctttgggattctcctgcatgagatgttcagcaggggtcaggtgccctacccaggcatgtccaaccatgaggccttcctgagggtggacgccggctaccgcatgccctgccctctggagtgcccgcccagcgtgcacaagctgatgctgacatgctggtgcagggaccccgagcagagaccctgcttcaaggccctgcgggagaggctctccagcttcaccagctacgagaacccgacctga

SEQ ID NO: 28260 - DNA, 3026 bp, Homo sapiens
  SIMILAR (1875)..(3023): 981254mologous to Homo sapiens tyrosine kinase,accession number X78549,Smith-Waterman Score=2005.
atgagcagaattcagacgtacgtggtgcccagctccagcggaggagacagtcagtcttcgcccaggcggccagggcagcagcggattccacgcgggcgctgtcccttcagcacctccagcaccatcctctccccggaacctgcaagcccagccccttctctggtctcctccaggcaagtaacctcaaggcctccccagtgtcccacgtcactgggctgcactaagcgaccagagaacatgaagattgtactgccagaactggctgctcctgccgatcaaggccagctcatctgtccccaaagtcctctggtgggctccctccccagcagaaagcaaaccacaggggctgtgaccgcctactgcccgggctcccccgggcttcccgaactgtcctccctggagcctggcgcagagaggggcccagagtcaatggttgttggaggacaaactgaagcacatctgggtcactgccagggagaacccacagggacaaggtcatctagcgccacaccaggtggatggttcagaaaggctgggttctccaagctgcacaccagaggctgcacagagctgaagtccggcgagtcccaaggctcccagggcggcccgctgccccacaccctccggcaaacacgaaggcgccaccctcggcacccagcagcatctgcctcagcccctgcagagggcggcgctggtgtgggctgcagagagtatggcccgcaggcagccgccatgggcctgcccgagctgagtggctttcagcagaccaggcggccactcaggcctgcgtggactggatgtgtccccagaatccacatgctgaaaccctcactccagtgtgatggtgaaggtgcccaggtgagtccagttcccggctcggacacgcccctcttccctggtctctctcgggaaggtgcccaggtgagtccagttcccggctcggacacgcccctcttccctggtctcgcacgggaagtcgcccaggtgagtccagttcccggctcggacacgcccctcttccctggtctcgcacgggaagtcgcccaggtgagtccagttcccggctcggacacgcccctcttccctggtctcgtgcgggaagttgcccagagactcagccctgactccaggcggccagccggcagcacaggtacagccggatgcccgacacacagacatgcaggcacaaatgaacagacgcacgagcacatacatcctgaccgtttccaggggctccaggacaccccgccaagttctcccctgcaccccacacagccacccacagatcccaccagccagcaagctaaagcatggcggccatcccctccagcggctcgctcgtggccacccacgactactaccggcgtgagtagcccctgccccccatccacgcggatgctctgctggcgccagtgccggccccgtgcaggctgcggaaccagcgctcggcctgaaggccggccgcctgggttccacttccagcaacagctcctgcagcagtaccgagtgccccggggaagccattccccaccccccaggagctggcagcatcaagaccccacttcgcttctctcaggtctccccaaggctgacccgggtcattggtgggccagcttctttttcgggaagtccaccctcccgttcatggccacggtgttggagtccgaaaagcactcggaacctccccaggcctccaacagcatgaccgcctgtggcctgggctcgggacgccccgaggaagcagcccggcgccatccatggtggccaggctgctggcaccaaagggaggcgaacctcaggcggcaatgctggctcacctcttcctaacaagccatggacctgagactggggaccactgccatatggtaaaggccctggccaaaatgcaaacctccatcaggtggttctttggctgcatctcccgctcggaagctgtgcgtcggctgcaggccgagggcaacgccacgggcgccttcctgatcagggtcagcgagaagccgagtgccgactacgtcctgtcggtgcgggacacgcaggctgtgcggcactacaagatctggcggcgtgccgggggccggctgcacctgaacgaggcggtgtccttcctcagcctgcccgagcttgtgaactaccacagggcccagagcctgtcccacggcctgcggctggccgcgccctgccggaagcacgagcctgagcccctgccccattgggatgactgggagaggccgagggaggagttcacgctctgcaggaagctggggtccggctactttggggaggtcttcgaggggctctggaaagaccgggtccaggtggccattaaggtgatttctcgagacaacctcctgcaccagcagatgctgcagtcggagatccaggccatgaagaagctgcggcacaaacacatcctggcgctgtacgccgtggtgtccgtgggggaccccgtgtacatcatcacggagctcatggccaagggcagcctgctggagctgctccgcgactctgatgagaaagtcctgcccgtttcggagctgctggacatcgcctggcaggtggctgagggcatgtgttacctggagtcgcagaattacatccaccgggacctggccgccaggaacatcctcgtcggggaaaacaccctctgcaaagttggggacttcgggttagccaggcttatcaaggaggacgtctacctctcccatgaccacaatatcccctacaagtggacggcccctgaagcgctctcccgaggccattactccaccaaatccgacgtctggtcctttgggattctcctgcatgagatgttcagcaggggtcaggtgccctacccaggcatgtccaaccatgaggccttcctgagggtggacgccggctaccgcatgccctgccctctggagtgcccgcccagcgtgcacaagctgatgctgacatgctggtgcagggaccccgagcagagaccctgcttcaaggccctgcgggagaggctctccagcttcaccagctacgagaacccgacctga

SEQ ID NO: 28261 - DNA, 7487 bp, Homo sapiens
  SIMILAR (814)..(2166): 1001254mologous to Homo sapiens tyrosine kinase,accession number X78549,Smith-Waterman Score=2422.
ccatgggcgcttccaggccgcactcacggtccttgcctgccccctggcgtccgtgtggaggaaggcagtgcccgtttcttcagccgtgggtgcccctggctctgcctccccggggatcccccaaaaccctcgggccctcctcttccgggaagtcctccgggccgacccacacagctgtcgctgccctgattccactccctcttccctgcttggcccttacccgagggcgggcctgcccatgaggccgctctcaggacgcctgcccacagcagctcctgacattgggccctgtgctcaggggtggagtctggggctgggtgagggcaccgacgggtggaggggaagctgccggaagcggggagagaggcggcccccacctgtgcccccgcagctctgagggttgggaaggcagcgcctgcagccctcaccttcctgccctcaggctgcgaggcttgttcccagagggccgttggcttccctgagtgcctgagtgtccataagttggacccccaagaagccccaaccgggaggtcctcctccccctctcctgcgctcaggccggccctggcggtgcttgcccagtgggttcccatagtgcgggcgctaagtgctcagatgggccccagtgggcctgaggacttgtggggccggctgggccctcaggaggagccggggtgctctggagcgcctgtgggtgctgggtgtggctgcttcccggcctgtcatgaggaagtgggacggcccgcctgccacgcccagctctgggtgctccagctgggccacagcctggtcctgccgctgcgcccgcccgccatggtgtcccgggaccaggctcacctgggccccaagtatgtgggcctctgggacttcaagtcccggacggacgaggagctgagcttccgcgcgggggacgtcttccacgtggccaggaaggaggagcagtggtggtgggccacgctgctggacgaggcgggtggggccgtggcccagggctatgtgccccacaactacctggccgagagggagacggtggagtcggaaccgtggttctttggctgcatctcccgctcggaagctgtgcgtcggctgcaggccgagggcaacgccacgggcgccttcctgatcagggtcagcgagaagccgagtgccgactacgtcctgtcggtgcgggacacgcaggctgtgcggcactacaagatctggcggcgtgccgggggccggctgcacctgaacgaggcggtgtccttcctcagcctgcccgagcttgtgaactaccacagggcccagagcctgtcccacggcctgcggctggccgcgccctgccggaagcacgagcctgagcccctgccccattgggatgactgggagaggccgagggaggagttcacgctctgcaggaagctggggtccggctactttggggaggtcttcgaggggctctggaaagaccgggtccaggtggccattaaggtgatttctcgagacaacctcctgcaccagcagatgctgcagtcggagatccaggccatgaagaagctgcggcacaaacacatcctggcgctgtacgccgtggtgtccgtgggggaccccgtgtacatcatcacggagctcatggccaagggcagcctgctggagctgctccgcgactctgatgagaaagtcctgcccgtttcggagctgctggacatcgcctggcaggtggctgagggcatgtgttacctggagtcgcagaattacatccaccgggacctggccgccaggaacatcctcgtcggggaaaacaccctctgcaaagttggggacttcgggttagccaggcttatcaaggaggacgtctacctctcccatgaccacaatatcccctacaagtggacggcccctgaagcgctctcccgaggccattactccaccaaatccgacgtctggtcctttgggattctcctgcatgagatgttcagcaggggtcaggtgccctacccaggcatgtccaaccatgaggccttcctgagggtggacgccggctaccgcatgccctgccctctggagtgcccgcccagcgtgcacaagctgatgctgacatgctggtgcagggaccccgagcagagaccctgcttcaaggccctgcgggagaggctctccagcttcaccagctacgagaacccgacctgagctgctgtggagcgggcatggccgggccctgctgaggaggggcctgggcagagggcctggacctgggatcaaggcccacgcgcttccctggggtttactgaggtgatgggtgcaggaaaggttcacaaatgtggagtgtctgcgtccaatacacgcgtgtgctcctctccttactccatcgtgtgtgccttgggtctcagctgctgacacgcagcctgctctggagcctgcagatgagatccgggagactgacacgaagccagcagaggtcagaggggactctgaccacagcccgctctctggctgtctgtctgcagtgcccggctgagggtgggaggcaaacacgccttgttcctgctcttcccagttcagcttggtgggagaaagtcattcgcgtggctcgggacgctcatgtaaatttggttttggtgctcaagggttctttcctcccaggggcaggtgtttctttcctgtttgtcttgtgtcttgagagcttggccttatgaccagtgagaactctctccctggtctctgccagcccaagcatcactgcccgaggcgccagctcagtttcaccgtccacgtccacaaggggcttttcccaccttcacctttgtcgctgggtcagtgctggaaagcgcccctcactcctgcgctgacaagggcccttctctactgtctgtggggtggttccgggctgggggggctgcctcctttgcacctgattttgaaggtgtctctttcatccatggttaagtcataaaaagcttattggttttggttttgactcacctgaaagtttttttggtttaaaagaagaataggcggggcacggtggctcatgcctgtaatcccagcactttgggaggccaaggcaggaagatcacttgaggtcaagagttcaagaccagcctggccaacatggcaaaacccagtctctactaaaaaatacaaaaaattagctgggtgtggtggtgggggtgggcgcctgtggtcccagctacgtgggaggctggggcacaagaatctcttgaacctgaggggcgcaggcttgtagtgagccgagatcatgccactgcactccagcctgggctacagagtgagactctgtctaaaaaaagaacaaaacaaacaaaaaagaccaggcgcggtggctcacgcctgtaatcccagcactttgggaggccaaggtgggcagatcacgaggtcaagagatcaagaccatcctggctaacatggtgaaatcccgtctctactaaaaatataaaaattagctgggcgtggtggcacaaacctgtagtcccagctactcaggaggctgaggcaggagaatcgtttgaacctgggaagcggaggttgcagtgagccgagattgcaccactgcactccagcctgggcgacagagcaagactccgtctcaaaaaaaaaaaataataataataatagctaaatactggaaacaaccaatattccatcaacaggagaatgaataaacaaattgtggtatagctatacaatccaatactatgcagcaataaaaattgaatcaatcactgatacacataacatgcaaggatgaagctcaaaaacattacactgaacaaaagaggccagacacaacagtatgtctgagtccatttacatgaaattctaggaaaggtagaatatcctacagtgtagagaacacaataataagaaaacaaacaacctgatttaaaaataggcaaaccaagagtagtagtgtgtgcctgtagtcccaactacttgggaggctgaggcgggaggatcccctaagcccaggagctcaagacctgcctgggcaacatagcaagactctgtctcaaaaaaaaaaaaaaataaatgggcaaaagatataaacagaaaactaaccaaagaggtatacagatggcaaataagcacatgaaaatcatttgttgcctgtggctggggtagggataggtactgaaggtaaatgggtacaaggggactttttagttgacgaaaattcactatattttgcttacagtggaagttaaacaggtttatacattagtcaaaattcatagaactggactttaagttgtgtgcatttgtttgtgtatgcattctaactcaatatacttaactataaaaaaagaatgaaaacaaaatttactcaagaaagaaagtaacaggccaagataacttccctagtgaattctaataaatatttaaggacgacataagttttaaaaaaaatcaatcttactcaaactaaagcataaaaaagaggaaatacttcacagttcattttataaagtcaacataactttgaggcctaaacctgacaaggacattacaaaaaagtaaaattacaggccgatctgtctcatgaacatagatgcaaaattcctaaacaaaatattagcaaactgaattcagcacgaaatagaatgaataaaacatcacaaccaaaccgaaattatttcaggaatgtaagattattttttcattcaaaaattaagcaacataatttagcacattaacaaaagaatggagaaaaatcaagtgatcatcaaaatcaatgcaggaaagcatttgacaaaattcaacaccaatttaggattttaaaaatttaggcaattttggccaggcgcagtggctcatacctgtaatcccagcactctgggggaggctgaggcgggcagatcacatgaggccaggagtttgagaccagcctggccaatgtggcaaaaccctgtctctactaaaaatacaaaaattagccatgcttggtggtgcacgtctataatcccagttacttgggaggctgaggcataagaatcgcttgaacctgggaggtgcaggtaggagtgagctgagatcctgccactaaatctcagaaagctattttgtaaatactgacaaggtgattccaaaatttacagtcatgtgctacataacaatgtttgggtcaagagaccactcacatatgaagatggtcccataagattataatgaagctgaaaaatcctgcaacctagggatgtcatagctgacagaaggtcaagtgcaaagcattactcacatgtttgtggaggtgctggtataaataaacctactgtgctgccagctgtataaaagtctagcatatacaattatgtacagtacatacttgataataaacaactacgttactggcttatttattttattgtactacattttatattgttattttagagtactcctacttacatataaaaaaaaagttaactgttaaatagcctcaggcaggtctttcaggaggtattccagaagaaggcatgttaggagataacagctccatgtccgttactgccccgaagaccttccagtgggacatgatgtggaggcggaagggattgatactgataatcctggctctgtgtaggcctagtaagtaatgtgtttgcttctgtctcaatttttaacaaaagtttaaaaacttaaaaatattttttaacagaaaaaagcgtataggccaggcgcggtggctcacacctgtaatcctagcacttttgaaggccgaggcgggtggatcacttgagatcaggagttcaagttagagatggtgaaaccccatctccactaaaatacaaaaaattagccgggcgtggtggtgcatgcctgcaatcccagctactcgagaggctgaggcaggcgaattgcttgaacccaggaggtagaggttgcagcgagccaagatagcgccattgcactccagcctgggcaatagagtgagactccgtctcaaaaaaaaaaaaaaaaaaaaaaaaagaaaagggccgggtgcagtggctcacgcctgtaatccctcgggcagatcatgaagtcgggaaatcgagatcacggtgaaaccccatctctactaaaaatacaaaaaaaattcggtgacgggcacctgtagtcccagctactcgggatgctgaggcaggagaacggcgtgaacccggaaggcggagcttgcagtgagccgagatcgcgccactgcactccagcctgggcaacagagcgagactccgtctcaaaaaaaaaaaagaaaaaagaaaagaaaagagcttatagaataaggatacaaagtaaaaagccagatgtggcagctcacacctgcaatcctagcacttggggagattgaggcaggaggactgtttgagcccaggcgtgtgaaactggcctggccagcgcaggaagaacttgtctctacaaaaaatacaaaaattagctgggtgtggtggcgtgcacctgtggtcccagctactcaagaggctgaggtgggaggatcactggagctagagaggtcaaggctgcagtgacccatgatcgcgtcactgtactccagcctggatgacagagcaagaccctgtctcaaaaaaaaaaaaaaagaaaaaaagaaaaaaatttgtacagctatacatgtttgtgattaagctaagtgtgattacaaaagagtaaaaagtttcaaaaaattaaaaagtttataaaatgaaaagttacaataagccaaggttaattattgaagatagttttttaaaataaatttcgtgtgtatccttagtatttataaagtctacagtagtgtacagtaatgaactgagccttcacattcacccaccactcactcaatgactcaccgaaagcaacttccagtcctgcaagttctattcacagtaagtgccccatgtagataggtgtatcgtttgtcttttataccagatatatctttcagtgccagaaagtaagaaaatgctcaacacacacacacacacagacacacacacactgagggagtaaaagggacacaagagccacctgaaagagctcccacagctaaagttgtaacaaatagagcaaaaaaaaaaaaaaaaagaaagaaagaaaagccaaattataagctaaagtacaaaataagtatctatgagtctacactgatatatgtaagtgattgaataaattaatatgtagaggagaagaggtaagttttttgtgcagaagaattccaaataatttatgtggataatacccctggttcaaggaggtagaacattactttctatcacttaaatatgggctacacacagtgacttccttccagagagcagagtctggaaatgggaagtgaggagaggagtaacttatagtggagaaaccagatgaaaacaaggtcatcatcaaggttaacataaacagtgatgtcatgttgatcacatgtacctttaatatgatataatgaaaatggccctttatctttgtggtcttcctgtcccaaacccataatccatgaaattgtgagaaaaaca

SEQ ID NO: 28262 - DNA, 591 bp, Homo sapiens
  SIMILAR (591)..(418): 1001254mologous to Homo sapiens DWF-1,accession number AF239742,Smith-Waterman Score=297.
ttacagagaggatttgaggaaggaatatttcctttgatttttatcaggctccttgactgtggttataatggaggtggactcagtctcagcacatgctgagcagtaagttatgtgagtgcagggaccttctgtcttgcttgctgattcatccccagtgcctccaacagtgcctggcacagtaggtgcctctacacaatggtgttcttggtggaaagtcgcctctccatcagcaatggttggtccagggctcaaacccaggtcttctgactccaaggccaggacatcctctggtgcttcctcgctgtttgtggaccatttggtggagattctacgagcatcttgcattatctcagtttcagccctcatcagctctttgcggtgtaatgctccccatgagtcaccaaattcccctatattctggtgtcgcgtgcgctggcggcccgcgcggcagccaagccaaaggccgaggccgaggccgagcgcggcgcccagcagcacggcgggggccagcagggcgggcgccggccgcagcgcgtcccgccccagcagcagccgcgcgtcgctcttgcaggccgccccgccgcgggccat

SEQ ID NO: 28263 - DNA, 536 bp, Homo sapiens
  SIMILAR (246)..(320): 321254mologous to Homo sapiens intrinsic factor-B12 receptor precursor; cubilin,accession number AF034611,Smith-Waterman Score= 39.
  misc_feature (1)...(536): n = a,t,c or g
aggagatttcccggctgggtgcgagtgggtccttgttgctcctgctggaaggcttgtcaccatcaacttctacttcatcagcattgacgatccaggagactgtgtccagaactatctcacactctatgatgggcccaacgccagctctccatcctctggaccatactgcggaggcgacaccagcatagctcccttcgtggcttcctcaaatcagcacgctggacagcactctgccatcctgatacatgacccctgctgatgccacagagaataagctgaacttgtatggtttttcaccaaaccatggatagaatcaatatttgtnnnnnnnnnnnnnnnnnnnnnnnnnnnnnnnnnnnnnnnnnnnnnnnnnnnnnnnnnnnnnnnnnnnnnnnnnnnnnnnnnnnnnnnnnnnnnnnnnnnnnnnnnnnnnnnnnnnnnnnnnnnnnnnnnnnnnnnnnnnnnnnnnnnnnnnnnnnnnnnnnnnnnnnnnnnnnnnnnnnnnnnnnnnnnnnnnnnnnnnnnnnnnnnnnnnn

SEQ ID NO: 28264 - DNA, 363 bp, Homo sapiens
  SIMILAR (42)..(19): 621254mologous to Homo sapiens zinc finger protein,accession number AF024708,Smith-Waterman Score=35.
  misc_feature (1)...(363): n = a,t,c or g
catcctgatacatgacccctgctgatgccacagagaataagctgaacttgtatggtttttcaccaaaccatggatagaatcaatatttgtnnnnnnnnnnnnnnnnnnnnnnnnnnnnnnnnnnnnnnnnnnnnnnnnnnnnnnnnnnnnnnnnnnnnnnnnnnnnnnnnnnnnnnnnnnnnnnnnnnnnnnnnnnnnnnnnnnnnnnnnnnnnnnnnnnnnnnnnnnnnnnnnnnnnnnnnnnnnnnnnnnnnnnnnnnnnnnnnnnnnnnnnnnnnnnnnnnnnnnnnnnnnnnnnnnnnnnnnnnnnnnnnnnnnnnnnnnnnnnnnnnnnnnnnnnnnnnnnnnnnnnnnnnncggcaa

SEQ ID NO: 28265 - DNA, 3366 bp, Homo sapiens
  SIMILAR (1194)..(1289): 311254mologous to Homo sapiens intrinsic factor-B12 receptor precursor; cubilin,accession number AF034611,Smith-Waterman Score= 40.
atgatggcctcatttcccgtgtctcatcctggctttgttcgccctcatctgtctggatttaccttatcccatatcacacaactggtcctcagccataacaagctaacaaacttgaatgattttctaatcatgtggcaagaatttgtgaaggagctttccgagtccagtgaaattgagcagaatgtcatgttgagggatttgtgtcatgaatttatgtgtatggtcagcttttgtggaagcatggatcatttcatattcttcctgaatgcctgtgactgggcccttagtggcttcgcagtaattacctgtataaaccgagtgttcattgctcccaggagaatcctttttctagaggtcctgttttgtgctaagcggaagccagctaacgtgctaattcctccacaatatatttttaaatggaaccaccccaatcgtgagaacttcagaacggtggcaggctgtggagaaaataagacgggggagtgtcagtgtaggagctccatggacgaagcgttcctgtggctctggatccttactccttccagtcgaagaacgggagaattcctaagcctgtccagcaaagtggaggtgcttctggccaaagagaagttaatgaacccttcaggcactttgggctgcttgtggaaccttccagaaactgctgggggagatgggagtgctgaattgccaagtctgggctggcacgtcagatggacaaaactcttgaatcacattcagttcttcagtttaggaggacctgaaggaaagaaggtcatgccggtggtgccaccgaacatcgcagaactgaagaatttggaggtgctcaacttttttaataaccaaatcgaggagctgcccacacagatcagtagccttcagaaactcaaacacctgaaccttggggaaatccaagcacccactatttcgatggatgtttctagaagggagccatggttgggaattgttctgggtgctggcgacaccacagtgaagaagtcagacagagtctctgtctccccacacgtgggacttacatccttgttgggaaagagaccggacaaacttcacctgaggaaggaagagcagcaggaacagggctgtggacaggagtcctcctgggatgaaggaagtgcagctagcagtgaggtgtgggcagcctgggaaggaggcacaggccagagcagctggggcttgcagactgtgggagggagctggaattttactttaggtgcaatggggatctgccgaagcattttagacagagcaggagcatcacctcattggagtttgcagacatgcaggcagttcagtggagaacactatggctgctccggaattaggcctattaagaagatgtttcagtgggaacaggtgaaggacgatggagatcacctggagatggagccctctgggatatattttgaagtgccttgtggtggaacgtacaatgcaacttggaccccacaaaatatttcatcacccaattcatcagacccagatgtcccattttccatctgtacttgggtcattgattcccctccgcatcagcaggtcaagataactgtgtgggcattacagctgacctcgcaagactgcacgcagaattacttacagcttcaggactcaccgcagggtcacggaaattcaagatttcagttctgtggcagaaatgcttcggctgtgccagtgttttattcttctatgagtactgcaatggtcattttcaaatctggagttgtaaacagaaactctagaatgagtttcacctatcagattgcagtgtggataaacttcgtttctctgatgcaaaacggagtttaccttcaacttcttgatattgggcatgtgaatttttccatgcagtacttgaggaaagcaattagacattgtgttttgaaggcttcccggatcctgctgattggtgcattttacagagcgttgattggtgcattttacaatcctcttgctagctacagagcgctgattggtgcattttacaatcctcttgtaagacagaaaagttctccaagtccccacttgacccaggaagtccaactggcttcacctctcacctggactcaaagctcccagccagcccctgttgcccagagcacacatgctgatgacgagggccactgtctgccttcctccacctggggtatttgtcacatggagactgagtcaggttgcattaagaaatgtatgcaaaagggcactggaagcaagaaagaagggatctatggtacttggatgttccgtggaagaaaggacacaggactgttagaggatgcacctcagagaatcacactgtgcaccttctcagtagtggtcaaccagagacaggcagagatactatccagacaacctcaggaaaatgtcagccgtatagaatggatatcgcagaaacactgtgctcttgtcatggcaccctacctaggacacacgacttccatttatcccattgataaggatcttcactttgatcgcagctacataaaatggttatcttacagtgaaaccgggacagctctgtgctcatctgcaaggacacctggaagtttggtactgattcttaatcaagataaggaggagtgggccagcttaaagttaaaaacgcccctggtggtccccagagccagcttgcttgaacattcagggaggtgcggatcggatcgatgccttacacctggacacagggcctgggttggcttggtgactggccaagcacagaagacagtgcttgatgtttctgcccaggctctcctgacaccaagattccttggacacgtgttgatggttcataatctggagacaaaatgtgccctttggagccacaacatatggtccaaagaatggaaagctggcgttgggcccatcatagagtgtgagatagttttggacacagtctcctggattgtcaatgctgatgaagtaaaagttgatggtgacaagccttccagcaggagcaacaaggaccccctcccagtacgtgttgtttggtgctttcctgtacaaagtgcaaatgtcttaccagagggtgatgaagtccagatgatttcatatccacgatcagaagttacactatcactcttaaatcgaagaatggggccacctagagcagtgggcatctctgggacatcagaggatcttgaaaggggaggtgaaggcatgaaaacagattccaagcatggtctagagctcggccctcgcttggtagtaacacagtcagaattctcagtcagacatttccgttcccaccgcagttcacaagaacggaatgctgaggcttcctggtacagctgccaagaaactatgcccacagccttcccactgagagccagatggagctacattttacaggcctaa

SEQ ID NO: 28266 - DNA, 921 bp, Homo sapiens
  SIMILAR (166)..(420): 741254mologous to Homo sapiens intrinsic factor-B12 receptor precursor; cubilin,accession number AF034611,Smith-Waterman Score= 353.
atggttcatgtaaactctgataccaagactatccagaagcaccaaaggatgtttttagaactagtgattcctgagctagggctggcccagagcatgaaagccaggggaccaagcctctttgaaaaaagtgaactgatggctgaacctctgcttccagtgaaggatgctcagtgtgggggaagagtaacagggcaaagtggtgttgttgaaagcattggccatctaatgcttccatatagagacaacttattctgtgattggcatctccaggggctctccagacactatctcaccatctcttttgaagattttaaccttcagaattcctctggctgtgaaaaagactttgtggagacctgggactatcatacttctgagtgtggtggggatcttcagggctctgctggaacatctacttctcccaactacccgaacctaaatcctcatggccggatctacaagtggagaatcaccgccccagaaggaaggcagatcaccctaacatttagcaacctgaggctggccacgcatccgtcctgcaacaggcatgtgggtctgcctttgctgccactctacttgattgacaacttgccaaaaagaggaagaagacgaaagaggcagaagaaggagaaggaggatgagaaggaggaggagaagagggagaagaagaagggggagaagaagaagggggagaagaagaagggggagaagaagaagagggagaaggagagggagaaagagacagagggagaagggaaggagaaaaaagaagaaggagaaaagaggaaaaggataagaagaagaaggagaaagagaagaaggaggagattgagaaggagagggagaaagagaaaagaagaaggagaagaaaaaaaaagagtaaagaagaaagaagatctgctggtgcagaggcagctttaa

SEQ ID NO: 28267 - DNA, 1422 bp, Homo sapiens
  SIMILAR (109)..(1026): 691254mologous to Homo sapiens bA124N14.3 (intrinsic factor- B12 receptor precursor),accession number AL133415,Smith-Waterman Score=1139.
atgaggaagaaagagaaaggtgagaccatgcgacaggaccggagcagaagtcagcagctggtggatcttgagagaaaattccaaggcttgcagcagactgttgacaaaaaggtttgcagcagcaatccttgccagaatggtggaacctgcctcaatctgcatgattcctttttttgtatctgtcccccacagtggaagggtcctctctgctcagctgatgttaacgaatgtgagatttactcaggaacacccttgagctgccagaatggaggcacatgtgttaatacaatgggaagttacagctatttttacttaactgaagaaaagctcatgagtcctttactctcaccccgtgaagaaatccttgctctaacatccccaaggaaccggaagaaggctcccgtgattggcacagagaaaactgccaaaaagctgccaccccagcaattggttctggggcccaccacaggcaagccgaatcctgtgcctggaggctggcaaggcaatggatatatttgcgaagatatcaatgaatgtgagataaataacggcggctgttctgtggctccacccgttgagtgtgtgaatacacctgggtcttcccactgccaggcctgtccaccagggtaccagggtgacggaagagtgtgcacactcacagacatctgctcagtcagtaatggaggctgccacccagatgcctcatgctcctcaactctaggttccttacctctctgcacgtgtctcccgggttatactggaaatggttatgggccaaatggatgtgtgcagctcagtaatatttgcctaagtcacccctgtctaaatggacaatgcatcgacactgtctctggttatttttgtaagtgtgactcaggttggacaggtgtcaactgtacagaaaacatcaatgagtgtttgagcaacccctgtttgaatggaggaacttgtgttgatggcgttgattctttcagttgtgaatgcacacgtctctggactggagctctctgtcaggttcctcagcaaggtacagtcagcatttcttatgccacggatgctcacagcatagcagcagcatcctttatttgtggagagtccctctcaggaataaatggaagcttcagctacaggagcccggatgttggttatgttcatgatgttaactgcttctgggttatcaaaactgaaatgggaaagtatgcagctccaaaaccgccagatgctttggtagccctaaatcagtgtggaggtatcctgactggtccttacggttctattaagtctccggggtatcctggaaactatcccccaggaagagattgtgtctggattgttgtaactagtcctgacctcctggtaacatttacttttgggaccttgagcctcgagcaccatgatgactgcaacaaagattaccttgag

SEQ ID NO: 28268 - DNA, 11344 bp, Homo sapiens
  SIMILAR (27)..(10895): 1001254mologous to Homo sapiens intrinsic factor-B12 receptor precursor; cubilin,accession number AF034611,Smith-Waterman Score= 19884.
ctcttacctgccaacctgggaggttgatgatgaacatgtctttaccttttctttggagtttgcttaccttattaatatttgctgaagtaaatggcgaacgtggagaacttgagctgcagagacaaaaaagaagcatcaatctccaacagcctcgaatggctacagagagaggaaatttggtgtttcttacggggtctgctcaaaacattgagtttagaaccggatccctgggaaaaattaaattaaatgatgaagatctcagtgagtgtttacatcagatccagaaaaacaaagaagatattatagagttaaaagggagcgcaattggtctgcctcaaaatatatctagtcaaatctatcagcttaattccaagctggtggatcttgagagaaaattccaaggcttgcagcagactgttgacaaaaaggtttgcagcagcaatccttgccagaatggtgggaactgcctcaatctgcatgattcctttttttgtatctgtcccccacagtggaagggtcctctctgctcagctgatgttaacgaatgtgagatttactcaggaacacccttgagctgccagaatggaggcacatgtgttaatacaatgggaagttacagttgtcactgcccacctgagacgtacggaccccagtgtgcatccaaatatgacgactgtgaagggggttctgtggcacgctgtgtccatggcatctgtgaggatttaatgcgagagcaagctggagagcccaagtacagctgcgtctgtgatgctgggtggatgtcttcacccaacagccctgcctgcacgctggacagagacgagtgcagcttccagcccgggccttgctccacacttgtgcagtgtttcaacactcaaggctctttctactgtggggcctgtccaacaggctggcaaggcaatggatatatttgcgaagatatcaatgaatgtgagataaataatggcggctgttctgtggctccacccgttgagtgtgtgaatacacctgggtcttcccactgccaggcctgtccaccagggtaccagggtgacggaagagtgtgcacactcacagacatctgctcagtcagtaatggaggctgccacccagatgcctcatgctcctcaactctaggttccttacctctctgcacgtgtctcccgggttatactggaaatggttatgggccaaatggatgtgtgcagctcagtaatatttgcctaagtcacccctgtctaaatggacaatgcatcgacactgtctctggttatttttgtaagtgtgactcaggttggacaggtgtcaactgtacagaaaacatcaatgagtgtttgagcaacccctgtttgaatggaggaacttgtgttgatggcgttgattctttcagttgtgaatgcacacgtctctggactggagctctctgtcaggttcctcagcaagtttgtggagagtccctctcaggaataaatggaagcttcagctacaggagcccggatgttggttatgttcatgatgttaactgcttctgggttatcaaaactgaaatgggaaaggtcctgcgtatcactttcacttttttccggttagaatccatggacaactgtccacacgagtttcttcaggtttatgatggagattcctcttctgcttttcaacttggaagattttgtggctccagcctccctcatgaactcctcagcagtgacaatgctctctattttcatctctattctgaacatttaagaaatgggagaggctttacagtaagatgggaaacacagcaaccagagtgtggaggtatcctgactggtccttacggttctattaagtctccggggtatcctggaaactatcccccaggaagagattgtgtctggattgttgtaactagtcctgacctcctggtaacatttacttttgggaccttgagcctcgagcaccatgatgactgcaacaaagattaccttgagattcgagatggtcctttgtatcaggacccccttcttgggaagttctgcaccactttctctgtcccaccgctccagactactggcccctttgccagaattcacttccattcagactcccagattagtgaccaaggcttccatatcacctacttaacatcaccttcggatctgcgttgtggtgggaactacacggacccagagggtgaactcttcttgcctgagttgtctgggcctttcactcacaccaggcaatgcgtctatatgatgaagcagccccagggagaacaaatacaaatcaacttcacccacgtggagctgcaatgccagagtgacagttctcagaattacattgaggttcgagatggtgaaaccttacttggaaaagtctgtggcaacggaaccatctctcacattaaatccattactaatagtgtctggatcaggtttaaaatagatgcttctgttgaaaaagctagtttcagagctgtttatcaagtcgcttgcggggatgaattaactggagaaggggtcattcgctcgcctttttttcctaacgtgtatcctggagaaagaacctgtaggtggaccatccaccagccccaaagccaagtcattctcctcaacttcactgtctttgaaattggaagttctgcccactgtgaaacagattatgttgagattggtagcagttccattttgggttctcctgaaaataaaaagtattgcggtacagacataccttcatttataacatctgtgtacaattttctttatgtcacattcgtgaaaagttcttctactgaaaaccatggtttcatggctaagttcagtgctgaggatttggcatgtggagaaattcttacagaatcaacagggaccattcaaagtcctggccatccaaatgtctacccccacggtatcaactgtacttggcatatattagtccaacctaatcacctgattcatttaatgttcgaaacatttcatctggagtttcattacaattgcacaaacgactacttggaagtttatgacaccgactctgagacatcccttggaagatactgtggaaagtcgatcccgccatctctcacaagcagtggtaactcattgatgctggtgtttgtgactgactccgacctcgcttatgaaggcttcttaataaactatgaagcaatcagtgcagcaacagcatgtttgcaagactacacagatgatttggggacattcacttctccaaacttccccaataattatcccaacaactgggaatgcatttatcggatcacagtgagaactggccaactgattgcagtgcacttcacaaacttctccttggaggaagccattggaaactattatacagattttctggaaatcagagatggaggctatgaaaaatcaccattgctgggaatattctatggctcaaatctacccccaacaatcatctctcatagtaacaaactatggttaaaatttaagagtgaccaaatagacacaaggtctggattctcagcttactgggatgggtcatcaacaggttgcgggggtaatctcaccacttcaagcggtacgttcatatctcccaactacccgatgccctattaccacagctctgaatgctactggtggttgaaatctagccacggcagcgcatttgaactggaattcaaagactttcacttggagcatcatccaaactgcactttagattacctggctgtatatgatggcccaagtagcaactctcatctgctaactcagctttgtggggatgagaaaccccctcttattcgttctagtggagacagcatgtttataaaactgaggacagatgaaggtcagcaaggacgtggcttcaaggctgaataccggcagacatgtgagaatgtggtaatagtcaatcaaacctatggcatcttagagagtatagggtatccgaatccttattctgaaaatcagcattgcaactggaccatccgggcaacaacaggcaacactgtgaactacacatttttagcatttgacttggaacatcacataaactgctccacagattatttagagctctatgatggaccacggcagatgggacgctactgtggagtagacctgccccctccagggagtactacaagctccaagcttcaagtgctgctccttacagatggggttggccgccgtgagaaaggatttcagatgcagtggtttgtttacggttgtggtggagagctgtctggggccacaggctccttcagcagccccgggttccccaacaggtatccaccaaacaaggagtgtatctggtacattaggacggaccccgggagtagcattcagctcaccatccatgacttcgatgtggagtatcattcaaggtgcaactttgatgtcttggagatctatggaggccccgatttccactctcccagaatagcccaactgtgtacccagagatcacctgagaaccccatgcaggtctccagcactggaaatgagctagcaattcgattcaagaccgacttgtccataaatgggagaggcttcaatgcgtcatggcaagcagtcactggaggttgtggtgggattttccaggctcccagtggagagattcattctccaaattaccccagtccttataggagcaacacagactgttcttgggtcattcgggttgacagatatcatcgtgttctcttgaacttcactgactttgatcttgaaccacaagactcttgtattatggcatacgatggcttaagctccacaatgtcccgccttgccaggacgtgtggaagggagcagctggctaaccccatcgtctcctcaggaaacagcctcttcttgagatttcagtctggcccttccagacagaacagaggcttccgagctcaattcaggcaagcctgcggaggccacatcctcaccagctcatttgatactgtttcctctccacggttccctgccaattatccaaacaatcagaactgcagctggatcattcaagcgcaacctccattaaatcatatcaccctctcttttacccactttgaacttgaaagaagcacaacgtgtgcacgtgactttgtagaaattttggatggcggccacgaagacgcgcccctccgaggccgttactgtggcaccgacatgccccatcctatcacatccttcagcagcgccctgacgctgagattcgtctctgattctagcatcagtgctgggggtttccacaccacggtcaccgcatcagtgtcggcttgtggtggaacgttctacatggctgaaggcatcttcaacagccctggctacccagacatttatccccctaatgtggaatgtgtctggaacatcatcagttcccctggcaaccggctccagctgtcttttatatctttccagttggaagactctcaggactgcagcagagattttgtggagatccgtgaaggaaatgccacgggtcacttggtgggacgatactgtggaaactccttccctctcaattattcttccatcgttggacataccctgtgggtcagatttatctcagatggttctggcagcggcacgggcttccaggccacatttatgaagatatttggcaatgataatattgtgggaactcatgggaaagtcgcctctcctttctggcctgaaaactacccacataactccaattaccaatggacagtaaatgtgaatgcatctcacgttgtccatggtagaatcttggagatggacatagaagaaatacaaaactgctattatgacaaattaaggatctatgatgggcctagcattcacgcccgcctaattggagcttactgtggtacccagactgaatctttcagctccactggaaattctttgacatttcatttttactccgactcttcaatctcggggaagggattccttctggagtggtttgcagtggatgcacctgatggtgttttacctaccattgctccaggtgcttgtggtggcttcctgaggacgggagatgcacccgtgtttctcttctccccgggctggcctgacagttacagtaatagagtggactgtacgtggctcatccaggctcccgactctaccgtggaactcaacattctttccctggacattgaatctcaccgaacgtgtgcctatgatagccttgtgatacgagatggagataataacttggcccagcagctagcagttctctgtggcagagagatccctgggcccatccggtctactggagagtacatgttcatccgcttcacctcggactccagtgtaaccagggcaggcttcaatgcatcctttcacaagagctgcggtggatatttgcatgcagacagagggatcatcacgtcccccaagtatccagagacttacccatccaacctcaactgttcttggcacgtcctggtccaaagtggcctgaccattgctgtccattttgaacagcctttccagattccaaatggagattcttcttgcaaccagggggattacttggtgctaagaaatggtcctgatatctattctccacccttgggaccccctggaggaaatggtcatttttgtggcagtcatgcttcatcaactctgttcacctcggataatcaaatgtttgttcagtttatttctgatcacagtaatgaagggcaaggatttaaaatcaaatatgaggcaaagagtttagcctgtgggggcaacgtctacatccatgatgctgattctgctgggtatgtgacctcccccaaccaccctcataattatcccccgcacgctgattgcatttggatcttagcggctccaccggaaacacgcatacagctgcaatttgaagatcgattcgatattgaagtaacacccaactgtacttccaactaccttgagttgcgggatggagtggattcggatgcaccaatactttccaaattttgtgggacatctttgcccagcagtcagtggtcctcaggagaggttatgtatttgagatttcgatctgacaacagccccacacatgtgggattcaaggccaagtattctatagctcagtgtgggggaagagtaccagggcaaagtggtgttgttgaaagcattggacatccaacacttccatacagagacaacttattctgtgagtggcatctccaggggctctctggacactatctcaccatctcttttgaagactttaaccttcagaattcttctggctgtgaaaaagacttcgtggagatctgggacaatcatacctctggaaacatcttgggcagatactgtggaaacaccattcctgacagcatagacacttctagcaatactgctgtggtcaggtttgtcacagacggctctgtgactgcctcaggattcagactgcgatttgaatccagtatggaagagtgtggtggggatcttcagggctctattggaacatttacttctcccaactacccgaacccaaatcctcatggccggatctgcgagtggagaatcactgccccggagggaaggcggatcaccctaatgtttaacaacctgaggctggccacgcatccgtcctgcaacaatgagcatgtgatagtattcaatggcattagaagtaactcaccccagctagagaaactgtgtagtagtgtgaatgtaagcaatgagattaaatcttcaggaaacacaatgaaagtcatttttttcacggatggatccaggccatatggcggcttcactgcttcctatacctccagtgaagatgcagtgtgtggtgggtctcttccaaatactcctgaaggaaactttacttctcctggctatgacggagtcaggaattactcaagaaacctgaactgcgaatggactctcagcaatccaaatcagggaaattcatccatttccattcactttgaagatttttacctagaaagtcaccaagactgtcaatttgatgtcctcgagtttcgagtgggtgatgctgatgggcccctgatgtggagactttgtggtccttcaaagcctacattgccattggttataccttattctcaggtatggattcactttgtcaccaacgaacgtgtagaacacattggattccatgcaaagtattcctttacagattgtggcggaatacagataggtgacagtggagtgatcacaagccccaactatccaaatgcttatgacagcctgacccactgctcttggctgttggaggccccacaagggcacaccatcactctcacatttagtgactttgatattgaaccccatacaacttgtgcttgggactctgtcactgtcaggaatggtgggtcccctgaatcacccatcataggacaatactgtggaaattcaaaccccaggacaatacagtcaggttccaatcagctggtcgtgacttttaactcagaccattcattgcaaggtggtggattttatgctacgtggaacacacaaactttaggttgtggtggaatatttcattctgataatggtacaatcagatcccctcactggcctcagaattttcccgaaaacagcagatgttcctggacggccattactcacaaaagtaaacacttggagatcagctttgacaacaacttcctaatccccagcggtgatggacaatgtcagaatagcttcgtgaaggtgtgggcaggaactgaggaggtggacaaagccctgctagccactggctgtgggaacgtggctccgggtcccgttatcacaccaagtaacacattcactgccgtcttccagtctcaggaggcaccagctcagggcttctccgcgtcctttgttagccgatgtggaagtaatttcactggcccttcaggttacatcatttctccaaattacccaaaacaatatgacaacaacatgaattgcacctatgtcatagaggctaatcctctgtcagtggtcctcttgacttttgtgtccttccacttagaagctcgttccgctgtgacgggaagctgtgtcaacgatggcgtgcacattatcagaggttacagcgtcatgtccaccccatttgctactgtgtgtggggatgagatgccagctcccctcaccatcgctgggccggttctgcttaacttctactccaacgagcaaatcacagacttcggattcaagttttcctataggataatctcctgtggtggtgtgttcaatttctcttctggaatcatcacaagtcctgcctattcatacgcagactacccaaatgatatgcactgtctgtataccatcaccgttagtgacgacaaggtgatcgagctcaagttcagtgattttgatgtggttccctccacctcctgctcccatgactacctggcaatttacgatggtgccaataccagcgatccccttcttggcaaattctgcggttccaagcgcccaccaaatgtgaagagcagcaataatagtatgctcctggtgttcaagacagattcatttcagacagcaaaaggctggaagatgtctttccggcagacattggggcctcagcaaggatgtggtggttatctgacaggctcgaataatacctttgcctctcctgattctgattcgaatggaatgtatgacaagaatttaaactgtgtatggatcataattgcacctgtaaacaaagtaattcacctcaccttcaatacatttgctctggaggcagcaagtactaggcaaagatgcctttatgattatgtaaagttatatgatggggatagtgaaaatgcgaacttggctggaacgttttgtggttccacagtacctgctccttttatctcttctggtaacttccttacggttcaattcatcagtgacttaacattagagagggaaggatttaatgctacatacaccatcatggacatgccttgtggtggaacgtacaatgcaacttggaccccacaaaatatttcatcacccaattcatcagacccagatgtcccattttccatctgtacttgggtcattgattcccctccgcatcagcaggtcaagataactgtgtgggcattacagctgacctcgcaagactgcacgcagaattacttacagcttcaggactcaccgcagggtcacggaaattcaagatttcagttctgtggcagaaatgcttcggctgtgccagtgttttattcttctatgagtactgcaatggtcattttcaaatctggagttgtaaacagaaactctagaatgagtttcacctatcagattgcagattgcaacagagactatcacaaggcatttggcaacctgagaagccctggatggccagataactacgacaatgacaaggattgcaccgttactctcacagccccccagaaccacaccatttccctcttttttcattcacttggcatcgagaactcagttgaatgcagaaacgatttcttggaggtgagaaatggaagtaacagcaattcaccattactgggcaagtactgtggaactctgctgccaaaccctgtcttctctcaaaataatgaactatacctacgatttaagagtgatagtgtaacttctgatcgtggatatgaaatcatctggacttcatcaccctctggatgtggtggaactctttatggagacagaggctcattcaccagccccggctatccaggcacatacccaaacaacacgtactgcgagtgggtccttgttgctcctgctggaaggcttgtcaccatcaacttctacttcatcagcattgacgatccaggagactgtgtccagaactatctcacactctatgatgggcccaacgccagctctccatcctctggaccatactgcggaggcgacaccagcatagctcccttcgtggcttcctcaaatcaggtcttcataaaatttcatgctgattatgcacggcgtccatccgcattccgattaacttgggacagctaagtgggtaacaactcgtgttcactcagcactttccctctgcagcacgctggacagcactctgccatcctgatacatgacccctgctgatgccacagagaataagctgaacttgtatggtttttcaccaaaccatggatagaatcaatatttgtaggccaggccgtggtggctcacccccctgtattctcagcactttgggaggccgaggcaggttgatcacctgaggtcaggagtttgagactagcctggccagcatggtgaaacctcatccctctaacaatataataattagccaggcgtggtggtgggtgcctgtaattccagccactcgagaagctgaggcaggagaattgcttgaacccaggaggcagaggttgcagtgagctaagatcacaccactacactccagcctgggcgagacggcaagactccatctcaaaaaaaaa

SEQ ID NO: 28269 - DNA, 718 bp, Homo sapiens
  SIMILAR (364)..(510): 461254mologous to Arabidopsis thaliana glycine-rich protein,accession number AL161577,Smith-Waterman Score=92.
ctgggaagaaatggcttcctcttaggaattgagacagtggttcctgttcaggattttgtactacatatttcctaatagtggtctgtggatatgtagtaagtttcactgttggagaatgaagttcctgttcagtattttgggttatatgtagagtacttggggcacatgtagatatttttaaagttggagaatggagttcctgagaatggtcgctccaaaccaaattttggtaggaggaggtggttttgagaggggagagcacttcccgtgagttgaaggggtccaaggcctgcaccaccttgttcatgggcccactgtaggtcctcactcgctcatacactacatttttttctggaggctgctgggcttggcttgactgatggtagcagtggtaatgctggggctggcactgcagcacctctgggagctgctgggttccacagctgctgctgctcgtctcactccaatagctcgagctcatcttcttccagtggtcagcaagggacctcccagatgttctaccctcagattttgctatgcaatatacttcagcaccacttaaatccagaatactctcattcaaagtgactttagtaaaaagtatcttcctaatgtgtatatgtgcaataggacctagtatactaccaccattaggttgaggactttcagtcccacaagactgtccccattcagacaccagtcgcaagccccagatcat

SEQ ID NO: 28270 - DNA, 3365 bp, Homo sapiens
  SIMILAR (2715)..(3035): 951254mologous to Homo sapiens Human lung tumor antigen L531S,accession number Y41030,Smith-Waterman Score=523.
ggggagggcgaatcattcggtatgatcctgtgactatccaagttaaaaaggctgggtccttaaacaatgagagcggactggtcagctgctactttgggcagcttctctccaaattagacaggatcaagactgattacacactgagtattgccaacaggctttatggagagcaggaattcccaatctgtcaggctggtcccttaacaattgagagcggactggtcagctgctactttgggcagcttctctccaaattagacagcatcaagactgattacacactgagtattgccaacaggctttatggagagcaggaattcccaatctgtcagcttgaagagaaactcactgctgagaaattgatggaatggacaagtttgcagaatatgagagagacatgtgtcgatttacacttacctcggttcaaaatggaagagagctatgacctcaaggacacgttgagaaccatgggaatggtgaatatcttcaatggggatgcagacctctcaggcatgacctggagccacggtctctcagtatctaaagtcctacacaaggcctttgtggaggtcactgaggagggagtggaagctgcagctgccaccgctgtagtagtagtcgaattatcatctccttcaactaatgaagagttctgtgattccaccacattgggatgcttagaagcatcggcgaccctacttagaggccagtggcatcctcctcctatttgtgagaacccagaatgtctccagacatggccagattatcccagagtgggaaggggagacaaatctgtccccactgagaaacactcccataaagtgatgcccttaatactcacacagaaggatttccaaacttggagaacgatgaagctgggttataatttctatccaattcaaagaccagagagagagattgatacaagagacaccatcatcaggcaggaatcagatttcaggacaagtgcctctagccagagtctgtctagtccctctgggtgctttagcaaatgccaggttgataggtcaggaaatgttcatcaccagtttcaaaagcttctgactgaattcaacaaatccactgatgcatatgagctgaagatcgccaacaagctcttcggagaaaagacgtatcaatttttacagccagtaaggataatcgggcaggccattgaagatttttcgcggggaaggaagtggtttttttatcgccctaaaaagaatgccggcgatgaaaaaggctatgaatctttcctgggtttatcaaacgtgcgcacagtccatccagagggctttccagtgtacatatcaaacccatatctcattccctcttttatcgggttacagaaccggtttacgcagtttcggcttagtgaaacaaaagaaatcaccaatccgtatgccatgcgtttatacgaatccctgtgtcagtatcgtaagccggatggctcaggcatcgtctctctgaaaatcgactggatcatagagcgttaccagctgcctcaaagttaccagcgtatgcctgacttccgccgccgcttcctgcaggtctgtgttaatgagatcaacagcagaactccaatgcgcctctcatacattgagaaaaagaaaggccgccagacgactcatatcgtgtttcactctgaaaaagagacgaagagctcaagaataaaggctgaagaaaaagaggtgctccaagaattcccacctgtggctagctccttttatgcacccagcacaggcaggttaatgtttgatcaaaatcttcagctcgaaggaggagaaggtaaagggaatcctggcaatttggccatcactattaaaagaagacaagagcctgactatattgaaggaaaagaaggggttgtctgggaccacggtcccactcgtatcgtcggtctgattattagtctgggaccacggtcccactcgtatcgtcggtctgataatcagactgggaccacggtcccactcgtatcgtcggagttcatcagctctacgaagagaccctatgcaaaggaattggaaactgttgacttcaaagataaattggaagaaacgaaaggtcagatcaacaactcaattaaggatctcacagatggcaagtaccctttaattgttctgctatcaatcaccaaaactcacgttgcacccggcgtgactatgatttaccactcacagttcagggtggggacactgaaatacgaggctcatagagtctggtggtactgggtcttggtgagtaggagcaagcaaggcactgcccaaaagcacttctacccgtatgagcatccgtccacagctgccaccagtcgttcagtgtggccacgcagtttttttgcagaaggcagtgagctcaagtgttgcaagtatctgtttgaagcacagtgtgaagacaatgatctctgcctgagcagctcatctgtccatgcaataccatacagcttgaataacatcatgggacctgtacgaagtgccaccagtgatgctgaaagtgtgcccaagaaacagagaaaagcaataacattacaagaaaaagttgaattccttgatatctaccatagattgagtgttcctggtgctcaaagggggggatctctacagaaaactgggcttgcagcacagaaggtccgaaaagatggtttttggcccttgaacgtgggaggccacgtcctttataagggaactttgttccaaactggaccaacactcaaccccatttcggggataatagataaaataagtcctgagaaattggtagagtggactagtccagggcatatggaagaaagaaaggtgaatctgcacttgccccggtttgaggtggaggacagttacgatctagaggcggtcctggctgccatggggatgggcgatgccttcagtgagcacaaagccgactactcgggaatgtcgtcaggctccgggttgtacgcccagaagttcctgcacagttcctttgtggcagtaactgaggaaggcaccgaggctgcagctgccaccggcataggctttactgtcacatccgccccagcctcctcttcatggaagcttccccaggtagacccagcccttgtccaggcgacaccagtttgtccagatgtggggcccatgataaggcaggggggtaggcacaagaatctccacgggcctcaagttcaaacagtgctctcagatccaaccttagcaataattaagccgagacttgaatccttatctgatactatttctcaattgattcaaaattcagcccagagagtgacaggattgattaaatctcttaaacccctttccctaactgcatacaaacttgactctgggctgaatttttctgaagcagaaaccacatatctctggtcatga

SEQ ID NO: 28271 - DNA, 1854 bp, Homo sapiens
  SIMILAR (601)..(1506): 461254mologous to Homo sapiens leupin,accession number X89015,Smith-Waterman Score=650.
atgagggcctctcctttagaggggaacagtgggaaaaacacagattcatcaaacatcactcagaagccagaattagtaccacctgatctgtggacacaccctgagaggttagcaacccctcagcaaactcctactgaacttcaagaatcatttgcatctaccatagagacaacctctttaatctcaaacaacctgctcttgaagatgagtcagagcaaagccactgttgaaggtcttaaggaagctaaactagggtggtccctgtctcccggccccacacacctggtgctcacagagccacatcagatcgttataagttttacaatggactctcttgttacagcaaacaccaaattttgctttgatctttttcaagagataggcaaagatgatcgtcataaaaacatatttttctctcccctgagcctctcagctgcccttggtatggtacgcttgggtgctagaagtgacagtgcacatcagattgatgaggtactacacttcaacgaattttcccagaatgaaagcaaagaacctgacccttgtctgaaaagcaacaaacaaaaagtgctggctgacagctctctggaggggcagaaaaaaacgacagagcctctggatcagcaggctgggtccttaaacaatgagagcggactggtcagctgctactttgggcagcttctctccaaattagacaggatcaagactgattacacactgagtattgccaacaggctttatggagagcaggaattcccaatctgtcaggaatacttagatggtgtgattcaattttaccacacgacgattgaaagtgttgatttccaaaaaaaccctgaaaaatccagacaagagattaacttctgggttgaatgtcaatcccaaggtaaaatcaaggaactcttcagcaaggacgctattaatgctgagactgtgctggtactggtgaatgctgtttacttcaaggccaaatgggaaacatactttgaccatgaaaacacggtggatgcacctttctgtctaaatgcgaatgaaaacaagagtgtgaagatgatgacgcaaaaaggcctctacagaattggcttcatagaggaggtgaaggcacagatcctggaaatgaggtacaccaaggggaagctcagcatgttcgtgctgctgccatctcactctaaagataacctgaagggtctggaagagcttgaaaggaaaatcacctatgaaaaaatggtggcctggagcagctcagaaaacatgtcagaagaatcggtggtcctgtccttcccccggttcaccctggaagacagctatgatctcaattccattttacaagacatgggcattacggatatctttgatgaaacgagggctgatcttactggaatctctccaagtcccaatttgtacttgtcaaaaattatccacaaaacctttgtggaggtggatgaaaacggtacccaggcagctgcagccactggggctgttgtctcggaaagctccaagaattcccacctgtggctagctccttttatgcacccagcacaggcaggtgtcaagagaagtgctgctggcattgtggacggctggcctccgtatgcccctctctctgccttctggccacctgaatgttctgccatgaccactgacacgtccaactcacatctctttggagtcagtctctttcctatcgagctgccaccagtcgttcagtgtggccacgcagtttttttgcagaaggcaggcctggaacagacaaaggaaatggcattattctccattagagatgagatagatacagacgtgtccctggaacttctgaccgcatttgaggagtcttgccagttgcacgtggcctga

SEQ ID NO: 28272 - DNA, 419 bp, Homo sapiens
  SIMILAR (209)..(388): 811254mologous to Mus musculus mSin3A,accession number U22394,Smith-Waterman Score=258.
cttgtggaatagaggacaacaacttcagcttggccttgaaccctgacacggacattttactctcacctctggcgggaggggcgcggaagcaccaaccatgtgcctaaagctaactgtgtcaaaaagagcatgcttcgaggggctggagtgagcaattcaacttgtggagaaataagaaataatagtgttgagacaagaaacataaaaccgcaggctgcagcatatcatgagtgatgagatctgtgtacaggtgactgacctttacctggcagaaaataataatggggccaccggaggccagccgaacacacagaactcaagaagcctcctggagtcaacgtatccacagaaagccaagcagctaatgtcagatgagaaatgctttaagacacagccttcctcatccctggaggactcaa

SEQ ID NO: 28273 - DNA, 4584 bp, Homo sapiens; identical to SEQ ID NO: 8594
  SIMILAR (454)..(1374): 761254mologous to Homo sapiens melanoma-associated chondroitin sulfate proteoglycan (MCSP),accession number X96753,Smith-Waterman Score=1175.

SEQ ID NO: 28274 - DNA, 838 bp, Homo sapiens
  SIMILAR (184)..(270): 341254mologous to Mus musculus mSin3A,accession number U22394,Smith-Waterman Score=41.
ctttgacccagcactgctggacccatctagtccgttcctcacactcgcggactggaagctccaggctgcacaaccaccaactgcaccaaccatgtgcctaaagctaactgtgtcaaaaagagcatgcttcgaggggctggagtgagcaattcaacttgtggagaaataagaaataatagtgttgagacaagaaacataaaaccgcagggtaagaacttttggagaaagatttcttgggaggaagctatcctgaacgcttagagacttttctcatttactggcacaccagctttagagtcctaggtcttcatcctggctcagccaccctccagctgtgtgaactttgagaagttgcttgactacactgagtctcgttgtcactatgagtggaggttgctacgttgctactgtgtggagcacctacccccaagcactcttataagctgcagcatatcatgagtgatgagatctggttacaggtgactgaccctttacctggcagaaaataataatggggccaccggaggccagcccgaacacacagaaactcaagaagcctcctggagtcaacgtatccacagaaagccaagcagctaatgtcagatgagaaatgctttaaggtgagagttgctcatgtagtcaaagaccttgctggtgacaatgtaagttgttaggattctctgaatcggaagttatagccagggtactttgaccccgtgattctactcctggaactttttagagttcctaatgagttcaccagagaactacagagtggaagtaattgtcttcctggacaatgtagtgtgtttctttcctgcctttaaagaaaaaaaaa

SEQ ID NO: 28275 - DNA, 1406 bp, Homo sapiens
  SIMILAR (963)..(46): 811254mologous to Homo sapiens melanoma-associated chondroitin sulfate proteoglycan (MCSP),accession number X96753,Smith-Waterman Score=1242.
tcaggcctgagcggtgttcctggaggtgacgagaggcctctgcaccagctccccaagaaggagactgtcacgtggctccaggtagctgaggactcctcggttcaaagtacatgtggggtactggtccatggagatttctagctggtgaatgttgatgtggatgctgaccttgtggggctgtgcgtcagtcacaggcacactgttgaggagcaatacagtaccctggcccttctcaaccatggaccacaggtggccctcaaatatgtccacatggatgaagtccccatgccagcctgctgcctggaaggccaagggtgcctgccagctctgtgtggtgagtgtaaactccagggttccttcatcctgagtgccccaggcaggcaaggcagccagagagtgggacctagagaagcccagggccacatcgtcattggcagaaaactcttcagcacagccctcatgcttattgggggtcagaggctggaggagtctgcggccattgagagcggctgcatggaggcaacccctcaggggatggctggttcccctcaggtagggcaggccaagtctcccagtgttcccaacaaagagcccataggggacttctaggggggctcccaggactacagaggaggcattcagaaacccattgactgacaatgtgggccagtcctctgagacagtcagaactgtggtgtgggggacggagtcactcagtagaatttctgctggggtctgcagcctcagctcctcctggcccaggacaagcctgacctgcaggtgtccagagtagagctgcagcaggaggtggtcagctgggcctgctgccaggagaaggagggcttcgggttgggacatggagaactgcagctgcaggtctatgtcagtcagagccatggccacagtcacctccgggtggttcttttcatgtttttctgcctgctttatattcgctagcagcgaactgttctccttagtatcttctagacgttccagaactgatgtcagatttggctcatcagagtccacagaccatatcggtgaagaagatgaataggattcctgctgcatccagggtacaatgtgcctttccagaacacagcagcgacccgggatagagggatcgctcaaacagcaccagaggctgcattccaacttttcctccatcaacaagcccgttttcattgttagtttctccttaaacacgattggctgaacatgcgggaacaaggaaaacctgaccggcccggggaaccggggcctctcctgggcaggttcccctttgtcccgggactccgggctcttcctctccgccctcgccctgccgtgtaataacaccgctcggcgcctcaccgtgatgttgcagtggagcatgaaaagccgcggcggctcctggttctctcacc

SEQ ID NO: 28276 - DNA, 1938 bp, Homo sapiens
  SIMILAR (484)..(1935): 901254mologous to Mus musculus Zfp-29,accession number X55126,Smith-Waterman Score=2448.
atgagtgatgagatctgtgtacaggtgactgacctttacctggcagaaaataataatggggccaccggaggccagccgaacacacagaactcaagaagcctcctggagtcaacgtatccacagaaagccaagcagctaatgtcagatgagaaatgctttaaggtgagagttgctcatgtagtcaaagaccttgctggtgacaatgctggggctgccaccgcgcaggcgctcggcccggcgcggggggcgcttacctggcggcggcggcggcgactgcagccagagtctcgccgcgcgcgtcaaactccgaattccgggaacaaagggaacccgcccaagaagagccccggttccccgggcgggggagaaactaacaatgaaaacgggcttgttgatggaggaaaagttggaatgcagcctctggtgctgtttgagcgatccctctatcccgggtcgctgctgtgttctggaaaggcacattgtaccctggatgcagcagattttgagatacagagtgaaaatggggagaactgtaatcaagacatgtttgagaatgaatcacgtaagatattctcggaaatgcctgaaggtgaaagtgctcagcactccgatggggaaagtgactttgagagagatgctggcatccagaggctccagggacacagcccaggtgaggaccacggggaggtggtttctcaggacagggaagttggccagctcataggcctgcagggcacctacctaggggagaagccctacgaatgtccccagtgtgggaagaccttcagccggaaatcccacctcatcacacacgagaggacccacacaggagagaaatactacaaatgtgatgaatgtggaaaaagctttagtgatggttcaaattttagtagacaccaaaccactcacaccggggagaagccctacaaatgcagagactgtgggaagagctttagccggagtgccaacctcataacccaccagaggatccacacgggggaaaagcccttccagtgtgccgagtgtggcaagagcttcagcaggagtcccaacctcattgcacatcagcgcacccacacaggagagaaaccctactcgtgccccgagtgtggaaagagctttggcaaccgatccagccttaacacgcatcaggggatccacactggagaaaagccctacgaatgtaaagaatgcggcgaaagctttagttacaactccaatctaatcagacaccagagaatccacacaggagagaaaccctacaaatgtaccgactgtgggcagaggttcagccagagttcagccctcatcacccaccggagaacccacacaggagagaaaccctaccagtgcagcgagtgtgggaaaagcttcagccgcagctctaacctggccacacaccggagaacccacatggtggagaagccctataagtgtggggtgtgtgggaagagcttcagccagagctccagtctgattgcacaccagggcatgcacacaggggagaaaccctacgagtgcctgacatgtggggagagcttcagctggagctccaacctcctcaagcaccagaggatccacacgggagagaaaccctacaaatgcagcgagtgtgggaaatgcttcagccagcgctcccagctcgtagtgcaccagcggacccacacgggcgagaagccctacaaatgcctcatgtgcggcaagagcttcagccggggctccattctggtcatgcaccagagagcccatttgggagacaagccctacaggtgccctgagtgtgggaaaggctttagctggaactcagtcctcattatacatcagcgaatccacactggggagaagccctacaaatgccccgagtgtggcaaaggcttcagcaacagctctaactttatcacacatcagagaactcacatgaaagagaaactttattga

SEQ ID NO: 28277 - DNA, 1573 bp, Homo sapiens
  SIMILAR (440)..(790): 301254mologous to Propionigenium modestum methylmalonyl-CoA decarboxylase, gamma-subunit,accession number AJ002015,Smith- Waterman Score=104.
atgctgtcggtgctccgtaaatgctccctgcttcccctttctgctgcctgtttgcagctggccccgctccctggccactctggggaggctgaagcagcagttagtgagaaggaggcaaaaccagagaagggcgatgctgccattctcattacccgattccgagcctggcctggagatcctggtagatgctgctcatttgggttcagaccctggaccctgcagcagatgctgctggaaacttctggctgcaaagcaacaggacctggctactgtaggaggaagagagatttatgtaaagggctttgtccactataaagtccgggctctgtttccctgtgagaagccgcctcggcccaccgagatgtcccggcaccatagccgcttcgaaagagattaccgggtgggctgggaccgccgcgaatggagcgtcaacgggacgcatgggaccaccagcatctgcagtgtcacctcgggggccggtggcggcacagccagcagcctcagcgtccggcccggcctcctgccgctgcccgtggtgccctcccggctgcccaccccggctacagctcctgctccctgcaccaccggcagcagcgaggccatcaccagcctcgtggccagctctgcgtctgcggtcaccaccaagggccagccgctggacctgctggccacatctggcaggcgctctgcagggccagctgttggccatatggagaatggcagccgctggaaccgactgctcggggctccagaccctggcgtggtatctgaggccacaaagctggagcagccagagggttggactcagatggagaaggctggaggacaaactaccctcaaggctcaagtctttgccactgagggggccagaggtgggtgtgagtggtggtgggaagctgctgccaactcagatgccaccagagttccagcgactggaggcgagggacacagaatatctggacttgggaagattttggaggaaaaacgcacagtccattgctggacgcggcggttactaatttctgctcggtgctcattttacaaagccatcggccgtgccagatgcagacttcccctgtggtccggtgagtggtcagatcaatggggccccatcagcccgagaaatggaccacaaaaacgctcctccacggctctggtgtccaccacaaccctctttcttaagggcctgacccgcccactgtgcttggcagtaaacttgcggccggccaggcagctccgagcctgcagagctgctgctgttgggggaggagcaaatgggagaggggagaggctgtctacccagatcaggttacctgtggcgctgagctcacagggaagacagtggcaaatcgtggctgctctgcccccaacatacacaaacatcctgccaatgattctgctgcacccccacttcccagcccaggttcaaatccaccaagaacgaccgagggaccagcaagagggagctgcttccctgagcttggatatattcaaggcctgcccagcaacacctgcagatggtcctgatggccgtgactgcccttctgcgaaggaactgggccaacacctctga

SEQ ID NO: 28278 - DNA, 361 bp, Homo sapiens
  SIMILAR (299)..(81): 261254mologous to Mus musculus IgA chain,accession number M31281,Smith-Waterman Score=71.
cccacgtccattctattccaagaacttttataagattttgtctttgtattcttcagagtttaacaactcctttgtggatgccattgggttctgacccaggactctggaaatgaggatgtttttgatatggagtacacagaagctgaagctgaggaactgaaaagaaatgctgaggtaattgttttcattcctgagtacagttggtcaaattcagtgtcactcttcccactctgtcctggggcaaagggccccactttcagtgtccactgcagggttcattttggccctttcagtagccattagatggtctcattttctcttgtcatttgctgttcatttttcacatacaagatttaaaaaa

SEQ ID NO: 28279 - DNA, 1332 bp, Homo sapiens
  SIMILAR (16)..(1140): 381254mologous to Homo sapiens ubiquitin-specific processing protease,accession number AF229438,Smith-Waterman Score=556.
ttttattcttacagatgtggagagattatccccataagagaacagtttaatgacctctctattgaccttcctcgtaggaaaaaaccactccctcctcgttcaattcaagattctcttgatcttttctttagggccgaagaactggagtattcttgtgagaagtgtggtgggaagtgtgctcttgtcaggcacaaatttaacaggcttcctagggtcctcattctccatttgaaacgatatagcttcaatgtggctctctcgcttaacaataagattgggcagcaagtcatcattccaagatacctgaccctgtcatctcattgcactgaaaatacaaaaccaccttttacccttggttggagtgcacatatggcaatgaaattcaccttcaaatccaagagctccttggctttatgccttgattcagacagtgaggatgagctaaaacgttctgtggccctcagccagagactttgtgaaatgttaggcaacgaacagcagcaggaagacctggaaaaagattcaaaattatgcccaatagagcctgacaagtctgaattggaaaactcaggatttgacagaatgagcgaagaagagcttctagcagctgtcttggagataagtaagagagatgcttcaccatctctgagtcatgaagatgatgataagccaactagcagcccagataccggatttgcagaagatgatattcaagaaatgccagaaaatccagacactatggaaactgagaagcccaaaacaatcacagagctggatcctgccagttttactgagataactaaagactgtgatgagaataaagaaaacaaaactccagaaggatctcagggagaagttgattggctccagcagtatgatatggagcgtgaaagggaagagcaagagcttcagcaggcactggctcagagccttcaagagcaagaggcttgggaacagaaagaagatgatgacctcaaaagagctaccgagttaagtcttcaagagtttaacaactcctttgtggatgcattgggttctgatgaggactctggaaatgaggatgtttttgatatggagtacacagaagctgaagctgaggaactgaaaagaaatgctgagacatcagtggagatgcagtcaactgcagatattgtgggaatatcaagagaactacaagtggagcctgcagatgtgactgaattgctgcaatctcatgatcagactttaatggatgtggagttgcttcctacggatgagcaaagaaagaagtctcctgagatgaaatctaatcctggtaaagaaaccatgaatattgttgaagttacaacatag

SEQ ID NO: 28280 - DNA, 1920 bp, Homo sapiens
  SIMILAR (145)..(1485): 291254mologous to Haliotis discus collagen pro alpha- chain,accession number AB017600,Smith-Waterman Score=183.
ggcagcgatggttgcacagtgctacgaatgtgccagacgccaccacactgcacgctttacggcagtcctccagctcgtccgccagcccagccccaaccgtccctgtcacagggacgctagtcacacaactgtcccgcctcctgggctggcgactgcccgggtggcctcggccctgccctccccacctctggtacccaaccaaggtgctctaatggacaccgtgaccctggggtctgtgaggtggagggtcccactctctggctggtggacccctcaggccgtgccccccaggccggtgctgccccactcccgtcagcctgggagctcgatgcggcagtgcccccgccgcaccccagggcacctggaggcagaggctgagaggtcgcagagcccagaattcgcctcctcggcccgggtggtcccactggttccccgggtctgcaggtcaggggacaaacacgggcagttccgctcggctcagcccacagggaggtgccaagtgaaagcaggttcaagacaaaatgtggagctgggcgcccccccccgccaccgtgtggctcgagcctgcagccatctggggaaaccgagtcacagcgaggctccaggacggtcctcaggccacatcagtcccggaaggttccctgacatcccacctttgctctcagccacttcggggggatccctggtgcccagtaatggaggccgtcggtgtgtaccaggcaactgggagccgcatcctgctctgggactgagtggctggagcttccccactgacctggctgggctgaccccacccctcactcccccggccctggtggacaccatggcacagatggacacgctcctgaccaagcagccggccccacagaccattccagttgtcccccaaagctgtgcgacgtggcctgagccgcagctgtgtcatgcctcggacaccatgaccgtgcccttctccatcgccaccaacaacctgcagtaccacgagcaatgctggcacccttacctcgtgggcgactacgtggagacggagctgctgaaagtgctgcggcctcggggtggcccccagtgccctctcctccgaacgctctgtcccttccgaatccagcacgacctgtccgtgaagcagccttggcaggttccggggtctggggctcaggggcgcctcctcatccaggaagctgagctcatcgggagcattccggagctgctggaaaggcccaccgtgcaagccggaaacagatccagagggtcctgcaacctgagggctgcccaggggatggcccctgaccctcacccccggctggccctgaggcaggacatggacaacagctggggctccctcaggctggggaatgaggtggaggggctgcatgcgtccctggtggtgctgcgggagaagcttctagaagtggagcagtcgctgggcaacctggagtacgtgcaggagcctggagaaaaacatcgccgtcaagaccaacagcctctatgtcgaccgccaggcgtgcatggccaccacgccgctaccccacggtcctgcagctgcgcctgcctctaggcccccagcctcaacttcatatcctttgagactgggcactcgctctgcccggagctcctcccactgctggtgcaccagctgggaggataccacagccaacagggtgaagatggctgtccccagagggggccgctgggcctagtgggtgccgctgccaagggtgagctgtcaccgcccagggccacctggaggggggagcctggaaccggctcgtccagcacctcccacaacaggggccggcttgtggaggaaggacctgtggggaatggccgcgtgtccgtgtccagaggcccagggtcggagcgggacaaggccaaggtgctgtgtgggcttggcctggggcccacagagaatggagcccccgc

SEQ ID NO: 28281 - DNA, 2055 bp, Homo sapiens
  SIMILAR (1364)..(1116): 271254mologous to Homo sapiens c394H11.1 (similar to SOX (SRY (sex determining region Y))),accession number Z99757,Smith- Waterman Score=43.
ttagggcagcttgtgggagcaatcgttgagcgcccagtgtatgccagccccgctgtggtccccgtcgtggggaggtgaggccgggagcggtgctgtgggcagactggggccatctgggtcccctgtggcttctgggctgaccctggcacaccgggcacctggactcccacgcagcccgcgggctgtctccagaccactgtccttccggaatgcatgctccacaggcagccagagggagccgcaaacatggcgtgttggatttccatgctggtccctgaggagcggagagccacaggccatcttcacaatcactctaaaaactgtgtggtcgccatggtggtgcccatctccaagccctgcttcagccttgtacacggcaccgccgccagggtggggtcccagctccgcgcccgagtcggagtcgctgtggccggctttggcgctcttcctgcgccgtggctggtacttgtagtcggggtggtccttcttgtgctgcacgcgaaggcgctctgcctcctccacgaagggccgcttctcgctctcgctcagcaagctccaaccgcctgtgcggcaggacttgggggagcaggggcctgccgtccacagcgccccgtggctgcgccctgcacgatgggaatgaccctggagttctggggaacttggtgagatcaggaccttcccccagcagtgccccccaggtgcctgacgtactgttgtgctgttggtggtattattaccacctcgggccatgcgatgacccttttgcttatctggctcggggtgcaccgtcagggcgtgcggctctgcgtgcttgcgtctgttcattgtttccatgtttttctgctgaatgaccgatgagatgcagccgggaggctctggccggctccggaatgataatggccggcgggtgctttgtatgcgcgaccagcaggcctctgtgccgggcactgtggcgctgccgttggggccggcagacctgcggtcctgcctctccaagcagggcagggagtgggaatgccggacaaaatccgagtgtgaatttctgatggggacgaggctatgaccaaaggcacagatgtgggctgtgggtggccgggaccagactggggagctcggcagggccatgaggctggggcctgggacggacagggaccggggtcctgggggcttcaggctggacaaggtggggagcagggtggcccgaggcttgtggccgggtcgaatgggctgggggtcaacgggcgtcttcacccgagagtgagggcactggcgcctctgtctgcccctcgtggctgccggcccaggaaccctgagacagaccaaaggggaggaggcaaagcggcagggacccgagtgatacgtccacaagccgggggtgcccggagcctccaggggctccaagctgttattaagcccaggcaacagatttttcagtacagatactgtactttcccccctgtggggctctccttcccggttgatcacgagaacgcaggccagcccaggcccggggctcttccgcgccggacaccgtgctgtacggcgctctcgccccggggcttcatcgcccctgccggagccttcccggctccctgtttgtgccggcttaatcccacactgattagatgtctgcgtggctgtcactcccacagccattttctccctagaaactttcctccaaccagacagctctgccggctcctgcggggcgctttcatccgctcccagcctggctccatgccaaggcccgaaagatgccgtcggcttcctggcattgcacagccacccagaaaccagctctgggattcgccaaggaggccctccaggaaggaagacgaggagctcggttcccagaggccgcgacgggattcgcgaagggcatggctgtttccattctgactgaagcctgctgacgcctggtggcacgacgggctgcccctgccgctcgggggtccgggtgggctcgcggccgccctccttgccgcccagcgtggagggcactggggtgaggccggcggccgcgtggcacggcctgatcctgcctttgccggacat

SEQ ID NO: 28282 - DNA, 2400 bp, Homo sapiens
  SIMILAR (33)..(140): 751254mologous to Homo sapiens BB1=malignant cell expression- enhanced gene/tumor progression-enhanced gene,accession number S82470,Smith-Waterman Score=116.
atgaccgcagaattcctctccctgctttgcctcggcccgttcttccgctaccgcacctacctggactggctggagcagcccttccccggggcagtgcccagcctgcggcccctgctgcgccgcgcctggccggccccgctcttcggcctgctgttcctgctctcctctcacctcttcccgctggaggccgtgcgcgaggacgccttctacgcccgcccgctgcccgcccgcctcttctacatgatccccgtcttcttcgccttccgcatgcgcttctacgtggcctggattgccgccgagtgcggctgcattgccgccggctttggggcctaccccgtggccgccaaagcccgggccggaggcggccccaccctccaatgcccaccccccagcagtccggagaaggcggcttccttggagtatgactatgagaccatccgcaacatcgactgctacagcacagatttctgcgtgcgggtgcgcgatggcatgcggtactggaacatgacggtgcagtggtggctggcgcagtatatctacaagagcgcacctgcccgttcctatgtcctgcggagcgcctggaccatgctgctgagcgcctactggcacggcctccacccgggctactacctgagcttcctgaccatcccgctgtgcctggctgccgagggccggctggagtcagccctgcgggggcggctgagcccagggggccagaaggcctgggactgggtgcactggttcctgaagatgcgcgcctatgactacatgtgcatgggcttcgtgctgctctccttggccgacacccttcggtactgggcctccatctacttctgtatccacttcctggccctggcagccctggggctggggctggctttaggcccatcgctgtcttctgtgctgaacgagctgcccagtgctgccacccttcggtaccgagaccctggggtgctgccttggggggcgctggaggaggaggaggaggatggaggaaggagcagaaaggccttcacagaagtcacccagacagagctgcaggaccctcacccttcccgggaactgccctggcccatgcaggccagacgggcacacaggcaaagaaatgccagcagggaccaggtggtctatggctctggaactaagacggaccgatgggcgcggctacttcggaggtccaaggagaaaacaaaggaaggcttgcgaagcctgcagccctgggcgtggacactgaagaggatcgggggtgcgatttcagtggccttggcccagccccacagcccccagccaggactgtggcctttcctggcagctgctggggtcgtcctgtgctctgaggtgcctccagggtcagggccgatgtctgtcattgctgtgggggtgacggtccctgcgctggcctggagagaggttcggggccaacgggcagcgggcaccccggtgaaagtccctcgaggctgcggtggcgacaccacgtccagccacttctcaggtcgtcctagccagagcctgacgcaccccagggctgccgccatggagcccctgttcccagcctccacgcccagctggaacgcctcctccccgggggctgcctctggaggcggtgacaacaggacgctggtggggccggcgccctcggcaggggcccgggcggtgctggtgcccgtgctgtacctgctggtgtgtgcggccgggctgggcgggaacacgctggtcatctacgtggtgctgcgcttcgccaagatgaagaccgtcaccaacatctacattctcaacctggcagtggccgacgtcctgtacatgctggggctgcctttcctggccacgcagaacgccgcgtccttctggcccttcggccccgtcctgtgccgcctggtcatgacgctggacggcgtcaaccagttcaccagtgtcttctgcctgacagtcatgagcgtggaccgctacctggcagtggtgcacccgctgagctcggcccgctggcgccgcccgcgtgtggccaagctggcgagcgccgcggcctgggtcctgtctctgtgcatgtcgctgccgctcctgctgtgcacccaggtctgggagcgacagagctgggcgtgttacaaagcccctcaccgtgtcggggcaggcgtgctggggacggagctggcaccagcttttgtggtcctgtccagcaacccccgcaaggctagcgagggagaaaccatcactcaagcttggagctgcgcaggggacccggccaccccgtctgtcctgtccacggaaaccgtcacccaaacttggagctgtgcaggggacccggccaccctgtccgccctgtccacggaaaccgtcacccaaacttggagctgtgcaggggatccggccaccccgtctgtcctgtccgcggaaaccgtcgcctga

SEQ ID NO: 28283 - DNA, 4014 bp, Homo sapiens
  SIMILAR (988)..(1470): 961254mologous to Homo sapiens fifth somatostatin receptor subtype,accession number D16827,Smith-Waterman Score=798.
atgggagccacagggggacagagccccgagctgaacgagatggaaagaagagctatgcccagacatggacgttacgatgcagggaacacacgaaccacgctatgggctacagcgagccacgccacacagaaccacgctatggctatactgagccacgctacacagagccacgctacacgctataccaagccacgctatgcagaaccatgctacacgctacagcaagccacgctacacactacactgaaccatgctacacgctacaccgagccacacttcatgctacatgataccccaaaccacgtggagtcatcgcttcctgagtccgtggccagtgctgtcttaggactgggtgtcccaagtgtccgcagctgccccggggggacagggcacaagttccttggggcagtgcccaactcttcgtacgtcttcagcgaatcctccacgaaacacttaagcaaacagatgctcagagagcatatctgtacgacatggtttccaacacaaaaacatgaagattttatcattccagcccaaaatgaaaatcttactaccaaaccacgtgaagcggaagagcagactcagaggtgtggttctgtcccagaaacagggatcatgagcatgcccgggaaaagccagccggtccccagcattcaaacacagccgctgaaggggcagaagagtgcgcagctggccaggccaggccgacaggaggacagagggcggcgggggaggaaggaaacagcctcacctctcctagaagcctcacaggttagaagagccaccgttattccccaaacaccacgcagaagagctccacttactgctccaagcatgatcctgaagatcagccaccggaagccccacaggacaatccgggatgtgggggtatgctggggcagccttgacagcgtccacagagggcacaggaagatccccaggaaccccgtctccagaagctgggactcccatcctaaaacaacgagacataccaaagtgctggctatctatgcgccgctgctggtcatctgcctgtgctacctgctcatcgtggtgaaggtgagggcggcgggcgtgcgcgtgggctgcgtgcggcggcgctcggagcggaaggtgacgcgcatggtgttggtggtggtgctggtgtttgcgggatgttggctgcccttcttcaccgtcaacatcgtcaacctggccgtggcgctgccccaggagcccgcctccgccggcctctacttcttcgtggtcatcctctcctacgccaacagctgtgccaaccccgtcctctacggcttcctctctgacaacttccgccagagcttccagaaggttctgtgcctccgcaagggctctggtgccaaggacgctgacgccacggagccgcgtccagacaggatccggcagcagcaggaggccacgccacccgcgcaccgcgccgcagccaacgggcttatgcagaccagcaagctcccatgccggccttccctctggggagcgacttttccagaaggccggccaggcgagagggtcttcctgacggcggagctgacctgcccggcccaccagctgcatgtcagctccgagccaccgggggctctggcccgggagagggaacggggacaggagcagaggacggtcatccaggcgcagcggggagctgctccccaggccacagcagacagcactgctgagaggcagcggccgcgcggggccggcagccacgaggggcagacagaggcgccagtgccctcactctcgggtgaagacgcccttgacccccagcccattcgacccggccacaagcctcgggccaccctgctccccaccttgtccagcctgaagcccccaggaccccggtccctgtccgtcccaggccccagcctcatggccctgccgagctccccagtctggtcccggccacccacagcccacatctgtgcctttggtcatagcctcgtccccatcagccccatcagcaggggtgccctgggggggatgtgggggtctgtggaggacctggaaagcctcctggggagggaagggggcagaggcgaccggcagccatgggtcccccagaagcagccactggcccagggcccggggaagccgtttcctcccaccagacgagaccccaagagagtggggcctgctggactccccagttctccctcccggggcctgctgggctctccagtggccgaacgcagctggaagctcttggttttgtctatagtggtcggcaactcatgtagagcagtgggatggccttcttcctctggagtgaaaagcaaatctagacttcgtactcttttacctataaatagtgtggacctctaccgggtactctttcgcctctgccatcagccttcccagtatgcacggagggcagtgatgggcgcttgtgatctgatccgtgcctcctccctggatgtgggagctcctgggcttccaggccccgggcacctagagacggatggtcgcacgcatgattgtcggcatctcacagggcgcaggcagaggggccggtctttgctgcctgctcttaagttcaaggagacgccactgtgggtgacctatcagaccaggcctgcagagcttggggagaggattcagggatcattgcagcaggaagctggccctttccaacaaccaccacgactaaagtctgaaaaatatttgaagccacaaggattttatgaacacgagggccaggaatgggtctgggcgcttgttggtgccctggctggagagaccccagtctcccatgaaggctgtatagagcagaagcacgcgacctgtgggtctgggcacacggctgtctctctgaggccagctgctggaggaggcctgtccctgggtggacatcagcaggaggagtgggcttcaagtgaccacagttcccagggccagccccgcacggaggcccctcagacccacagctcaaagcagaagggcccggggtcctcagccaagacccctgctcccaggacggctgcgcccacccctgtgagtgcagctccgccctgtccaccgccctgtccgcctcttgtcggctcttctggaaacctctgcagtggactcgacacaatcctgaaacaccagcatccccggggcctgcaggaatgtgctcctgccggccatcccagctacagggaggacaccgaggccaggaaggggggcgcgtccattgccccccagctgcatgacgcagagttggacccacgtccagggcatgcctccgggtgcagctgctctaagcccagagcactgtggcctctggagcaccaccagtctccacagcccactggcctgcccctgggtcaccccaggccccgcccaggccccctggcagcctctgcctgcccaagatccgccaccaccctccacagcaccgtggcctccggagcacggtccgatgcagcccagcccaggacagagctgagcaagcagatgctcaggaccagccggaggggccacttaggcgggcagaacgcaggggccaaggagcaccacaggaagatcccagccccgctggcgatgggcacctgcgtgcaggcagagggcagcacatggaacagcaacacaggcctgcaacaggacgcaccatggggaggacttgctgaacagggggccggaaaggggccctgtctctcccggagatgccgtgaatgcagcctggcttccctgcggctgtgcctgggcagctgccggggtcctcaccccagtgtgcctgtgggacgtgagcgtgttcggaagcggggccttggaggtgtaattggcagcattaaggttatattggctgagagtgggcgtggatccagtgagtgggtccttaggagaaaaggaggtgacacaggtccagggaggccgagcacagatggaggcagagactggagcgaggtggccaccaccaggaccgcccaggacagcggcagccgccagaaaccaggagaggcaggaggacacccaaggatccccacaggacccacagagcggccgacactgtggctttga

SEQ ID NO: 28284 - DNA, 5133 bp, Homo sapiens
  SIMILAR (3)..(1085): 1001254mologous to Homo sapiens c349E11.1 (somatostatin receptor 5),accession number AL031713,Smith-Waterman Score=1856.
ccctgttcccagcctccacgcccagctggaacgcctcctccccgggggctgcctctggaggcggtgacaacaggacgctggtggggccggcgccctcggcaggggcccgggcggtgctggtgcccgtgctgtacctgctggtgtgtgcggccgggctgggcgggaacacgctggtcatctacgtggtgctgcgcttcgccaagatgaagaccgtcaccaacatctacattctcaacctggcagtggccgacgtcctgtacatgctggggctgcctttcctggccacgcagaacgccgcgtccttctggcccttcggccccgtcctgtgccgcctggtcatgacgctggacggcgtcaaccagttcaccagtgtcttctgcctgacagtcatgagcgtggaccgctacctggcagtggtgcacccgctgagctcggcccgctggcgccgcccgcgtgtggccaagctggcgagcgccgcggcctgggtcctgtctctgtgcatgtcgctgccgctcctggtgttcgcggacgtgcaggagggcggtacctgcaacgccagctggccggagcccgtggggctgtggggcgccgtcttcatcatctacacggccgtgctgggcttcttcgcgccgctgctggtcatctgcctgtgctacctgctcatcgtggtgaaggtgagggcggcgggcgtgcgcgtgggctgcgtgcggcggcgctcggagcggaaggtgacgcgcatggtgttggtggtggtgctggtgtttgcgggatgttggctgcccttcttcaccgtcaacatcgtcaacctggccgtggcgctgccccaggagcccgcctccgccggcctctacttcttcgtggtcatcctctcctacgccaacagctgtgccaaccccgtcctctacggcttcctctctgacaacttccgccagagcttccagaaggttctgtgcctccgcaagggctctggtgccaaggacgctgacgccacggagctgcgtccagacaggatccggcagcagcaggaggccacgccgcccgcgcaccgcgccgcagccaacgggcttatgcagaccagcaagctgtgagagcggccttccctctggggagcgacttttccagaaggccggccaggcgagagggtcttcctgacggcggagctgacctgcccggcccaccagctgcatgtcagctccgagccaccgggtccccgggcccgggagagggaacggggacaggagcagaggacggtcatccaggcgcagcggggagctgctccccaggccacagcagacagcactgctgagaggcagcggccgcgcgggtgacgcagccacgaggggcagacagaggcgccagtgccctcactctggggtgaagacgcccttgacccccagcccattcgacccggccacaagcctcgggccaccctgctccccaccttgtccagcctgaagcccccaggaccccggtccctgtccgtcccaggccccagcctcatggccctgccgagctccccagtctggtcccggccacccacagcccacatctgtgcctttggtcatagcctcgtccccatcaggtgcacatcccggggcctgctgggctctccagtggccgaacgcagctggaagctcttggttttgtctatagtggtcggcaactcatgtagagcagtgggatgggtgagatcaccccttaataccatcacagtgaccatcagcttcagcataggaattctgggggcacattccgaccacagcacctaccttatggctacagtgagtagttcaccagccacggccaccggccccagcccctcctgtccttggttgtcaccacacttccagaagccctgctaccgcccccccacagacacacaaggtgggaccctgatgttgggggctgtcctctcacagaccctcctggggcaggctgtgggcccagctgctcagagattggtcagtagcaaatacgcaatgtcgaatgaatgtctcctcagcaagggtgcctggcacagcttttataagcagaatggcccctcggccgtgagggcgagtacctgggtgagcatcaatcagtccctgcacacagtcggcgctcaatcaatccctgcacacagtcggcgctcaatcaatccctgcacacagtcggggcacaaccaatccctgcacacagtcggcgctcaatcaatcactgcacacagtcggcactcaaccaatcacagcacacagtcgtcgctcaaccaatcacagcacacagtcggcactcaaccaatccctgcacacagtcggcgctcaaccaatcacagcacacagtcggcgctcaatcaatccctgcacacagtcggcgctcaaccaatccctgcacacagtcggcgctcaacaaatcactgcacacagtcggcgctcaaccaatcacagcacacagtcggcgctcaaccaatcacagcacacagtcggcgctcaaccaatccctgcacacagtcggcgctcaaccaatcacagcacacagtcggcgctcaaccaatcacagcacacagtcggcgctcaaccaatcacagcacacagtcggcactcaaccaatccctgcacacagtcggcgctcaaccaatcacagcacacagtcggcgctcaatcaatccctgcacacagtcggcgctcaaccaatccctgcacacagtcggcgctcaacaaatcactgcacacagtcggcgctcaaccaatcacagcacacagtcggcgctcaaccaatccctgcacacagtcggcgctcaatcaatccctgcacacagtcggcgctcaaccaatccctgcacacagtcggcgctcaaccaatcactgcacacagtcggcgctcaaccaatcacagcacacagtcggcgctcaaccaatccctgcacacagtcggtgctcaacaaatcacagcacacagtcggcgctcaatcaatccctgcacacagtcggcgctcaaccaatcacagcacacagtcggcgctcaaccaatcacagcacacagtcggcgctcaaccaatccctgcacacagtcggcgctcaacaaatcactgcacacagtcggcgctcaaccaatccctgcacacagtcagcgctcaacaaatcactgcacacagtcggcgctcaaccaatcactgcacacagtcggcgctcaaccaatcacagcacacagtcggcgctcaatcaatccctgcacacagtcggcgctcaacgaatccgtgcacacagtcggcgctcaatcaatccctgcacacagtcggcgctcaaccaatccctgcacacagtcggcgctcaacaaatcacagcacacagtcggcgctcaatcaatccctgcacacagtcggcgctcaaccaatccctgcacacagtcggcgctcaaccaatcactgcacacagtcggcgctcaaccaatcacagcacacagtcggcgctcaaccaatccctgcacacagtcggtgctcaacaaatcacagcacacagtcggcgctcaatcaattcctgcacacagtcggcgctcaaccaatcacagcacacagtcggcgctcaaccaatcacagcacacagtcggcgctcaaccaatccctgcacacagtcggcgctcaacaaatcactgcacacagtcggcgctcaaccaatccctgcacacagtcagcgctcaacaaatcactgcacacagtcggcgctgaagctccgggcgttttcgtcggggtggtgcaccaaagggccctgtgcccccgttcacacgtacacgaccactgctgtcctgggctctgtgtcccagggccgtgcgcccccgttcacagacggacatcgtacagcaattgtagagtgtgggggcgcaggcgatcatggggtcactgccagtgggaccagggctgtgggcgagtgcgccagggttcccggaggccagacgtgggacccgggagtcgagcagccggcgcccgggagcccggagccagtgccgcgcggacatcggggctcccccgttcagagggcgccgccgcccagagaccccaacgacctgtcagtcaacagagaccccagcagcctgtcggtcaacagagaccccagcagcctgtcagtcaacagagaccccagcggcctgtcagtcaggtgtggaggctcacaggggagcaggttcctgacctcactaggcagtcagagggagcgtgttaaccccgaccatccaaaagcaaaatctacgtcccactgtccggtaccgagcacgatggtatcattcgattacctgattgatctcgccacccgcagccgtcgccgtctgatgattcgcctggtgaaaggcgcgtactgggatagtgaaattaagcgtgcgcagatggacggccttgaaggttatccggtttatacccgcaaggtgtataccgacgtttcttatctcgcctgtgcgaaaaagctgctggcggtgccgaatctaatctacccgcagttcgcgacgcacaacgcccatacgctggcggcgatttatcaactggcggggcagaactactacccgggtcagtacgagttccagtgcctgcatggtatgggcgagccactgtatgagcaggtcaccgggaaagttgccgacggcaaacttaaccgtccgtgtcgtatttatgctccggttggcacacatgaaacgctgttggcgtatctggtgcgtcgcctgctggaaaacggtgctaacacctcgtttgttaaccgtattgccgacacctctttgccactggatgaactggtcgccgatccggtcactgctgtagaaaaactggcgcaacaggaagggcaaactggattaccgcatccgaaaattcccctgccgcgcgatctttacggtcacgggcgcgacaactcggcagggctggatctcgctaacgaacaccgcctggcctcgctctcctctgccctgctcaatagtgcactgcaaaaatggcaggccttgccaatgctggaacaaccggtagcggcaggtgagatgtcgcccgttattaacctgcgggtggctcggagtccttgtcaagccagcgcgctggaggcgaaggggctgcgccattccgggtcaggcagccaacgcgggacacgcgcgtctccgagcttgcggcccgcgaaacccgggtga

SEQ ID NO: 28285 - DNA, 4881 bp, Homo sapiens
  SIMILAR (1921)..(3012): 991254mologous to Homo sapiens fifth somatostatin receptor subtype,accession number D16827,Smith-Waterman Score=1866.
atggttctggagccacttgtccagcaggtgctaggccactgggagccagcggtggccaggctggaggacgtgcaggcacctgtgtttcaggccacgtcgcacagctttgggggacaactggaatgggctgaaacagatgcatctgagggatgcagctcagtccacagcgtggaccggcctccactcggaggacagaccctctttcacacctgggacagcctcgtctgtggctcgacatgctggctgacgcagggtccgcggacggcccggcgagcagtggtttgcattcagcccgccctcactgacccgagctgctcccactgtggccgagtgggcgttggctacctggggctgccgggggacgaccgagcctttcccaactgcagctctagcttctgggggtccattccaggcccagcctctctgctgctggatgccgcatctgcgtcgggcatggctgcaacggtgtccctcctgtcgctgcatcctgacaagcagctgctgaactcctccaggtttgccaagcgcagagaactgggctcggtgccacctcgacagcaggccaggacttcgagctgcagcctcactgcctgcccgcctgaccacactcacatcctcacctcctcgtccatgcccctgtgtccctgtctctgtggggccccacacttccaagggaagccctcccgcccaggcactgccaccctgtgcacccagtcctcttgctcccgtgaccggccctactcacccccgggggaagctcagggctgcctgaggtgctctaatggacaccgtgaccctggggtctgtgaggtggagggtcccactctctggctggtggaccagagaggccgtgcaccccaggccggtgctgccccactcccagcaggaccccatgtctggatcctggctctgggtctcttctctggcctcgtgagactggcgccatctccactggagccaataggcgttcggcacagctacccccagctccctctgtctctggacgagttggtggccgctcccacgcaggaatgccgacggcctttggcatcacacaggtgcaggcccggcagtggcttctacctggggctgggagggggcaggtctttggtgctcatgggacgtcactccacactgggcactggtccagggcccagcccagtccggggactaagacgagaggcctctggggtgttccagactctcgacgagggaccccctggactcctgctggcggcaggacccccaccccaagctggggtctaccacagagcggacagcaagaaaatagggtgggggcgcaggcgatcatggggtcactgccagtgggaccagggctgtgggcgagtgcgccagggttcccggaggccagacgtgggacccgggagtcgagcagccggcgcccgggagcccggagccagtgccgcgcggacatcggggctcccccgttcagagggcgccgccgcccaggcccctgtgaagactgcccccttctccgaggagcccagcggcctcctggatgctggggaaatgctgggctgcttagggcagcttgtgggagcaatcgttgagcgcccagtgtatgccagccccgctgtggtccccgtcgtggggagctctcctttccttgtctaccagatttcagtggccttggcccagccccacagcccccagccaggactgtggcctttcctggcagctgctggggtcgtcctgtgctctgaggtgcctccggggtcagggccgatgtctgtcattgctgtgggggtgacggtccctgcgctggcctggagagaggttcggggccaacgggcagcgggcaccccggtgaaagtccctcgaggctgcggtggcgacaccacgtccagccacttctcaggtcgtcctagccagagcctgacgcaccccagggctgccgccatggagcccctgttcccagcctccacgcccagctggaacgcctcctccccgggggctgcctctggaggcggtgacaacaggacgctggtggggccggcgccctcggcaggggcccgggcggtgctggtgcccgtgctgtacctgctggtgtgtgcggccgggctgggcgggaacacgctggtcatctacgtggtgctgcgcttcgccaagatgaagaccgtcaccaacatctacattctcaacctggcagtggccgacgtcctgtacatgctggggctgcctttcctggccacgcagaacgccgcgtccttctggcccttcggccccgtcctgtgccgcctggtcatgacgctggacggcgtcaaccagttcaccagtgtcttctgcctgacagtcatgagcgtggaccgctacctggcagtggtgcacccgctgagctcggcccgctggcgccgcccgcgtgtggccaagctggcgagcgccgcggcctgggtcctgtctctgtgcatgtcgctgccgctcctggtgttcgcggacgtgcaggagggcggtacctgcaacgccagctggccggagcccgtggggctgtggggcgccgtcttcatcatctacacggccgtgctgggcttcttcgcgccgctgctggtcatctgcctgtgctacctgctcatcgtggtgaaggtgagggcggcgggcgtgcgcgtgggctgcgtgcggcggcgctcggagcggaaggtgacgcgcatggtgttggtggtggtgctggtgtttgcgggatgttggctgcccttcttcaccgtcaacatcgtcaacctggccgtggcgctgccccaggagcccgcctccgccggcctctacttcttcgtggtcatcctctcctacgccaacagctgtgccaaccccgtcctctacggcttcctctctgacaacttccgccagagcttccagaaggttctgtgcctccgcaagggctctggtgccaaggacgctgacgccacggagctgcgtccagacaggatccggcagcagcaggaggccacgccgcccgcgcaccgcgccgcagccaacgggcttatgcagaccagcaagctcccatgccggccttccctctggggagcgacttttccagaaggccggccaggcgagagggtcttcctgacggcggagctgacctgcccggcccaccagctgcatgtcagctccgagccaccgggggctctggcccgggagagggaacggggacaggagcagaggacggtcatccaggcgcagcggggagctgctccccaggccacagcagacagcactgctgagaggcagcggccgcgcggggccggcagccacgaggggcagacagaggcgccagtgccctcactctggggtgaagacgcccttgacccccagcccattcgaccacggccacaagcctcgggccaccctgctccccaccttgtccagcctgaagcccccaggaccccggtccctgtccgtcccagccccagcctcatggccctgccgagctccccagtctggtcccggccacccacagcccacatctgtgcctttggtcatagcctcgtccccatcagttctccctcccggggcctgctgggctctccagtggccgaacgcagctggaagctcttggttttgtctatagtggtcggcaactcatgtagagcagtgggatggaataccccaccccttaataccatcacagtgaccatcagcttcagcataggaattctgggggcacattccgaccacagcacctaccttatggctacagctcctcctgggatccccccaagcaggaacccctggagccgtgcagctgtcctccggggcctggacaccaagggctcggctctgggcagtgccactttggacctgcaagcccagggcccctcacagctgctctgggggccagggttcaccagccacggccaccggccccagcccctcctgtccttggttgtcaccacacttccagaagcccctaccgcccccccacagacacacaaggtgcttggcaaatacgcaatgtcgaatgaatgtctcctcagcaagggtgcctggacagcttttataagcagaatgcccctcggccgtgaggcgatacctggctggcactcaatcagtccctgcacacagtcggcgctcaatcaatccctgcacacagtcggcgctcaatcaatccctgcacacagtcggggcacaaccaatccctgcacacagtcggcgctcaatcaatcactgcacacagtcggcactcaaccaatcacagcacacagtcgtcgctcaaccaatcacagcacacagtcggcactcaaccaatccctgcacacagtcggcgctcaaccaatcacagcacacagtcggcgctcaatcaatccctgcacacagtcggcgctcaaccaatccctgcacacagtcggcgctcaaccaatcactgcacacagtcggcgctcaaccaatcacagcacacagtcggcgctcaaccaatcacagcacacagtcggcgctcaaccaatccctgcacacagtcggcgctcaaccaatccctgcacacagtcggcgctcaaccaatcactgcacacagtcgtcgctcaaccaatcacagcacacagtcggcactcaaccaatccctgcacacagtcggcgctcaaccaatcacagcacacagtcggcgctcaatcaatccctgcacacagtcggcgctcaaccaatccctgcacacagtcggcgctcaacaaatcactgcacacagtcggcgctcaaccaatcacagcacacagtcggcgctcaaccaatccctgcacacagtcggcgctcaaccaatccgtgcacacagtcagcgctcaaccaatcacagcacacagtcggcgctcaaccaatcactgcacacagtcggcgctcaaccaatttgggcccaaaattggggccttaacctattcctga

SEQ ID NO: 28286 - DNA, 1437 bp, Homo sapiens
  SIMILAR (822)..(1079): 441254mologous to Cricetulus griseus ribosomal protein S14,accession number M11241,Smith-Waterman Score=113.
cccgggtcgacgatttcgtcagaaatggcacctcgaaaggggaaggaaaagaaggaagaacaggtcatcagcctcggacctcacgtggctgaaggagagaatgtatttggtgtctgccatatctttgcatccttcaatgacacttttgtccatgtcactgatctttctggcaagtgagtacctgggtggagaggcatccagctggcaaaaggctgaggaaggtaatggctgggacgggctatcagttcaggggattctctctaaagaaatgctgttttgtccaggtaagaaaatgtgcttgtccatttagcccacaaatattgtgatttcccaggggttacaagagaggagacacattcttcgtccttaacagcgtgatggtcattgaatccttggtttcttgggaattatcttctttccctagttccctttgcaggagcagcagtggactgcaagtgggctctgggtgcgggttcgacggccatttatcaagttgtgacttgtgtgaaatcactcagattctgagttttggtttcctcatatgtaaaattaggacagtaatgtctaccttgtggagtaatggtaaggattaaatgcacaagtagatatataaaatgttaatactgagtatagctatattgggccattcaaccccactggactgaactccatgagggcagagcccatgaccatcatcctccaccatgactgagctgtgttgctcttcactcattaggatatcgtaagcactccttgttggacaaggaagaaatgaccctgtgctttttgtccccagggaaacccatctgccagtgtgacctggtgggatgcaaggtaaaaggcaagaccgaagatgaatccctcacccatatgctgcttatgttgggctgccccaggatgtggcccagaggtgcaaggaagcttggggtatcaccgccctacacattcaaactccggggccacagggaggaaaatagggaccaaggacccctgggacctgggggcccagtcggccctcaagagccccttccccgctcgggttatgaagatcgggccggattggtaagtgcccccctctagctaatgcttgggtttattttgaagcattggccccaaaaagcacgtgctgtgcccagtggatgtgcagcggctggtctggtcacttttggcagttaagtttgttaagggaggctgcaagaggcaccttgtgacttaaaaatctctccctgaatatctctgtcaccttgatatgaatggcctgtttcatttgtgaatctctgtcctacactgcctggtgcagggaaaactgacaagagatgaattggcctttcctccattctttggggcattgctattaaccattttgtgtgtaccatctcctgcattgtaggatgttcagcatttttggtttccgcctactaaatatcagttgggcat

SEQ ID NO: 28287 - DNA, 396 bp, Homo sapiens
  SIMILAR (184)..(113): 831254mologous to Homo sapiens Human secreted protein, SEQ ID NO: 5576,accession number G01495,Smith-Waterman Score=93.
tcagttccttgccatgtaggcttttccatagagctgcacatggcatggtttccccaacagcatatcttctggcagccacttccagagcccctggaactctggcccaaggctctccgactgactccttcccagatcttctcggcttagcagctgaagactgacgctgcccgatcgcctcggaagcctgacacttatactttctgctcccccggctccttcagttgtacccactctttgttgagtcccacaattaccattgttctcggcccggacttcaatccggtctcccacattattccagataccacacctgaccctcatgactgcatctctctgatccacctgacgttcaccccatttccccacatttccttcttccctgtttctcaccctcat

SEQ ID NO: 28288 - DNA, 1287 bp, Homo sapiens
  SIMILAR (1125)..(1054): 791254mologous to Homo sapiens Human secreted protein, SEQ ID NO: 5576,accession number G01495,Smith-Waterman Score=87.
ttataccaggatctctcccagaaacagtccctgtggccggttcgatgcaggtgtgctgattggcttaggcttggggagagccctgcccagaccatatgcttggtgggggaggggaagagcccattttggaggctgaaagtccaagaccaaggtgccagcagggtccgtttctggcaaggcctctctcctcggcttcagatgatgccttctctctgtgttctcccatggtcttttccctgtgcacacaaagagagagctctctggtgtctcttcttcttgtaaggctatcagtccagttgcagagaacctgctttgtaccaggcactgtgctccagatggagacacaggaagaaggaggagatccagttcccagtctggagaggcttccggtccattatggaagaagatgtctaagcaggaaattcctccacactgtgatctgatttgtgatgcagggaggacttcgttaccatgggtgtgctttgaaggaggtgtggagccagagcgaaggagctgagatggcccttcattattccacttagtggtaagagggcttatcctcttctctcttccaataccattagatgtgggctgctcctggggcaagggcaggactgagcctccttcccacaaagtccccctaacagagcctgcattaatgttctttctgtcctttctctgtctctgtgtttctttctctctttctcgtccctttattgaggaacatactgttttcattcggaggcaatgaatgccagtgatagagtggctgcgtgaaaacgtaaggctggtgagcaatggagagttaatggtattgtaagaggttaagcccaccggccacactgatgtttctgccagtagcgcccttggcatggataccctgggtgacaagcctgtagcccatggttggcaatgtggtctatgaatatgtttccggtgatttgtcaacacctttaaattatgtggcaaaacttcttgcacgcgtctgtaattccagctattcaggagcctggcagccactcccagagcccctggaactctggcccaaggctctccgaccgactccttcccagatcttctcagcttagtggctgaagactgatgctgcccgattgcctcggaagccttctgcccatcggtcaaattctctcctctgaggaggcaaggctcaagtttgctgcagactcccacagatttgccgctggtaacactcggaagccgggctctcatctcagcaaatgacagcgctatttctccatttacaacagcgaaaaacttaggaatcat

SEQ ID NO: 28289 - DNA, 1556 bp, Homo sapiens
  SIMILAR (717)..(4): 711254mologous to Homo sapiens p40,accession number U93569,Smith-Waterman Score=818.
ttacaatttggcatgttttttcagtggctggtaccagttgttcctttccaagtttagtgcttccttcaggagctcttgtaaggcaggcttggtggtgacaaaatctctcagcatttgcttgtctgtaaaggattttatttctccttcacttatgaagcttaatttggctggatatgaaattctggattgaaaattcttttctttaagaatgttgaatattggcccccactttcttctggcttgtagagtttctgccaagagatcagctgttagtctgatgggcttccctttgttggtaacccgacctttctctctggctgcccttagcattttttccttcatttcaaccttggtgaatctgacaattatgtgtcttggggtggctcttcttgaggagtatctttgtggtgttctctgtatttcctgaatttgaatgttggcctgctttgctaggttggggaagttctcctggttaatattctgaagagtgttttccagcttggttccattctccctgtcatttatttcgttaatttgatcttcaatcactgataccctttcttccacttgattgaattggctactgaagcttgtgcgtgcatcacgtagttctcgtgccatggttttcagctccatcaggtcatttaaggtcctctctacactgtttattctagttagctgttcgtctaatcttttttccaggtttttagattcctgtgtgcggttgaatgccactcttgcaaagacagcttgggacacactggccctcttcagctcatctctgacttgctggtagatatctggagagacttccacggaagagttggttggctctggcttaactgctctggggatgggtggatggttcaggaactgctggttgatggcttgaggatgctggtgagccaggagccggctaacggcaatctgttggtttatcagatgggccatggctatttgttgccttacaagttgtggactaagctggggagaaagaagaccagggctcatgatgggctgtaatgcgggcacttggtttcggattggagtactgtggtgaatttggctgtgaggagactgttcgttggttttccccagggatgccagctggttcatatttggtaaatgcattggacgctggcccagaacacaatagtctgaaaggttttctcgttccactctttccactggcagccactcccagagcccctggaactccggcccaaggctctctgactgactccttcccagatcttctcggcttagcggctgaagactgacactgcccgatcgcctcggaagccgccttcttttcaagggcctgtttcccttgcctccataactgttgtgggtattgacggccaggcttctaaacctcttaaaactccccaactctggtgccaacttggacaatattcttttatgcactactttttagttattcccacctgcccagttcccttattaggttgaggcattttaactaaattatctgctttcctgactattcctaggctacagccacacctcattgccgccctttcccccagttcaaa

SEQ ID NO: 28290 - DNA, 350 bp, Homo sapiens
  SIMILAR (15)..(164): 921254mologous to Homo sapiens ribosomal protein L19,accession number X63527,Smith-Waterman Score=221.
ggcacgaggcagccatgagtatgctcaggcttcagaagaggctcgcctctagtgtcctccgctgtggcaagaagaaggtctgggttagacccctatagaccaatgaaatcgccaatgccaactcccgtcagcagatccggaagctcatcaaagatgggctgatctattcgcacgcctgtgacggctcattcttggccttcatgccggaccaacaccttgtcccgtcgcatgggccattcctagtctttgcggacactacttgatcctgtcaacatgtgagggctcctaaacgcatcatggatcacgaaatgctagctacttctataggagtccatattagatttcttgtg

SEQ ID NO: 28291 - DNA, 1127 bp, Homo sapiens
  SIMILAR (502)..(996): 801254mologous to Homo sapiens Human secreted protein, SEQ ID NO: 7925,accession number G03844,Smith-Waterman Score=698.
atggcttcggcgccccggcccacaggggcggccatcttgggctggagaggcagcctgaaggaggccaccgctggccctgctgtcagattcgaaggtcataataagggagtgacccggcgacgactcgccccaacgatggcgaggcggcgagagctgaagcgctgcctgcagctgctggcgtcctcggcggagccagcgcggcgggctcgggttaggaagaacccgagcgcctgccgcggtcgcccctcccgctacggcggcgctttgcgcggggactctgtggccggaagccgcggaactgaggcggcgcgcgctcccggccaccccaagcgcgagctagagctcgatatggtagatactcttccatgggttccgggatcacatgcattcattatacgtcagttaaacctggaaaatattaagggagctttcctgctacaagaattatgtttaaaaagctccacaggggagctctttcctttcgctgctgtggctgcagccttgagtatgctcaggcttcagaagaggcttgcctctagtgtcctctgctgtggcaagaagaatatctggttagaccccaatgagaccaatgaaatcaccaatgccaactcccgtcagcagatccggaagctgatcaaagatgggctgatcatccgcaagcctgtgatgggcaggcatatgggcataggtaagcggaagggtacagccaatgcccgaatgccagagaaggtcacgtggatgaggagaatgaggattctgcaccggctgctcagaagataccgtgaatctaagaagattgatcgccgcatgtatcacagcctgtacctgaaggtgaagaggaatgtgttaaaaaacaagcagattctcatggaacacatccacaagctgaaggcagacaaggcccgcaagaagctcctggctgatcaggctgaggcccgcagatctaagaccaaggaagcacacaagagctatgaagagcacctccaggccaagaaggaggagatcatcaagactttgtccaaggaggaagagaccaagaaataaaagctgcccctttgtgtgtacatactggcctccgtgattacatagatcagccattaaagtaaaataagcctttatctgcttgc

SEQ ID NO: 28292 - DNA, 1004 bp, Homo sapiens
  SIMILAR (328)..(786): 381254mologous to Homo sapiens ribosomal protein L19,accession number X63527,Smith-Waterman Score=100.
tgcctgtatatcagaaacacccacagaacttttaataattatctagagaaactgccccacctgacattttgattcagtagcctcgggtgtagtttaaaaagctccacaggggagctctttcctttcgctgctgtggccgcagccttgagtatgctcagggcttcagaatgaggctcgcctctaggtgacctccggctgtggcaagaagaaggtctggttagaccccaatgagacccaatgaaatcggccaatgccaactccccgtcagcagatcccggaagcttcttcaaagatgggcctgatcatccgcaagcctggtgacggttccattcccgggcttcgatgtccggtaaaaacacctttggcccgccggggaaggggcagggcaacatggggcattaggtaaggcgggaaggggtacaagccaaatgcccggaatgcccagagaaagttcacatgggatgagggagaatggaggattatagacgcgcggctgcctcagaaagatacccgtgaatcctaagaaagatcgaatcgccaacatgtattcacagccttttacctgaagggtgaaggggaaatgtgttcaaaaacaaagcggatttctcatgggaacacatccacaagcttgaaggcagacaaaggccccgcaagaaagctccctggctgacccaggcttgaggccccgcagggtcttaagacccaaggaagccacgcaagcgccgttgaagagcgcctcccaggcccaagaaggaggagattcatcaaagacttttttccaaggagggaagagaccaagaaataagaacctcccactttgtcatgtacatacttggcctcttgtgattacatagactcagccattaaaataaaaacaaagccttaagcaaaaaaaaaaaaaaaaaaaaaaaaaaagtcggcgcggccgcaaatttgtaggggtagttgcgcccgggatttggtgcgggggttgcggggtgggagaaggttgtccccagggggga

SEQ ID NO: 28293 - DNA, 350 bp, Homo sapiens
  SIMILAR (171)..(230): 611254mologous to Homo sapiens Human secreted protein, SEQ ID NO: 4864,accession number G00783,Smith-Waterman Score=60.
ggatcaaatattccatctgcactttaaacaaatgcaattgttatgcttgtgcacatggcaggccagaggccctgattgtcccccttccactaaggtggtcctccagttgaccaggcatgggctgcagggtagctattttccaggtttctacagcttggagtaataagtcatgccaagctctctctgctatatcccaaagtccctgcgggtcagcccctgagggccgtccagcttccgtctcccaacactaagttcacttcatgtctctcatggcagggaggagacttagcattccttggagacctgaagggatgcagtgagcttaagaattttcaagagcttatcagtca

SEQ ID NO: 28294 - DNA, 2271 bp, Homo sapiens
  SIMILAR (1785)..(1808): 1001254mologous to Homo sapiens unknown,accession number AF148856,Smith-Waterman Score=40.
gcttatccaccatgatcaagtgggcttcatccctgggatgcaaggctggttcaatatatgcaaatcaataaatgtaatccagcatataaacagagccaaagacaaaaaccacatgattatctcaatagatgcagaaaaagcctttgacaaaattcaacaacccttcatgctaaaaactctcaataaattaggtattcatgggacgtacttcaaaataataagagctatctatgacaaatccacagccaatatcatactgaatgggaaaaaactggaagcattccctttgaaaactggcacaagacagggatgccctctctcaccactcctattcaacatagtgttggaagttctggccagggcaattaggcaggagaaggaaataaagggtattcaattaggaaaagaggaagtcaaattgtccctgtttgcagaagacatgattgtatatctagaaaaccccactgtctcagcccaaaatctccttaagctgataagcaacttcagcaaagtctcaggatacaaaatcaatgtacaaaaatcacaaacattcttatacaccaacaacagacaaacagagagccaaatcatgagtgaactcccattcacaattgcttcaaagaaaataaaatacctaggaatccaacatacaagggatgtgaaggacctcttcaaggagaactacaaaccactgctcaaggaaataaaagaggatacaaacaaatggaagaacattccatgctcatgggtaggaagaatcaatatcgtgaaaatggccatactgcccaaggtaatttacagattcaatgccatccccatcaagctaccaatgactttcttcacagaattggaaaaaactacttcaaagttcatatggaaccaaaaaagagcccgcatcaccaagtcaatcctaagccaaaagaacaaagctggaggcatcacactacctgacttcaaactatactacaaggctacagtaaccaaaacagcatggtacttgtaccaaaacagagatatagatcaatggaacagaacagagccctcagaaatgacgccgcatacctacaactatctgatctttgacaaacctgagaaaaacaagcaatggggaaaggattccctatttaataaatggtgctgggaaaactggctagccatatgtagaaagctgaaactggatcctttccttacaccttatacaaaaatcaattcaagatggattaaagatttaaacgttagacctaaaaccataaaaaccctagaagaaaacctaggcattaccattcaggacataggcatgggcaaggacttcatgtccaaaacaccaaaagcaatggcaacaaaagacaaaattgacaaatgggatctaattaaactcaagagcttctgcacagcaaaagaaactaccatcagagtgaacaggcaacctaaaaaatgggagaaaattttcgcaacctactcatctgacaaagggctaatatccagaatctacaatgaactcaaacaaatttacaagaaaaaaacaaacaaccccatcaaaaagtgggcgaaggacatgaacagacacttctcaaaagaagacatttatgcagccaaaaaacacatgaaaaaatgttcatcatcactggccatcagagaaatgcaaatcaaaaccactatgagataccatctcacaccagttagaatggcaatcattcaaaagtcaggaaacaacaggtgctggagaggatgtggagaaataggaacactcttacactgttggtgggactgtaaactagttccacatattctcactcataggtgggaattgaacaatgagatcacatggacacaggaaggggaatatcacactctggggactgtggtggggtggggggaggggggagggatagcattgggagatatacctaatgcaagatgacgggttagtgcctggttggaatggatcaaatattccatccacacgttaaaaaaaagcaattgttatgcttgtgcacatggcaagccagaggcccagattgtcccctttccactaaggtggtcctccagtcaaccaggtgtgggctgcatggtaacccttttccaggattctacagcctggagtaataagtcatgccaagctctctctctgctatatcccgaagtctggcaccctgtgggtcagcccccgagggccatccagcttcagtctgccaacactaagatcacttcgtggccctcacgactggggaggagattaagcataccttggagacctgaagggatgcagtg

SEQ ID NO: 28295 - DNA, 1866 bp, Homo sapiens
  SIMILAR (1830)..(1865): 751254mologous to Homo sapiens ferritin heavy subunit,accession number M12937,Smith-Waterman Score=62.
atgcatttctttgatcccccaacgcctgcaccttcctctaagccttcttccaaaacctctcacaacggaataattgctcctcctccatctaacgacaagaccaagatagctatcgtaaaagttaaagacttaaaacaaactttggcaattaagacaggataccagttggaatggatcaaatattccatccacacgttaaacaaaagcaattgttatgcttgtgcacacagcaggccagaggcccagattgtcccctttccactaaggtggtcctccagtcgaccaggcatgggctgcatggtagctcttttccaggattctacagcctggaataagcctgtgaccacactaccaccgggcccgggggacgacgccctccaccagccgccgctgtcgtccaccatggtggtgctccgaggaccccgccgctgccgccactgcccacgccgatgccactacccgctccgggcccctggcaaacccactgcttttcccctcctcccagcgcccgcgctgcccgccctgggcccgctgtcgccggtgcgacggtaccaccatcccagctgtgaggctgccatcaacacccacatcagcctggagctccacgcatcctatgtgtacctgtccatggccttctacttcgaccaggacgacgcggccctggagcactttgaccgctacttcctgcgccagtcgcaggagaaaagggagcacgcccaggagctgatgagcctgcagaacctgcgcggtggccgcatctgccttcatgacatcaggaagccagagggccaaggctgggagagcgggctcaaggccatggagtgcaccttccacctggagaagaacatcaaccagagcctcctggagctgcaccagctggccagggagaacggcgacccccagctctgcgacttcctggagaacgacttcctgaaccagcaggccaagaccatcaaagagctgggtggctacctgagcaacctgcacaagatgggggccccggaagcaggcctggcagagtacctctttaacaagctcaccctgggccgcagccagaaacacaccagagcccagacaggccccacagccacgggggcacagtggtgcaggggatgggctcctatggcctttggcagctccacacctgtggctttgcaggattcaggacccatggttgctttcacagcttgttatgtgcctgtggcttttccaggcacaaggttcaagctgcctgtggctctaccattctggggtctggaagatgaccctgtggcaaccaccaccgcctggtcccgaggaccctgccctccactggtcgcctccgtcgtccaccatgttgtgctcagaggcacccgccgcggccgccactgccgatgccgatgccgccgcccgcttcgggaccctagcgaccacaccgctttaccctgcctgctcctcgcgcccgcactgcccgccctgggcccgctgtcgcaggtgcaccagaacaaccatctcagctgcgaggtcgccatcaacatcaaggtcaccctggagctccacgcctcctatgtgtacctgtccatggccttcttcttcgaccgggacgacgtggccctggagagcttcagccgctatttcttgcaccagtggcacgagaagagggagcacgcccaggagctgatgagcctgcagaacctgcgcggtggccgcatctaccttcgcgacatcaggaagccagagtgccaaggctgggagagcgggctccaggccatggactgcgccttctacctggagaagaacgtcaaccagagcctcctggagctgcaccagctggccaaggagaacgacgaccccacctctgtgacttcctggagaaccacttcctga

SEQ ID NO: 28296 - DNA, 1308 bp, Homo sapiens
  SIMILAR (89)..(310): 971254mologous to Homo sapiens OSBP-related protein 4,accession number AF323731,Smith-Waterman Score=370.
gggcagtgaaggagcaatggcaagtggcagaggagagatcaaagtgaccacccagctcattcccttgctggatgagacttcacagcctcttacatcctacagaaatcagggtgaaatggcccacacgtgccgtggaaccatcaacctgtccaccgcgcacattgacacggaggactcttgtggtatcttgctgaccagtggggccaggagctaccacctcaaggccagctcagaggtggaccggcagcagtggatcaccgccctggagctggccaaggccaaggctgtccgcgtgatgaacactcattcaggtagtgagcacttgggacagcgggtgtgtatatggtggtgtcatgagtctggaggaagtgggaattgcaagccactggtgggcagtggtggccaggagacccaggccagcgtggatcttgccttattttttaggaacttcttgaaaataatgcagcaggtggcagtcatgggattagtcatccggcaacagttttcctacgacagccagtgcgaggggtttcttttgcagttttttcagtttacagccctatatgaactcaaacttcaggagcaaggtgtcaccttctaccttcaggcaggggtgatagggccctttgctgagcacacgtacacatgctatgcagccacgttctgcagtgaccctcccagccatgcagacaacactcctcaaacccagggtatctgctgtgtggtgaccccttccaaccatgcagaccactcctcttgcgctctagacccatccagcttctgctgtcttcactggcacaccatcttgctgccagccagcgtgaatgctgtatggttttctatccagggtcaactggtggcagggaacaaaaccccgctgagactggctgaaacacaagtggggcctgtgctcagggtgcaggaagtggatatctttggtcttcagggctttgaccgccctcctcccaggctcggagaggcggtggcagccggcactgcacccagatggactgagagcgcggcggcgggaaggcggcggcggcggcggcagcagcagcagctgcaagagccctcgcagcctcggggcaggacccacgtccacacccggggctatgctgtccagagcagacctgatgaggtgagtgcagatgcatgcctggacaaccgcacaggtagcctctcctgggcagccacagccattaatctcaaggtcactggtgtccacggccatgagcttcagccggactcactccctgggcaggacacctactccttcgatatcttctgtacttcctctgtcctcttggg

SEQ ID NO: 28297 - DNA, 1929 bp, Homo sapiens; identical to SEQ ID NO: 7522
  SIMILAR (1)..(861): 801254mologous to multiple sclerosis associated retrovirus polyprotein,accession number AF009668,Smith-Waterman Score=1223.

SEQ ID NO: 28298 - DNA, 435 bp, Homo sapiens
  SIMILAR (283)..(432): 641254mologous to Homo sapiens envelope protein,accession number AF072508,Smith-Waterman Score=143.
atgggccaggtgtgctggctcacgcctgtaatccgagcactctgggaggccgagaatcagaggaaataccaggcacctgttggccagttaaaaacgattagcatggctgctggacttaacactcaggaacccagcccaactctagaactcacccctgagcgcaaaggcaatgtcgggtatgctggtaaaggaccactagaatccagcagccccaacccctttctctgtggtcaagagaggcaggaaaagaggtgcaggactgctacatcaaatagaagctgtgaagctgtaaaactacaaattgttcttcaaatagagccccagatgcagttcatgactaagatctaccacggacccctggaccagcctgctagcacatgctatgatgttgatgacaccgaaggcacccctcctgaggaaatctcaactgcatga

SEQ ID NO: 28299 - DNA, 4317 bp, Homo sapiens; identical to SEQ ID NO: 3622
  SIMILAR (1798)..(3312): 581254mologous to Sus scrofa domestica submaxillary apomucin,accession number AF005273,Smith-Waterman Score=1481.

SEQ ID NO: 28300 - DNA, 333 bp, Homo sapiens; identical to SEQ ID NO: 13112
  SIMILAR (121)..(258): 931254mologous to synthetic construct chloramphenicol acetyltransferase,accession number A02739,Smith-Waterman Score=244.

SEQ ID NO: 28301 - DNA, 1428 bp, Homo sapiens
  SIMILAR (25)..(492): 841254mologous to Homo sapiens clone 22,accession number AF009424,Smith-Waterman Score=705.
atgactctggtggagatttatttcagtcagatcatgcatgccccgcggtccagggacaggttcacagcgccgtccttcatccagagggatcgcttcagccgcttccagcccacctacccctatgtgcagcacgagattgatcttcctcccaccatctccctgtccgacggtgaagagccacctccttaccaggggccctgcaccctgcagctccgggaccctgaacagcagatggaactcaaccgagagtccgtgagggccccacccaaccgaaccatatttgacagtgatttaatagacattgctatgtatagcgggggtccatgcccacccagcagcaactcgggcatcagtgcaagcacctgcagcagtaacgggaggatggaggggccaccccccacatacagcgaggggcacgagaaaggagaaaagaatgggcatttcagtacagctgggctggctcgttccacagcccaagacaagcgccaggacggtccagctcaagactggaaccttgtccagttcctcctgcagctggtgtggccttacgaatgtggattgtctctctgttcatgggctctgctgggctctctgagctcagaaccttcagatttgttgggtgggaccacagatagtcatgggtgtgggcagcagacgcacacagtcgtagccactggggaggcaccacctgatctctgcctgcatcgccccacgtatgagcggatacacttgacagatatgcctccccactggccggggcctgagccctgctgcggcacatcggagctggagttcgcccaaatcatcatcatcgtcgtggtggtcacggtgatggtggtggtcatcgtctgcctgctgaaccactacaaagtctccacgcggtccttcatcaaccgcccgaaccagagccggaggcgggaggacgggctgccgcaggtctcccctggatctttgctgcccgacgtggctttgccagcttctgagctgtgcacgaacgggaccggccctgggtggtccctcgtgcctggctcctctggcttggcagtgcacttcaccttgtgtcctgaacaccagcacactggccacacccttaccaaccaagaggcccagcagaaaagcaaaaagtgtcaaaaaagtgtcttctgtgtcatgtggcggcagatttgtgtgatgccctttcccgggaagcgctggctgccccacctgcagagcctcccttccctgaaatcaggaagaatcgaagctgtaaaactacaaatagttcttcaaatggagccccagatgcagtccatgactaagattcactgtggacccctggaccggcctgctagcccatgctccgatgttgatgacatcaaaggcacccctcctgaggaactctcaactgcacgacccctactatgccccaattcagcaggaagcagttag

SEQ ID NO: 28302 - DNA, 1174 bp, Homo sapiens
  SIMILAR (276)..(1058): 881254mologous to Homo sapiens syncytin precursor,accession number AF208161,Smith-Waterman Score=1168.
acaatgaagaacagatagaacataactgtcaacaagtaattgctcaaacctacgccactcgaggggaccttctagaggttcccttgactgatcccaacctcagcttgtatactgatggaagttcttttgtagaaaaaggacttcaaaaaggggggtatgcagtggtcagtgataatggaatacttgaaagaaatcccctcactccaggaactagtgctcagctggtggaactaatagccctccctcgggcactagaattaggagaaggaaaaaggggctcatcagaatctatatgcttcctctcattcttagtgccccctatgaccatctacactgaacaggatttatacaatcatgtcgtacctaagccccgcaacaaaagagtacccattcttacttttgttgtgggagcaggagggttaggcggattaggtactggcattggcggtatcacaacctctactcagttctactacaaactatctcaagaactaaatggtgacatggaatgggttgctgactccctagtcaccttgcaagatcaacttaactccctagtagcagtagttcttcaaaatcgaagagctttagacttgctaaccgccaaaagagggggaacctgtctatttttaggggaagaatgctgttattatgttaatcaatccggaatcgtcacagagaaagttaaagaaattagagatcaaatacaacgcagagcagaggagcttcaaaacaccggaccctggggccttgtcagccaatggatgccctggattctccccttcttaggacctctagcagctataatattgttattcctctttggaccctgtatctttaacctccttgttaagtttgtctcttccaaaattgaagctgtaaagctacaaatcattcttcaaatggagccccagatgcagtccatgactaagatctaccgcggatccctggaccagcctgctagcccatgctccgatgttaatgacatcgaaggcactcctcccgaggaaatctcaaatgcacaacccctactatgccccaattaagcaggaagcagttggagcagtcgacggccaacctccccaacagcacttgggttttcctgttgagagggggtactgagagacaggactagctggatttcctaggccgactaacaatttctaagcttagg

SEQ ID NO: 28303 - DNA, 2224 bp, Homo sapiens
  SIMILAR (25)..(1338): 691254mologous to multiple sclerosis associated retrovirus polyprotein,accession number AF009668,Smith-Waterman Score=1522.
  misc_feature (1)...(2224): n = a,t,c or g
atgcagtccatgactaagatgtactgtggacccctggaccagcctgctagcccatgctccaatgttgatgacatcgaaggtactaatgcttcagactttcctttcctatcccaagtattagagcaagttgtatctccaaagggatctaaggaagctcaatgctgcgtcctcaggcctctaggctgtgaatccaacttgaagcaaattaaaatagacctaggtaaattctcagatacccctgatggctatattgatgttttacaaggagaggacattctagcaaaagcaggggccattagacacctgaacataggagaaggaacacacgtttgttgtcccctacttgaggaaggaattaatcctgaagtctgggcaacagaaggaaaatatggacgagcaaagaatgctcatcccattcaagttaaactaaaggattctgcctcctttccctaccaaaggcagtacccacttagacccgaggcccagcaaggactccaaaagattgttaaggacctaaaagcccaaggcctagtaaaaccatgcagtagcccctgcaatactccaattttaggagtacagaaacccaatggacaatggaggttagtgcaagatctcaggattatcaatgaggccattgtccctctatacccagctgtacctaacccttatactccactttcccaaatactagaggaagcagagtggtttacagtcctggaccttagggatgcttttttctgcatccctgtacatcctgactctcaattcttatttgcctttgaagatcctttgaacccaatgtctcaactcacctggactgttttaccccaagggttcagggatagcccctatctgtttggccaggcattagcccaagacttgagccagttctcatacttggacactcatgtcctttggtacatggatgatttacttctagctgcccgttcagaaaccttgtgccatcaagccacccaagcgcttttaaacttcctcgccacttgtggctacaaggtttccaaaccaaaggctcagctctgcttacagcaggttaaacacttacggctaaaattatccaaaggcaccagggccctcagtgaggaacgtatccagcctatatcggcttatcctcatcccaaaaccctgaagcaattaagaatgttccttggcataacaggcttctgccaaatatggattaacaggtatggcaaaatagccaggccattatacacactaattaaggaaactcagaaagccaatacccatttagtccgaaggaccagcttgcaacccgtggcatacctgagtaaggaaactgggaccagcttgcaacccgtggcatacctgagtaaggaaattgatgtagtggcaaagcgttggcctcactgtttacgggtagtggcagcaatagcagtcttagtatctaaagcagttaaaatgatacaaggaagagctcttactgtgtggacatctcatgatgtgaacagcatactcactgctaaaggggacttgtggctgtcagacaaccacaatgaagaaaaaatagaacataactggcaacaagtaattgctcaaacctatgccgctcaaggggaccttttagaggttcccttgactgatcccgacctcaacttgtatactgatggaagctcctttgtagaaaaaggacttcgaaaggcggcttacgcagtgttcagtgataatggaatacttgaaagtaatcccctcactccaggaactagcactcagctggcagaactaatagccgtcactcaggcactagaattagaaggaaaaagggaacccgaaaatccagcagacaatgctagctattcctgtgaacctctagaggatctgcgcctgctcttcaggcgacaaccaatcgaagctgtaaaactacaaatggttcttcaaatggagccccagatgcagtccatgactaagatctaccgcggacccctggactggcctgctagcccatgctccaatgttgatgacattgaaggcacccctcccaaggaaatctcaactgcacgacccctactatgccccaattnnnnnnnnnnnnnnnnnnnnnnnnnnnnnnnnnnnnnnnnnnnnnnnnnnnnnnnnnnnnnnnnnnnnnnnnnnnnnnnnnnacaggactagctggatttcctaggctgactaagaattcctaggcctagctgggaaaggtgaccacacctacctttaaacacagggc

SEQ ID NO: 28304 - DNA, 1666 bp, Homo sapiens
  SIMILAR (1)..(1011): 991254mologous to Homo sapiens G protein coupled receptor OGR1,accession number U48405,Smith-Waterman Score=1775.
atggggaacatcactgcagacaactcctcgatgagctgtaccatcgaccataccatccaccagacgctggccccggtggtctatgttaccgtgctggtggtgggcttcccggccaactgcctgtccctctacttcggctacctgcagatcaaggcccggaacgagctgggcgtgtacctgtgcaacctgacggtggccgacctcttctacatctgctcgctgcccttctggctgcagtacgtgctgcagcacgacaactggtctcacggcgacctgtcctgccaggtgtgcggcatcctcctgtacgagaacatctacatcagcgtgggcttcctctgctgcatctccgtggaccgctacctggctgtggcccatcccttccgcttccaccagttccggaccctgaaggcggccgtcggcgtcagcgtggtcatctgggccaaggagctgctgaccagcatctacttcctgatgcacgaggaggtcatcgaggacgagaaccagcaccgcgtgtgctttgagcactaccccatccaggcatggcagcgcgccatcaactactaccgcttcctggtgggcttcctcttccccatctgcctgctgctggcgtcctaccagggcatcctgcgcgccgtgcgccggagccacggcacccagaagagccgcaaggaccagatccagcggctggtgctcagcaccgtggtcatcttcctggcctgcttcctgccctaccacgtgttgctgctggtgcgcaggtactgggaggccagctgcgacttcgccaagggcgttttcaacgcctaccacttctccctcctgctcaccagcttcaactgcgtcgccgaccccgtgctctactgcttcgtcagcgagaccacccaccgggacctggcccgcctccgcggggcctgcctggccttcctcacctgctccaggaccggccgggccagggaggcctacccgctgggtgcccccgaggcctccgggaaaagcggggcccaggaggaggaagtgaccaagtttgaaggcggcagaaatggccacacagccaagaagagcccatgcaactcagtccaggattttactggaatcaaagctgtaaaactacaaatagttcttcaaatggagccccagatgcagtccataacttaagatctacagcagacccctagaccggcctgctagcccatgctccgatgttaatgacatcgaaggcacccctcccgaggaaatctcaaccgcacaacccctactacgccccagttcagcaggaagcagttagaggcagtcgtcgatcaacctccccaacagcacttggggttttcctgttgagagtggggactgagagacaggactagctggatttcctaggctgactaagaatccctaagcctagctgggaaggtgacggcatccacctttaaacacggggcttgcaacttagctcacacccgaccaatcagggagtaaagacagctcactaaaatgctaattaggctaaaacaggaggtaaagaaatagccaatcatctatcgcctgagagcacagcaggagggacaatgatcgggatataaacccaagtcttcgagccggcagtggctacccgctttgggtcccctctgtttgtatgggagctctgttttcactctattaaatcttcaactgc

SEQ ID NO: 28305 - DNA, 720 bp, Homo sapiens
  SIMILAR (487)..(561): 761254mologous to Homo sapiens PRO2221,accession number AF116695,Smith-Waterman Score=100.
atggtggagatggtagagcttgtggtgatggtgcttgtggaggaggcggtgatgaccacgctgacacatcttcccatgagtgggaactgcgggttcaccctcgtctttgtcgtccagcatgtggccctcggggagcagcctttcctcacagtcacccgcttccctctgggccttgaccctgctactgccgagaaggctacgtgctcaccaaaaatgctccctgatgcccccaacgcctctcctatgtccaaggaaatacttctgcagagcacgttagagtttccaatgcatgtgtgttatctcagagacaaagggcagaaaggggaaaaaacagaaagtacagtacgagaaggcttcctgcaggacaggatgtctcagctgagaccttcggaatgcctcggattcaaccagcagaagggagaaactgaaatggcatgggaacctagccagactcaggcctcagaagcagcagacacagagacgggtcgcagctcctcgccagcagcagaacaaagctggacaaagaatgactttgacaagctgacagaagtagacttcagaagccctgttaatacattggctgttcaggaccctttccccagagccccaggctgggttctggcacgaaggcccacacccacaatggaaaggctcgaggtattggaaatgctaaggctcacacagaccatggagcccagcgacctggagcagctgtcgtag

SEQ ID NO: 28306 - DNA, 774 bp, Homo sapiens
  SIMILAR (364)..(768): 691254mologous to Homo sapiens MSTP063,accession number AF119814,Smith-Waterman Score=407.
agcacaagaagaagaagctaaggtaaatgaaattgcctttataaatacccttgaagcccagaataaacgtcatgatgttttatcaaaattgaaggaatatgaacagaggcttaatgagctacaggaagagcgtcagagaagacaggaagaaaagcaagcacgtgatgaagctgtgcaggaacgcaagagagctctagaggcagagcggcaggcccgtgtagaagaattgttaatgaagaggaaagaacaagaagcccgaattgaacaacagaggcaagaaaaggaaaaagcccgtgagggtgcagcccgggaaagagctagagacagggaagaacgattggcagcactcacagctgctcaaccaagaagctatggaagagttacagaaaaaaattcagctcaagcatgatgaaagtattcgaaggcacatggaacagattgaacaaagaaaagaaaaagctgctgagctaagcagtgggcgacatgcaaatactgattatgcccccaaactgacccctttatgaaagaaagaagcagtgttctctctgcaatgtcctgatctcttcagaggtatatctttttagccatgttaaagggagaaaacaccagcaagccgtgagagagaataccagcatccaggggcgtgaactgtcagatgaagaagtggagcatctttccttgaagaagtacattattgacattgtggttgaaagtacagctccagcagaagctttgaaatatggagaagagcggcaaaaaaaaaaaaagtcgacc

SEQ ID NO: 28307 - DNA, 678 bp, Homo sapiens; identical to SEQ ID NO: 7800
  SIMILAR (121)..(390): 901254mologous to Homo sapiens MSTP063,accession number AF119814,Smith-Waterman Score=402.

SEQ ID NO: 28308 - DNA, 399 bp, Homo sapiens
  SIMILAR (393)..(259): 421254mologous to Canis familiaris type II collagen,accession number AF039939,Smith-Waterman Score=73.
atgcacgtgcatgtttacagcagcacacttcacgattgcaatgacatgaaaacaaaaatggaacatgacaatgcagatcccagtccttacataccagagctcttcttccgcttcatcgcaagtgtagccaccacagctcaagtaaccacatctccaatgaaatttgatagtgcataccagagtatcttagtttttaatctccctaaaaccctcacccagtgcctgagagcgctcaatcagaatgcgagagcagcgcggcggcgcccccgtgtggccacagggacgaggacagaggaccggaccccgctcccctttctcaccaaccaggacctccgaggctctccctctgctcccagcacctggacagggctctgcactcaaggagcctccgggtctcaa

SEQ ID NO: 28309 - DNA, 660 bp, Homo sapiens
  SIMILAR (348)..(277): 371254mologous to Mus musculus alpha-1 type IV collagen,accession number M13043,Smith-Waterman Score=40.
caggagctgccatgccaggcccaggggccctggggtcatgggcagagagcaggtccctctgctggcagccaaggagatgttgttcttggagggtcaaagacttacttagctgggagtctgaaggtggtcatgggttacaaaggggttacaaagagctcagcgatacattcccttgattttggaattcccatcctcgacaaccatgagccaattaaatttgtgttcattactccagtgcctgatcatctgaggtggaacagtttcatcccgaaacccatccccgcctacctgtgccgcctgccctggtcagtggaaaagttttattccatgaaaccagtacttggtgccaaatatgttgaggtgcatcttggaatgggagactggagggacccatggatcccaaccctggacctggttcccccagtacaatccatgagccagttgaatctgaatgcgaagatggaacgacgactgaccagagtcatgctgacatcaacccccataacatggggactgatcaagaaaaccacacaggaagctgagaaactgctggagtgccagggtgtcaccttttgctggaactcagaagtacaatcgatgtttaacggaccagtgctttctgactcagctcctctctaccctgaatacaagagaccctaa

SEQ ID NO: 28310 - DNA, 1773 bp, Homo sapiens
  SIMILAR (1253)..(1363): 751254mologous to Homo sapiens Human secreted protein, SEQ ID NO: 6812,accession number G02731,Smith-Waterman Score=162.
atgcacgtgcatgtttacagcagcacacttcacgattgcaatgacatgaaaacaaaaatggaacatgacaatgcagatcccagtccttacataccagagctcttcttccgcttcatcgcaagtgtagccaccacagctcaagttggattctataagaaccgcattcgcgccctcacccagtgcctgagagcgctcaatcagaatgcgagagcagcgcggcggcgcccccgtgtggccacagggacgaggacagaggaccggaccccgctcccctttctcaccaaccaggacctccgaggctctccctctgctcccagcacctggacagggctctgcactcaaggagcctccgggtctcaacaggagctgccatgccaggcccaggggccctggggtcatgggcagagagcaggtccctctgctggcagccaaggagatgttgttcttggagggtcaaagacttacttagctgggagtctgaaggtggtcatgggttacaaaggggttacaaagagctcagcgatacattcccttgattttggaattcccatcctcgacaaccatgagccaattaaatttgtgttcattgtgcatcttggaatgggagactggagggacccatggatcccaaccctggacctggttcccccagtacaatccatgagccagttgaatctgaatgcgaagatggaacgacgactgaccagagtcatgctgacatcaacccccataacatggggactgatcaagaaaaccacacaggaagctgagaaactgctggagtgccaggggtatctggcagataaaatttctaagcagcaaagcattcaaagagtgacttgggtgctcctaaaagcattccattttcaaagggaaacagagcataaaagttcagaaaatttacagcctgacaatgcagtagaaaagaaaaacccattttttgaggagaaactcaagctggctgcagaaatttgcataagtaacaacaagccaagtgttgatccccaagacaagggggaaaatgtctccagggcatgccataggtcttcatggcagcccctctcatcacagacccagaagcataggaggaaaaaatggtttcatgggcagggcccagggtccccatgctatgtacagcctagggacttggtgccctgcatcccagatgctcccactgttgctaaaaggggccaaggtgcacagaagtcaagaatggaggtttgggaacctccacctagatttcagaagatgtatggaaatgctaggatgcccaggcaaaagtttgctgcaggggcagggccctcatggagaacctctgctagggcaatgtggaagggaaacgtggggctggagcccccacacagagtccctactggggcactgcctagtggagctgtaagaagagggccaccgtgttccagaccccaaaatggtagatccaccaacagtttgcactgtgcatctggaaaagtcacagacactcagcgccagactgtgaaagcagccaggagggaacatataccctgcaaagccacaggggcagagctgcccaagatatggggacctacctcttgcatcagcatgacctggatggccactagagggctccttggtctggcggtaacgccagtgcctgagaaggcacccatcactcagcagatcgggaaagggagtctccctttgcccgggggagttagagaagcctctgctccaccacctcttgtggaaggcccgacatcagtcaagcccgcccacagccatctggaggactaa

SEQ ID NO: 28311 - DNA, 246 bp, Homo sapiens
  SIMILAR (32)..(184): 301254mologous to squash leaf curl virus Rep protein 4,accession number AB027465,Smith-Waterman Score=68.
aactgcttaacaaaatcccaagctcagggcttctcagcatttacctaatttctgaaaggctcttctgaaagaattgagctgcagaaagtgcaagacatgccaatttgagacacacggtcttctaagactgaaggataaatttaatgcatttcagaaactaaacatcacagcaagctctatctctgagctataatttgtttttaatgcaaagacactagtttgataatatatactgtaatcctgaaa

SEQ ID NO: 28312 - DNA, 445 bp, Homo sapiens
  SIMILAR (90)..(1): 381254mologous to Bacillus subtilis ORF3,accession number U55043,Smith-Waterman Score=65.
tttttttttacattgggatgctttttgataacttgactcctttcttggccagctgaaactcgtcgcacagggcagaaaataaaccagctctccacaagagttcctctctaaacttctccatgggcaaggtccggagttctttcagaagagcctttcagaaattaggtaaatgctgagaagcccctgagcttgggattttgttaagcagttgccaggggacactctcagtaaagaaatggtgagtgatccggaagcttgaaagccgtgtcacaatgttgtaggctgcccggcaccttcaatttttattctcaaagttttcagtcttgcagagatttgagatccatgtaaaaaggcagtaaaaacgtgacttcactttgagaaatagtcattcttgaatttcacactccctatcttcactccaattttttaaaagagtttctgactg

SEQ ID NO: 28313 - DNA, 5877 bp, Homo sapiens
  SIMILAR (3962)..(3771): 461254mologous to Homo sapiens HTRM clone 1253545 protein sequence,accession number Y73349,Smith-Waterman Score=178.
  misc_feature (1)...(5877): n = a,t,c or g
ttttttttttttgatttgagtattttatttataaatgtacatttactataaaagctgttgcattttagacaacttgttgtttttattttttactgtttctcagaggcattttagaataaatactttaaatgaaagttagtataaccgatatagaagcactggcccacccagagcagtaacatcttttgggacgggactcacatatgagggtgggatcatttcagtttgttaaatcttacactgcgtataggataacctataatatggtattgcattaatcacactacatgggaaggggaattgcatgggggaaggtccgcttaggtggaaaaaaccaaaagggttacccattatttttattaaagagtagggactagcttttgggagtatgagaaaaaaaaatcagatattcttcctcaggaacaataaatcactcacttgcctcccctgctcttttaaacaaacacatttacattatagctcaatggagcagagcattttttttttcctgggatctcaaagattatttgaaaagaaatagatcatactcattatgctgcattggaaaaaacaagatctagtctgcctaagctagccatgtaacagactccaaatgaaatataaatcaaattataaatagaaaccagttggcaattggaatttagaaaatgttggagattattctgtgctggtgactagtgttcattatgggaaagcacattttgcagttggagaatggggctttatttttcttgactcggattctagcttcaatacatgtacaatgagcctcactaagaaatatgtataaatgggtttgtgaaaccagaagggaatgtgcaatattcatgtaatccttacataacggatggagttgccacatgtaaaaaagtaatcctataaaaatcggttatgaatgacccatattgtacatgtttgtgccattacctagtggtactctgcctaatatcatgcaaagtgtaaacatcccacattatcaaaatatttaataaaacatgcaggtggataatcaaaatattggacttgatctgtacattttcaaaacaatttttctttttaattttttttctttttttcttttttttatttttattttttcctgtaaaacagcaaacacctccattgagaagtcttggaaacttggggaagtgactccatctctcctccaatggtactggcatcccataattttatcggccatgtgcaaacagctttgcgttttcctaaggcacaaatttttaatgaaatgatgtgtagatttcaatcctaataacagctcatccaaatgacaaatatgggtcgaaaatccctccagtgggctgagggaaatttctggcaccctatatgggaacccacatggcaaaggaacccatctaggcatggtaataaataatccgctagcccatactcaataaggacacggggaaaaattattgctttaccataacaggaaaaacatcttctttggccccccctttttatggacctaccatccaatctatttagggagtgttatcccctgggtcttaccatttccaccaaaatggtccatcttggacttatttggccattggatttaagggcagaataaataggtcccccatatcaccagtctttaacaaccaaaaacaaaaaaccagcctggaggatctacattgtgatgctttttaataacttgactcctttcttggccagctgaaactcgtcgcacagggcagaaaataacccagctttccaacaagagttcctctctaaacttctccatgggcaaggtccggagttcttgatagcaaaaaaagtgatggagaatggaggagagtaggtattcattgaagtgggcagggcataatctgtgctgtaggttcttggctggatcaacagacccaggggctgaccacatcatataccacatagattctattaagatggacttaacgcttttcctttgggaaaaccctgtgccttccaggccccttaanggaagaaacttggcccagccaaggggtgagcagtgcctcaacaccctaaatgaatgaacttatcctcgggtgccctcatcctccccaaataccctccatgttaagtctccttattgaagactccctaatcctagtgccctcgagagaagcaggccaacagaggcctgatgtctgacattgactctttggaagattaaacttccctcacagattttgataatgactttggaaatgatgactgaaatatttccctctgctttcttcctacctttgggcaacgtcccggagtgtaaatctagctgatattgcaaggttttgctttatttgatgaaccagcctatattaatgacataacttccaaggtacacagaacctaatacctaacggtgccaataatttaattggtataatttcctacctccaaaggtaagtaacacaaatgtttcaggattacagtatatattatccaaactagtgtctttgccattaaaaacaaattatagctcagagatagagcttgctggtgatgtttagtttctgaaatggcattaaatttatccttcagtcttagaagaccgtgtgtcctccaaatgggcatgtccttgcactttcctgcagctcaattctgtaaacataaaggtgtttaattcctagacattcctaaaacaaaacaggtttattgccatcatttagctaattcccaaagaagagaataacacattttaaaccataagcctgtttgaccatgctaaaaccttttttgagctattcaggatcattacaaccccatattcttttgtgtatactgtgcaaatgcaaaaaaaaaaaaaaaaccaaaacaataaacaggaaaaacataaacactgtgctacgaaagaacagataccacctttcagaagagcctttcagaaattaggtaaatgctgagaagcccctgagcttgggattttgttaagcagttgccaggggacactctcagtaaagaaatgagtgagtgatccggaagcttgaaagcccgtgtcacaatgttgtaggctgcccggcacttctggatcgcatgtagcaatcattacagttcaggagaccatttcgaatcctaacattccgtcacactcactgcatctccaagctggccctttaacaaattcccacacctgaaaacactggaatgtgaaaaataagaagattgagggtcctcgatgatcattgaaagctccctttacccaaaagaaagcccaacaggaaaaacaacagcttctttcccacttaatagacttccgcctttgcactgggagactcgaatctgatggttaaatgcttttattccagcgggaagggtttttggcttcacatcttctgaactgtgccgttggatttgatgtcctgactgattcctgggatggatccctgaagcaagctgtgggtttgttccacagtgtgggggccccagcctcggtatccagctgatggtccttcatggactcctttttgatacagggttcccagaatgagccaaggccccttcagttaggctgcccttctacctaccagtcgatcactttccctaggtcttcagcaataagtcactgtcatctccctggaatgatttcttccatcttctgtcttgtttttcagtcttgacagtttcccaggtctatcttattcattgtcccactgccttcagtcatggaggaaagaggtagacaagctggtcagcggaacttgaaagaaacagtaaatggaaccacagggtcttcaaataatctaaggctcctcctcatagtatctgcgttcttcctcttccacctccttttgggccttttcccaactcttctttcaggcttgtcctgctccttcttggtatctctcctggagcaaacgttcctgttcctgttgccatttttcctgtcgcctgcgctcctcttctgggtcccatgcccagaacttaaaaggtgtcgtaacaggtgacttctcactgcttggagaatccacttgagaattgagatttggcaaatgtagttggttggcttcaggcattttgtccagaaatggaaatgtcagcgttgcttcgggttctggagattttggctttaccaccttttgtgacagcaccaactccacctttccactcatttcattttctggtttcttctggtctttttcttccgacacatcattcttcagctgggggctggagggaaattccacaaaggccacggtcgggctgcatcgagtcacagttgttgtaaaatgctgtggttctgatgaggcaagttctatattcccttttcttgattttccaccatcattcttgtcctcttgactattcggttccgttttctcagtggttgctgcgagctcttgggaaacagagttgggcttctttatgttgatctcgatgctaccgttgtcttgtttcagctccagtggagacccgtgcactctggccacaccttcaaacatttgggatttggttaaggagtgggcaggtgccaccgtgggacactctctttccttctcctcctctctatgaaccgtctctccattcacactgactttcccgtctaccttaaaggtcttcagaacatcttgagaatttttgggctgggagtaaggcctgggtgtcaagcataggcacttgcttttgggaagtgacaagttttgcttggagaccccacttgcctgcttgacatgctggtatcccagaacactggcacgagcaatggtggtttcaacagtggcagtgaatttgggtggaggcagtgactgttgccgcaggtatttcatgggattggggtcattcaggaaggaggataaatttggctctgttgaatggcttctttccagaatttttggcatctccaagcgttcgagaacagcctcactgatggtgaacctctcaatgtactgttgaaggatcccctctgcctcctcctgggaccgagcgttcttatatgcttcatgcagctctctctctctccgctctttttcttgaacaatttctctgtaggttttgatgcttttccttcgttcacttgtcccatcttctccagccagtaacttctccatttttttcctttcttcctctttcttgattaagtcctgagaaacacttcttctacgactcttccaacgagccaggtcatcttgccatttgtcgtcctcttccctcagctggttatttatcagctgcagctgctcctggcgggccctgctgtgcggctgcaccgcggcctcctcctcacaccgcatgtcaaacatgctggtgctctctgcgtcattcagacacaggaagttctcggaccgtaatcttgaagggccttcttccccaacccagcgggggaggtggcgggtaacttccaagcttcttgcggtattcctctcttctctgctttcttctttctcagaggcgcggggacgtaggccggtctgattgcttttgttcgggaggtactggttaaaaggcactgctgatttcggctcaccatgggaagtccgccgtgcagacatgtcatccttcttcacatctggcagcttccgatgaggcaagtcggattcagagtcgcttcctctcccatcgctgcttcccctgaggactacatctggtgaaggcgtctgccgacgagcgagagccaaaggaatccaggctgtcgaaggaatcatctctgccgtggcgaggaggagagagggagtcgctgcgctcggaatcccagcagtcgatgtagccactgtctcggatactgcgtttaggactttcaatgtcatcagtgtcctttcgcatctgagccaacaatccttcaaactccttcaggtttagtgtcgttccgctgtaggatgtgcagctgtttgctgcttttcccagccagtaaatggtaac

SEQ ID NO: 28314 - DNA, 1206 bp, Homo sapiens
  SIMILAR (331)..(423): 511254mologous to Homo sapiens dJ622L5.6 (novel protein),accession number AL049795,Smith-Waterman Score=79.
atggaatgggaggattgccgagcagggttgagagccctgctggactgcacgctgaagatttgtagtggaaccagcctgcagttgcatgtgttctcgggcactcagcagctggggatgagagaggagaaggcagatgggcagttggtccatgagtggacggcgatgccaaaagacttttcccgcctccaggccaacgtggactccaaaggaaaagaaccttgtaaatatgatggcataccccctaaaacacaggattctgtttattatgccaaagaagaaaagaagaaaacattggcagaacctttagtccaaaggggtgcagaaggtgacgtgtataaagcaccgactcctagcaaggaaacccaaggggcgctggacgtcaaagaggagcacaatgtgcagctggaggtgcctgtggaccagtcatggaccgggtgggtggctgcatccgagtgggccaagcctggagaacttgcgcgacgtggctggctgcctggccccactctgcgcctggcccgtgctgcctgctggcacgtcttggctctgcgtcagggtgactggcatacccatggacacagggaagtcaggaaacaggaggcgccagggcctccatcagtaggttacctgagtggctgtgtggacgggacaccccctggccagctggacgcatgtgcagcacccacaccgcatcttctcttcctttgcagtcaggaaacaggaggcgccggggcctccatcagtgggtttcctgagtggctgtgtggacgggactcctcccggccagctgccatgcatgtgcagcacgcatacttgagacaagctgagatagttaaagaagatgaagagatacatgagaacacccctgattttgagggcaacaaggataaagaagatgcaaggctttgtgaagacgttgaaagaaagcagcatgtggagacccacactgtaaacttttgctccaagaactaccgcaggaacataccaggaaagccaagagaatccacagaccctttgaaggaggtggattgctgctacagtctctgtgggacagccgaggaactgacgaggcctgcagaaaaggttacctggaggacagaggcaggtacagccatgaacaatgacactcaaggacttcagaaagaccaacccaaggcctctgtcctacttgaattgggggacaaggggctgtccaaaggccagaactga

SEQ ID NO: 28315 - DNA, 716 bp, Homo sapiens
  SIMILAR (276)..(632): 381254mologous to Homo sapiens P2ECSL,accession number AF205435,Smith-Waterman Score=144.
  misc_feature (1)...(716): n = a,t,c or g
tttcgtgtgcattgtgggagaacgaaagatggcggcgcccgtaaggcggacgctgttaggggtggcggggggttggcggcggttcgagaggctctgggccggcagtctaagctctcgcagccgtggctcttgcagccgcaccctcactgcaacggatccccatggcgcttgttgggcgcgttgtgcctgcagcggccacctgtagtctccaagcccgttgaccccattgcaggaagagatggcgtctctactgcagcagattgagatagagagaagccctgtattcagaccacgagcttcgtgccnctggatgaaaaccagcgactggcaaagaagaaagctgacccttcatgatgaagaagaatgaacaggatatattgctggcgcaagattttggaagatatttgggaggcagaaatttctacagttcaaaacttggagctccgcaataacagaagctgattgaaaagaatgacccgaacatccctgaacaagaagctataacgggaaccttgtcctgttagtcagagagaagtttggagaccaggatgtttggatactgccccaggcagagtggcagcctgggggagacccttcgaggaacagctgaacgaaccctggccacactctcaggttttatcgaatctccgtgtcttgcaattacctctaatttcattgccttcattgcgaagaagagcgcttttccctgcagctaa

SEQ ID NO: 28316 - DNA, 1613 bp, Homo sapiens
  SIMILAR (1056)..(1460): 421254mologous to Homo sapiens P2ECSL,accession number AF205435,Smith-Waterman Score=134.
atgggaattccaacccagtgtctcctgagcccacagacctctttctacacccttctgaagaggacctgccacatgctagcttctaggctggctgttggggaaggtacaatcaaggctctaacctgccttcttacagctctgaggctgctgccccattggaagattactccccaggcttcccttgccccaagcagtgagctgactggaatggtaccccgggaggcccctgagtctgctcagtgcctgtgcccttccctcaccatcccaaatgccaaggatgtgcttcggaagaggcacaagagaaggagccgacagcaccagcggttcatggcccggaaggccttgctgcaggagcaggggctgctgagcatgcctccagaaccagggtcctccccactgcccacccctttcggggcagcgacagcaactgaagctgccagcagtgggaagcagtgtctgagggctggatctggcagtgccccatgcagcagaaggcctgctcccgggaaagcctcagggcccttgcccagcaagtgtgtggctatcgactgtgagatggtgggcacgggaccccgagggcgggtaagcgagctggcccgctgttccattgtgagctaccatggcaatgtcctctatgacaagtacatcaggcctgagatgcccatcgctgactaccgtacccgctggagtggcatcactcggcagcacatgcgcaaggctgtccccttccaggtggcccagaaagaggttggtgatgatgatgatgatgatgggggtgttgttgctggtggtgtaatatttaggattgagatagagagaagcctgtattcagaccacgagcttcgtgctctggatgaaaaccagcgactggcaaagaagaaagctgaccttcatgatgaagaagatgaacaggatatattgctggcgcaagatttggaagatatgtgggagcagaaatttctacagttcaaacttgggagctcgcataacagaagctgatgaaaagaatgacccgaacattcccttgaacagggaagcttagacagggaacctttgtcctgttagtcagagagaagtttggagacccaggatgtttggattacctcccccaggcagagtggccagcctgggggaagaccctttcgaggaacaagctgaaacgaaccccctggcccacactcctcagaaaaacaacatggaaagcccaagttccctaggaaaatgccacccctgtgggcacctacacattccaagttcccccccagggcaatgcggacagagagtaaccctcggagcccaaggtgttccttccttcaaagcactgctattaactggagacttttccccaggctgggaattaagggccatcatgtgtggggtcactaagggatgaagctggggtgactattttgaaacccaaaatacctggcccaagtttagggaggtttgtttcagacctctgatggggccgagttgcctgttggacggtgctcagacaagtttgggattagagcctcaaggacattgtgtgattgcctcacatttgcaggtaatatcaagcagcaaactaaattttgagaaataaacgagtctatttctgaaaaaaaaaaaaa

SEQ ID NO: 28317 - DNA, 1686 bp, Homo sapiens
  SIMILAR (352)..(1683): 931254mologous to Homo sapiens unknown protein,accession number M22334,Smith-Waterman Score=2230.
gttaggtaatgggaccgaccttatggggccttaataggctgcagtgtgttggactcggctcctctcaatgattgtatgtctcccactggagactttatggcagcttcccatgtggaccgccttggaatttatctatggtgcaatatttccctgtattcagttgtttcagtacggccacttcctgcagattatgtcccttcaatagtcatgcttcgtggtacttgtcaaacccaagatgtagaagtttcagaagaaacagtagaaccaagtgatgaattgatagaatatgattcgccagaacagttgaatgagcaattggtgactctttcacttcttcctgaatcgcgatggaaaaaccttcttaaccttgatgttattaagagggccctagaactacgatacaatatcaatgtgcaaaaatcacaagcattcctgtacaccaacaacagacaaacagagagccaaatcatgagtgaactcccattcacaatggcttcaaagagaataaaatacctaggaatccaacttacaagggatgtgaaggacctcttcaaggagaactacaaaccactgctgaaggaaataaaagaggatacaaacaaatggaagaacattccatgctcatgggtaggaagaatcaatatcgtgaaaatggccatactgcccaaggtaatttacaggttcagtgccatccccatcaagctaccaatgactttcttcacagaattggaaaaaactactttaaagttcatatggaaccaaaaaagagcccgcatcgtcaagtcaatcctaagccaaaagaacaaagctggaggcaccacactacctgacttcaaactatactacaaggctacagtaaccaaaatagcatggtactggtaccaaaacagagatatagatcaatggaacagaacagagccctcagaaataatgccgcatatctacaactatctgatctttgacaaacctgagaaaaacaagcaatggggaaaggattccttatttaataaatggtgctgggaaaactggctagccatatgtagaaagctgaaactggatcccttccttacaccttatacaaaaatcaattcaagatggattaaagacttaaacgttagacctaaaaccataaaaaccctagaagaaaacctaggcattaccattcaggacataggcatgggcaaggacttcatgtctaaaacaccaaaagcaatggcaacaaaacccaaaattgacaaatgggatctaatgaaactaaagagcttctgcacagcaaaagaaactaccatcagagtgaacaggcaacctacaaaatgggagaaaatttttgcaacctactcatctgacaaagggctaatatccagaatctacaatgaactcaaacaaatttacaagaaaaaaacaaacaaccccatcaaaaagtgggcaaaggacatgaacagacacttctcaaaagaagacatttatgcagccaaaaaacacatgaaaaaatgctcaccatcactggccatcagagaaatgcaaatcaaaaccacaatgagataccatctcccaccagttagaatggcaatcattaaaaagtcaggaaacaacaggtgctggagaggatgtggagaaataggaacacttttacactgttggagggactgtaaactagttcaaccattgcggaagacagtatggtga

SEQ ID NO: 28318 - DNA, 430 bp, Homo sapiens
  SIMILAR (103)..(390): 361254mologous to Saccharomyces cerevisiae Ylr409cp,accession number U19729,Smith-Waterman Score=144.
agctctggcagaggactgttccactagacacgctgaagggactggtgtacgtgttttccttcaggaccagagctgagaggagctgggatcgcggcggcaatggaacgggcctcagaaaggcgcacggccagcgcgctttttgcggggttccgggccttgggacttttcagcaacgacattccacacgtggtgcggttcagcgcgctcaagcgccggttctatgtaacaacctgcgtgggcaagagtttccacacctatgacgttcagaaacttagtctggttgcagtaagtaattctgttccacaggatatctgctgtatggcagctgatggcagattagtctttgctgcttatggaaatgttttctctgcatttgcccgtaataaagagatagtacatacctttaagggtcataaggcagaaatccatc

SEQ ID NO: 28319 - DNA, 830 bp, Homo sapiens
  SIMILAR (633)..(704): 451254mologous to Arabidopsis thaliana putative WD-repeat membrane protein,accession number AL161502,Smith-Waterman Score=49.
atgcttcctggtacttgtcaaacccaagatgtagaagtatcagaagaaacagtagaaccaagtgatgaattgatagaatatgattcgccagaacagttgaatgagcaattggtgactctttcacttcttcctgaatcacgatggaaaaaccttcttaaccttgatgttattaaggttcagaaacttagtctggttgcagtaagtaattctgttccacaggatatctgctgtatggcagctgatggcagattagtctttgctgcttatggaaatgttttctctgcatttgcccgtaataaagagaaaaagaataaaccaaaggaaccacccaaagtacccaaatcagcaccatttttcattccaacaattcctggccttgtacccagatatgctgcacctgaacaaaataatgatccccagcagtctaaagtggtaaatcttggagttttggctcaaaaatcagatttctgcttgaaacttggaaggaaggactgggtaaataataagtatggacactggctcttcaaccttctggaaagaatcagggcccatcagggaatttgaaacagagctggcgaagcttgtctcctgattgtggtgggtccatagaagttatgcagagcttcttgaaaatgattgggatgatgctggacagaaagcgtgattttgagttagcccaggcataccttgcattgtttctaaagaaattgctacagccaccccacctttcagcaaccaccaccctaatcagtcagcagccatcaacatcaaagccagaccttccaccagcaaaaaagttacaatttgctgaaggtttggatgattcttag

SEQ ID NO: 28320 - DNA, 1449 bp, Homo sapiens
  SIMILAR (645)..(896): 301254mologous to Oryctolagus cuniculus c-myc,accession number AB019241,Smith-Waterman Score=77.
ttaagacttgattgtgaccgttgctctccagtggacccatttatctccttctttgtgaggcagaggggagcctctgttagcccttggcttctgtaacaggcaaactgaggccagcccctcttgaaggcagtccttgaactctgccctaggtgggatggttgcctcattaccagtcaagtaatgttgcacctcagagtatttgtgcaatacagccacttcccacaaacttcggatttcaaagtgctttgtaggctcctcccccagcactgaaacaattctcttcatcctttttttcccctcttcttccctctggaaccacagacagggagactgagggtaggagatgcagctcccaacagctgtacctccagagattccaatttggttggcctgtagtagggcctgggcatctggatttttaaaactccccaggttgataatgtgtagccagaggttgagttgcaggccctgaggctttgagcctcccgcaaagccgagtgagttgagagcgcctggaaggcagacgctgcggagggagggactcccgggctcgccaaacagcggggcctcgggcaagagcgtcgctggcgcgtcctcattctgcgattgtataccttcctcctcctcctctgccttggctaatgtgccctgttgcacagtcttccccaacactgtgtccagcacccatacaggagttatactcacaggatggcaagctgtaggtggaagtgggggcattgtcacagtgggataaagatgtacagtatcccctggtactccacacccatggaaggaaaagcgcttggagatgcacatcctcagatagcccacagtcattagggagcagcctttctgtgagctctctattgagagaaatcttgatccatggcaaaccgtctgtggtattctcggctgtagcccttggcgggagatgggaggagggaatgacagtgccaaggaggcagctgaaggatcgtcaccctgggagccacagctctggcttccttttgccaatgggccataaagactcgctttggagccgccgcggccaacaggagtgggcaaaggacgctgccagtgcctgagtgatacgggaaataaggaataggggattcgggtgcaccttgccactgccacgggcataaggggaggggtgtgaaatgtgtgacttgtccagagaggccagcattccagggacagggattgttgccgtctcccattcccggcttcctcctcagaattgtatcgtggtgtggcttcattgctcagagaagagccgtgcaggggtacaaccatcttcttggaggtgggtctgctcctctcatgatcgaggacttcacaaacccaaagtggaaccgccgtgaaaatgacggacaaccggccaggggacccaggcagagacacagaaagaggctcaacaaagactggccgatatgcaaaaatttgcat

SEQ ID NO: 28321 - DNA, 1896 bp, Homo sapiens; identical to SEQ ID NO: 3155
  SIMILAR (1263)..(1337): 681254mologous to Homo sapiens Human secreted protein, SEQ ID NO: 6395,accession number G02314,Smith-Waterman Score=80.

SEQ ID NO: 28322 - DNA, 985 bp, Homo sapiens
  SIMILAR (872)..(702): 321254mologous to Homo sapiens Human secreted protein, SEQ ID NO: 7169,accession number G03088,Smith-Waterman Score=70.
tcaaacgtagtcactcagaggagttaagtcttcagcatttcctttgttgagtggattttggtcatagtcaacaggaaaaaaaacccctgcaaatggaaccagtccacctatccttccctgagagcaggaagaacgaggtgggggcatttctcccctgctccctctctgctgaggttcagttctggaggtagctgtggcctctggagcttcttttaaaaggcctcccttccatggtccctggtctccaaacactttttccatcccttgttcttgtagaccacagcctgttcgtacttctgcggctctgattggctcttcatcaacaattcttttattgaaagtctctgaaactctcaactcaatgtgctgtccatggtctccaagaatcctgactgatacatacagctgtcttcttattccgaatgtgaactccgtgagatcagaaatcctgtctatactgttcattttttcctctccagtcatcagaatggcaccagcacacagcacgacttcaggcagcctttgttgaatttgattcactagtctacttgtgcaccccaaaagtagcaactcaccaacgaaagcatcccaatattttggcaagcagtcacatctggcaatttcattaacccacaagtttttcacatttcccttcaagcagccttgcaacattatgggcttggctgaagcttgccaaaaaggaaacagctcaatcctatcccgggtaagcaagcaggtgtgctgataatacttaaaaggtgggaggagcaggggaggcagaattgtaatgctctcttgcttgggagcacttgtctcccagaggaagggttagatcactcagcaaaatatgaaaccagagagcagagtagttttgaaaagttaaaatatttagatatgaataattttcagaggaaagatagcagtaaaggttggaggggtggggatggtgcaagaagaaataaatcttatcaaaggcagccttggg

SEQ ID NO: 28323 - DNA, 930 bp, Homo sapiens
  SIMILAR (863)..(456): 751254mologous to Homo sapiens dJ466N1.4 (novel protein similar to ANK3 (ankyrin 3, node of Ranvier (ankyrin G))),accession number Z97630,Smith-Waterman Score=483.
tcatccacctgcaggacggaacagaggctctgttatgggacacggggtgtgccagggctcctgggtctcttccactgccctaggcgctccagatactccctcagcatatggatgatctggaacaagagggtgagctgagctgcctgggttcctagggaggcagacaggctgatgctgcttccagacttggccaggtgcaggggtgtgcgaccagctcggtccagggcatctacacgggcccctgcaggtaccagctgaggtgagcattctgggggtgagggggagaaagaggacagagaggggaagaaaccacatacctcctcgtagcagtgtggacttaagaatccaggaccaccagagcctggctctgcgtggccactggactgcactggaaacaggcaaacccaagaggagttgtcggaggcttccattgcctgcaccctgaacccctaaccgggatccgcgccatcttccagcagctgctgcactgacaccaccaagacagagggaggaagggggagaaagcggcgatgttagctaagctgcagacccgatgccagtttaaaaaaacagccatggctgggtgcggtggctcatgcctagggtatcttgcagcgcagctcgtcgcgcggctccgcatcctgctgccacaggacgtgcaagtagcgcagcggcgactgggccccgccggacgcccggcccgagaggcccgcgccgccgccgcccagcgcagacccgaagtcagcgaaggagaagaggccctcagcgtcagtcagcggctccggcgccaccgcgcactcgccctccgagctcgagtggcctgagcgcggctcgtcgtccgcgtccccggcggcggctgccatggcaacggctccgcgcgggcctggccgcctgagcctcgttcccgaccgaccaacggacctacttccc

SEQ ID NO: 28324 - DNA, 377 bp, Homo sapiens
  SIMILAR (375)..(154): 481254mologous to Homo sapiens lysophosphatidic acid acyltransferase-delta,accession number AF156776,Smith-Waterman Score=139.
gtcatctcacctaaagcacttttcactttatctctggcaaccaagggttacagaaaactcagcaccaaaggatgaaaggggaacttgtccccttcggtccccagccctgccctcccctgcagcctaaaataccctttctatgatcacagaacaaagttcacactcaccacacagccattctcacacacactcgcacaaaaagaaaaccaaagcccactaaagcacatggggaaaaaaagattacaaaacatcttcctccccatccggccttgagaccagactccctggctggagaggtcgtgacttccgccgtgcccaaaacagccagttcacgagggtccagggccgccgggggggcaccatgggcgtctctggga

SEQ ID NO: 28325 - DNA, 1008 bp, Homo sapiens
  SIMILAR (1)..(666): 881254mologous to Homo sapiens putative p150,accession number U93572,Smith-Waterman Score=1035.
atggataaattcctggacacatacaccctcccaagactaaaccaggaagaagttgattctctgaatagaccaataacatgctctgaaattgaggcaataattaatagcctaccaaccaaaaaaagtccaggaccagacggattcacaaccgaattctaccagaggtacaaagaggagctggtaccattccttctgaaactattccaatcaatagaaaaagagggaatcctccctaactcattttatgaggccagtatcatcataataccaaagcctggcagagacacaacaaaaaaagagaattttagaccaatatccctgatgaatatcgatgcaaaagtcctcaataaaatactggcaaaccgaatccagcagcacatcgaaaagcatatccaccacgatcaagtgggcttcttccctgggatgcaaggctggttcaacacacacaaatcaataaacgtaatccatcacataaacagaaccaatgacaaaaactacatgattatctcaatagatgcagaaaaggcctttgacaaaattcaacagcccttattgctaaaaactctcaataaactaggtgttgacggaatgtatctgaaaataataagagctgtttatgacaaacccacagccaatatcatactgaatgggaaaaaagttaattcaagatggattaaagacttaaatgtcagacctaaaaccataaaatccctagaagaaaaccaagggaataccattcaggacataggcatgggcaaggacttcatgtctaaaacaccaaaagcaatggcaacaaaagccaaaattgacaaatgggatctaattaaaccaaagagcttctgcacagcaaaagaaactaccatcagagtgaacaggcaacctacagaatgggagaaaatttttgcaatctacccatctgacaaagggctaatatccagaatctacaaagaacgcaaacaagtttacaagaaaaaaacaaccccatcaaaaagtgggcaaaggatatga

SEQ ID NO: 28326 - DNA, 2169 bp, Homo sapiens
  SIMILAR (1)..(798): 911254mologous to Homo sapiens putative p150,accession number U93568,Smith-Waterman Score=1223.
  misc_feature (1)...(2169): n = a,t,c or g
atggataaattccttgacacatacaccctcccaagattaaaccaggaagaagttgaatctctgaatagaccaataacagactttgaaattgaggcaataatcaatagcttaccaaccaaaaaaagtccaggaccagatggattcacagccgaattctaccagaggtacaaagaggagctggtaccattccttctgaaactattccaatcaatagaaaaagagggaatcctctctaactcattttatgaggccagcatcatcctgataccaaagcctggcagagacacaacaaaaaaagagaattttagaccaacatccttgatgaacatcgatgcaaaaatcctcaataaaatactggattcggcaaaccgaatccagcagcacatcaaaaagcttatccaacatgatcaagtgggcttcatccctgggttgcaaggctggttcaacatacgcaaatcaataaatgtaatccagcatataaacagaaccaaagacaaaaaccacatgattatctcaatagatgcagaaaaggcctttgacaaaactcaacaacccttcatgctaaaaactctcaataaattcggtgttgatgggacatatctcaaaataataagagctatctatgacaaacccacagccaatatcatattgaatgggccaaaactggaagcattccctttgaaaacgggcacaagacagggatgccctctctcaccactcctattcaacacagtgttggaagttctggccagggcaatcaggcaggagaaggaaataaaggcccaaaatctcctcaagctgataagcaacttcagcaaagtctcaggatacaaaatcaatgtacaaaaatcacaagcattcttatacaccaataacagacaaacaaagagccaaatcatgagtgaactcccattcacaattgcttcaaagagaataaaatacctaggaatccaacttacaagggatgtgaaggacctcttcaaggagaactacaaaccactgctcaatgaaataaaagaggatacaaatgaatggaagaacattccatgctcatgggtaggaagaatcaatatcatgaaaatggccatactgcccanagaattggaaaaaactgctttaaagttccaatggaaccaaaaaagagcccgtgtcgccaagtcaatcctaagccaaaagaacaaagctggaggcatcatgctacctgacttcaaactatactacaaggctacagtaaccaaaacagcatgtgtaacaggctctgggccagaaactctcaaaccaattgataataacaagctcaagttcaatgccattggctgtctgcagagccccagggtggacaaggagggccagctgtgtgcagcgtctgttgtgtacagcattcaggacaatgtcctcttggatcccgagctctccacacagacagagcagataaaggaagggcactgctgtgggaccgccttccccatgcccagcgagcctcttctgcatctctttctgctgtggcaaagtgggttaaacagcgcgcggatttgcgaggaacatagccaacaaatgagatatcaaacgcagcttcccatagaatactataagcgcgtgtgtgcaaataaactagaaaatctagaagaaatggataaattcctcgacacatacactctcccaagactaaaccaggaagaagttgagtctctgaatagaccaataacagactctgaaagtgaggcaataatcaatagcttaccaaccaaaaaaagtccaggaccagatggattcacagccaaattctaccagaggtacaaggaggaactggtaccattccttctgaaactattccaatcaatagaaaaagagggaatcctccctaactcattttatgaggccagcatcatcctgataccaaagcctggcagagacacaacaaaaaaagagaattttagaccaacatccttgatgaacatcgatgcaaaaaccctcaataaaatactggattcggcaaaccgaatccagcagcacatcaaaaagcttatccaacatgatcaagtgggcttcatccctgggttgcaaggctggttcaacatacgcaaatcaataaatgtaatccagcatataaacagaaccaaagacaaaaaccacgtgattatctcaatagatgcagaaaaggcgctttga

SEQ ID NO: 28327 - DNA, 1437 bp, Homo sapiens
  SIMILAR (700)..(1434): 951254mologous to Homo sapiens putative p150,accession number U93567,Smith-Waterman Score=1195.
atggaaactgaacaacctgctcctgagtactactgggtacataacgaaatgaaggcagaaataaagatgttctttgaaaccaacgagaacaaagacacaacataccagaatctctgggacacattcaaagcagtgtgtagagggcaatttatagcactaaatgcccacaagagaaagcaggaaagatccaaaattgacaacctaacatcacaattaaaagaactagaaaagcaagagcaaacacatgcaaaagctagcagaaggcaagaaatatctaaaatcagagcagaactgaaggaaatagagacacaaaaaacccttcaaaaaagtaatgaatccaggagctggttttttgaaaagatcaacaaaattaatagaccactagcaagactaataaagaagaaaagagagaagaatcaaatagatgcaataaaaaatgataaaggggatatcaccacttatcccacagaaatacaaactaccatcacagaatactacaaacacctctatgcaaataaactagaaaatctaggagaaatggataaattcctggacacatacaccctcccaagacaaaaccaggaagaagttgaatctctgaatagaccaataacaggctctgaaattgtggcaataatcaatagcttaccaatcaaaaaaagtccaggaccagatggattcacatctgaattctaccagagttcattttatgaggccagcatcatcctgataccaaagcctggcagagacacaaccaaaaaagagaattttagaccaatatccttgatgaacattgatgcaaaaatcctcaataaaatactggcaaaccaaatccagcagcacatcaaaaagcttatccaccacgatcaagtgggcttcatccctgggatgcaagtctggttcaacatacgcaaatcaataaatgtaatccagcatataaacagaaccaaagacaaaaaccacatgattatctcaatagatgcagaaaaggcctttgacaaaattcaacagcccttcatgctaaaaactctcaataaattaggtattgatgggacatatctcaaaataataagagctatctatgacaaacccacagccaatatcatactgaatgggcaaaaactggaagcattccctttgaaaactggcacaagacagggatgccctctctcaccactcctattcaacatagtgttggaagttctggccagggcaattaagcaggagaaggaaataaagggtattcaattaggaaaagaggaagtcaaattgtccctgtttgcagatgacatgattgtatatctagaaaaccccattatctcagcccaaaatctccttaagctgatgagcaacttcagcaaagtctcaggatacaaaatcaatgtaccaaaattacaagcattcttatacaccaataacagacaaacagagagctaa

SEQ ID NO: 28328 - DNA, 1479 bp, Homo sapiens
  SIMILAR (1110)..(13): 891254mologous to Homo sapiens NAG13,accession number AF194537,Smith-Waterman Score=1696.
tcatgatttggctgtttgtctgttattggtgtataataatgcttgtgatttttgtacattgattttgtatgctgagactttgctgaagttgcctatcagcttaaggagattttgggctaagtcgatggggttttccagatatacaatcacgtcatctgcaaacagggacaatttgacttcctgttttcctaattgaataggctttatttctttctcctgcctgattgccctggccagaacttccaacactatgttgaataggagtggtgagagagggcatccctgtcttgtgccagttttcaaagggaatccttccagtttttgcccattcagtatgatattgcctgtgggtctgtcataaatagctcttattattttgagatacatcccatcaacacctaatttattgagagtttttagcatgaagggttgttgaattttgtcaaaggccttttctgcatctactgagataatcatgtggtttttgtctttggttctgtttatatgttggattatgttttttgatttgcatatgttgaaccagccttgcatcccagggatgaagcccacttgatcatggtggataagctgtcggatgtgctgctggattcggtttgccagtattttattgaggatttttgcattgatgttcatcagggatattggtctaaaattctctttttttgttgtgtctctgccaggcctgggtatcaggatgatgctggcctcataaaatgagttagggaggattccctctttttctattgattggaatagtttcagaaggaatggtaccagcccctccttgtacctctggtagaattcggctgtgaatccatctggtcctggactttttttggttggtaagctattaattattgcctcaatttcagagcctgttattggtctattcagagattcaacttcttcctggtttagtcttgggagggtgtatgtgtcgaggaatttatccatttcttctagattttctagtttatttgcatagaggtgtttatagtattctctgatggtagtttgtatttctgtgggattggtggtgatatcccctttatcatttttattgcatctatttgattcttctctcttttcttctttattagtccagtaattattcaggagcaggttgttcagtttccatgtagttgagcagttttgattgagtttcttaatcctgagttctagtttgattgcactgtggtctgagagacagtttgttataatttctcttcttttccatttgctgaggagtgctttacttccaactatgtggacaattttggaataggtgtggtgtggtgctgagaagaatgtacattctgttgatttggggtggagagttccgtagatgtctgttaggtctgcttggtgcagagctgagttcaattcttggatatccttattaactttctgtctcattgatctgtctaatgttgacagtgcggtgttaaagtctcccat

SEQ ID NO: 28329 - DNA, 795 bp, Homo sapiens
  SIMILAR (789)..(25): 761254mologous to Homo sapiens putative p150,accession number U93574,Smith-Waterman Score=965.
ctagttctccattacagtgcaaggttgcaggttttgcccattcagtgtgatattggctgtgggtttgtcataaatagctcttattattttgagatacgtcccatcaatacctcgtttattgagagtttttagcatgaagagctgttgaattttgtcaaaggccttttctgcatctattgagataatcatgtggtttttgtctttggttctgtttatatgctggattacgtttattgatttgcatatgttgaaccagccttgcatcccagggatgaagccaacttgattgtggtggataagctttttgatgtgctgctgaatttggtttgccagtattttattgaggatttttacatcgatgttcatcagggatattggtctaaaattctctttttttgttgtgtctctgccaggctttggtatcaagatgatgctagcctcataaaatgagttagggaggattccctctttttctgttgattggaatagtttcagaaatggtaccatctcctctttgtacctctggtagaattcggctgtgaatctgtctggtcctggactttttttggttggtaggctattaattattgcctcaatttcagagcctgttattggtctattcagggattccacttctcctggtttaatcagtcgtctgaagccttcttctctcaactcatcaaagtcattctctgtccagctttgctccattgctggcaaggagctgcattcctttggaggagaagtgctctgatttttataattttcagcttttctgctcttgtttctccccat

SEQ ID NO: 28330 - DNA, 960 bp, Homo sapiens
  SIMILAR (776)..(958): 931254mologous to Homo sapiens putative p150,accession number U93569,Smith-Waterman Score=287.
atgcacagaatatatattggtctcagcaccacatcacacttattgcgaagattggacacacagttgggagaaatacaaactaccatcagagaatactacaaacacctctatgcaaataaactagaaaatctagaagaaatggataaattcctggacacatacacactcccaagactaaaccaggaagaagttgaatccctgaatagaccgataacaggttctgaaattgaggcaataattaatagcctaccaaccaaaaaaagtccaggaccagatggattcacagctgaattctaccagaggtacaaagaggagttggtaccattccttctgaaactcttccaatcaatagaaaaagagggaatcctccctaactcattttatgaggccagcatcatcctgataccaaagcctggcagagacacaacaaaaaaagaaaattttagaccaataactctgatgaacatcgatgcaagaatccttaataaaatactggcaaaccaaatcctgcagcacatcaagaagcttatccaccatgatcaagttggcttcatccctgggatacaaggctggttcaacatatgcaaatcaataaacgtaatccagcatataaacagaaccaaagacaaaaaccacatgattatctccatagatgcagaaaaggcctttaacaaaattcaacagcccttcatgctaaaaactcccaataaattaggtattgatgggatgtatctcaaaataataagagtcatttatgacaaacccacagcctccagttttgaatgggcaaaaactggaagcattccctttgaaaactggcataagacagggatgccctctctcaccactcctattcaacatagtgttggaagttctggccagggcaatcaggcaggagaaacaaatacagggtattcaattaggaaaagaggaagtcaaattgtcactgtttgcagatga

SEQ ID NO: 28331 - DNA, 2361 bp, Homo sapiens
  SIMILAR (960)..(4): 891254mologous to Homo sapiens putative p150,accession number U93568,Smith-Waterman Score=1439.
ttacccattcagtatgatattggctgtgggtttgtcataaatagctcttattattttgagatacatcccgtcaatacctagtttattgagagtttttagcatgaagggctgttgaattttgtcagaggccatttctgcatctattgagataatcatgtggtttttgtctttggttttgtttatatgatggattacgtttattgatttgcatgtgctgaacaagccttgcatcccagggatgaagccaagttgatcgtggtggataagctttttgatgtgctgctggatttggtttgccagtattttattgaggatttttgcatcgatgttcatcagggatattggtctaaaattctctttttttgttgtgtctctgccaggctttggtatcaggatgatgctggcctcatgaaatgaattagggaggattccctctttttctgttgattggaatagtttcagaaggaatgttaccaactcctgtttgtacctctggtagaattcagctgtgaatccatctgatcctggactttttttggttggtaggctattaattattgcctcaatttcatagcctgttattggtctattcagggattcaatttcttcctggtttagtcttgggagggtgtatgtgtccaggaatttatccatttcttctagatttaatagtttatttttgtagaggtgtttatagtattctctgatggtggtttgtatctttgtgggatcggtggtgatatcccctttatcattttttattgcatctatctgattcttctctctttccttctttattagtctttctagcagtctatcaattttgttgatgttttcaaaaaaccagctcctggattcattgattttttgaagggtgttttgtgtctctatctccttcagttctgctctgatcttagttatttcttgccttcggctagcttttgaatgtgtttttctcttgcttctccagtagtcattcaggagcaggttgttcagtttccatgtagttgagcagttttgagtgagtttcttaatcctgagttctggtttgattgcactgtggtctgagagacagtttgctacaatttctgttcttttacatttgttgaggagtgctttacttccaactatgtggtcaatattggaataagtgtgatgtggtgctgagaagaatgtatattctgttgatttggggtggagagttctgtagatgtctattaggtccacttggtgcagagcagagttcaattcctggatatccttgttaactttctgtctcattgatctgccttcggtctttgatgatggtgatgtacagatggggttttggtgtggatgtcctttccgtttgttagtattccttctaacagtcaggaccctcagctgcaggtctgttggagtttgctggaggtccactccagaccctgtttgcctgagtatcaccagcagaggctgcttatcagcctcgccagggcccccgcgccgcccaatcccagcaactctggttctcctgtgaccccaagccttccagatccctgggtttccccccacgggactgtcacattcttccccgccggagacgccagtcgcggggcctcctccctggggtgtgagcaggtcggcgcgccacacttctctaggtggccggacgcgcgcccagggaggagctggcggcggggcccaggctgttccggagagaagaggtctggaaagtcctggggaactcgcagggcacgggccgctgtcgcggttgggaggcgagggcgcagcgctggggttgtagattccaagacccctgagggtggctgtgttggtttctcgcaggagtcggaggctccctgctttccagccgcccagtgacccaagcttaatcttcagcaccacttggggcgaccttttcggtgcaaacctacgattctgtttctcaggattcctccccatcccgcttcgccccggaaaagctgacaagaacttcaggtgtaagccctgagtagtgaggatctgcggtctccgtggagagctgtgcctttcatcatctatgagggagacatctacacctatcaggatgtagacaaaaggagcagcagagtggcccatgtcttcctgaaccattcctctctgaaaaagggggacacggtggctctgctgatgagcaatgagccggacttcgttcacgtgtggttcggcctcgccaagctgggctgcgtggtggcctttctcaacaccaacattcgctccaactccctcctgaattgcatccgcgcctgtgggcccagagccctctaattgtactttatcagggatgactacatttgcagaagagatatgtttaaaggaaggtacctgaattcctttcttcat

SEQ ID NO: 28332 - DNA, 2286 bp, Homo sapiens
  SIMILAR (1)..(1650): 831254mologous to Homo sapiens putative p150,accession number U93563,Smith-Waterman Score=2386.
atggatgaattcctggacacatacaccctcccaagactaaaccaggaagaaattgaatccctgaatagaccaataacaagttctgaaattgaggcagtaattaatagcctaccaaccaaaaaatgtccaggaccagacggattcacagccgaattctaccagaggtacaaagaggagctggtacccatccttctgaaactaattcaaacaatagaaaaagagggactcctgcctaactcattttatgaggccaccaacatcctgataccaaaacctggcagagacacaacaaaaaaagaaaatttcaggccaatatccctgatgaacatcaatgcaaaaatcctcaatgaaatactggcaactgaatccagcattaaaaagcttattcaccatgatcaagacagcttcatccctgggatgcaaggctggttcaacatatgcaaatcaataaatgtaatccatcacataaacagaatcaataataaaaaccacatgattatctcagtaaatgcagaaaaggcctttgataaaattcggcatctcttcatgctaaaaacactcattaaactaggtattgatgaaacgtctctcaaaacagtaagagctatttatgacaaacccacagccaatatcatactgaatgggcaaaagctggaagcattccctttgaaaactggtataagacaaggatgccttctctcatcactcctattcaacatagtattggaagttctggccagggcaatcaggcaagagaaagaaataaaagatattcaaataggaagagaggaagtaaaattgtctctgtttgcagatgacatgattgtatatttcaaaaaccccattgtctctgcccaaaatctccttaagctaataggcaacttcagcaaagtctcaggatacaaaatcaatgtgcaaaaattacaagcattcttatacaccaataatagacagacagagagtcaaatcgtgagtgaactcccattcacaatagctgcaaagagaataaaatacctaggaatacaacttacaagggatgtgaagtacctcttcaaggagaactacaaaccactgcataaggaaatcatagaggacacaaacaaatggaaaaatattccatgctcatggataggaagaatcaatatcatgaaaatggccatactgcccaaagtaatttatagattcaatgctagtcccatcaagctactattgaatttctttacagaattagaaaaaaactgcttaaatttcatatggaaccaaaaaagagctcatatagccaagacaatcctaagcaaaaagaacaaagctggaggcatcacactacctgatttcaaactatactacaagtctacagtaaccaaaacaacatggtactggtaccaaaacagatatatagaccaatggaacagaacagaggcctcagaaataacaccacacatctacaaccatctgatctttgatgaatctgacaaaaacaatcaatggggaaaggattccctacataacaaatggtattgggaaaactggctagccatatgcagaaaactaaaactggactccttccttacacattacacaaaaattaactcaagatggattaaagacttaaatgctggtagcaagatccagtacacatgcagacaggacaaaatccagagagagaagagccatcgcttcttcctacgtatcctcttagaaaaaagaaagccttttttggaaattcatcagcagacttccttccacgtttcttggtcacaattggctattcttgaaccagatgggcattcagaaggtcatatgactgcccgaaatctccttaagctgataagaaacttcagcaaagtgtcaggatacaaaatcaatgtgcaaaaatcacaagcattcttatacaccaataacagacaaacagagagccaaatcatgagtgaactcccattcacaattgattcaaagagaataaaatacctaggaatccaacttacaagggatgtgaaagacctcatcaaggagaactacaaaccactgttcaaggaaataaaagaggacacaaacaaatgggagaacattccatgctcatggatagaaagaatcaatattgtgaaaatggccatactgcccaaggtaatttatagattcaatgccatccccaccaagctatcaatgactctcttcacagaattggaaaaaaacaactttaaagctcatatggaaacaaaaaagagcctgcattgccaagacaatcctaagcaaaaagaacaaagttggaggcatcatgctacctga

SEQ ID NO: 28333 - DNA, 1692 bp, Homo sapiens; identical to SEQ ID NO: 9117
  SIMILAR (343)..(1677): 721254mologous to Homo sapiens putative p150,accession number U93572,Smith-Waterman Score=1565.

SEQ ID NO: 28334 - DNA, 1431 bp, Homo sapiens; identical to SEQ ID NO: 6841
  SIMILAR (1)..(1080): 911254mologous to Homo sapiens putative p150,accession number U93569,Smith-Waterman Score=1694.

SEQ ID NO: 28335 - DNA, 749 bp, Homo sapiens
  SIMILAR (749)..(159): 901254mologous to Homo sapiens putative p150,accession number U93563,Smith-Waterman Score=916.
ctcatggctgtctttgtgatagtgagtgagttctggttttgtaaagtgtggcacctccactccgttgttccagcttccacagtgtgatatgcctgcccccattcaccttctgcttcctgaaccatccctagaaacagtggctggtgccatgcttcctgtgtagcctgtagcactaatttattgagagtttttagcatgaagggctgttgaattttgtcaaaggccatttcggcatctattgagataatcatgtggtttttgtcattggttctgtttatatgctggattatgtttattgatttgcgtatgttgaaccagccttgcaccccagggatgaagcccacttgatcatggtggataagctttttgatgtgctgctggattcggtttgccagtattttactgaggatttttgcatcaatgttcatcagggatattggtctaaaattctctttttttgttgtgtctctgccaggctttggtatcaggatgatgctgacctcatgaaatgagttagggaggattccctctatttctattgattggcatagtttcagaaggaatggtaccagctcctgcttgtgcctctggtagaattcggctgtgaatccatctggtcctggactttttttggttggtaggctattaattattgcctcaatttcagagcctgttattggactattcagggattcaacttcttcctggtttagtcttgggagcgtgtatgtgtcgaggaatttatccat

SEQ ID NO: 28336 - DNA, 2484 bp, Homo sapiens
  SIMILAR (68)..(12): 781254mologous to Homo sapiens putative p150,accession number U93572,Smith-Waterman Score=76.
tcatgatttggctctgtgtgtctgttcttggtgtataggaatgctggtgatttttgcacattcatttttgtatcctgagagtttgctgaagttgcttatcagcttaaggagattttgggctgagatgatggggttttctaaatatacagtcatgtcatctgcagacaggaacaatttgacttcctcttttcctaatcgaatacactttatttctttctcttgcctgattgccctggtcagaacttccaacactgtattgaataggagtggtgagagagggcatccctgtcttgtgccagttttcaaagggaatgcttccaatttttgcccattcagtatgatattgactatgggtttgtcataaatagctcttattattttgagatacatctcatcaatacctagtttactgagagtttttagcatgaaagggtgttggattttgtcgaaggccttttctgcatctattgagataatcatggggtttttgtccttggttctgtttttgtgatagattaagtttattgatttgtgtatgttgaaccagccttgcatcccagggatgaagccaacttgatcgtggtggataagctttggtatcaggatgatgctggcctcataaaatgagttaggaaggattccttctttttctattgattgtaatagtttcagaaggaatggtaccagctcttctttgtacctctggtagaattcagctgtgaattcctctggtcctggactttttttggttggtaggctattaattattgcctcaatttcagaacctcttattggtctattcagagattcaacttcttcctggtttagtcttgggagggtgtatgtgtccaggaatttatccatttcttctagattttctagtttatttgcatagaggtgtttatagtattctctgatggtagtttgtatttctgtgggatcagtggtgatatcccctttatcattttttattgcgtctacttgattcttctctctcttcttctttattagtcttgctagcagtcttgtgtctttgttctcattggtttcaaagaacatctttatttctgccttcactttgttatttacccagtagtcattcaggagcacgttgttcagtttccatgtagttgcgtggttttgaatgagtttcttaatcctgagttctaatttgattgcactgtgttctgagagacagtttgttgtgatttctgttcttttatatttgctgaggagtgctttacttccaactatggtcaattttggagtaagtgtgacgtggttctgagaagaatgtatattctgttgatccaggtcacgctgatgcaagaggtgggtttccatagtctcgggcagctccacccctgtggctttgcagagtacagctctcctcctggctgctttcatgggctggcgttgagtgtctgcagcttttccaggcacacagtgcaagctattggtggatctaccattctggggactggaggacagtggtcctcttctcacaaatccactaggcagtgccctagtaggatctctgtgttggctcccaccccacattttccttctgcaaggctcaacaccatgtggaagctgccaaggcttggggcttccaccccctgaggccacagcatgaggtctactttggcccctttcatccacggctggagcagctggtacacagggcaccaggtccctaggcttagcctggaccttattgttcatatcaccatcagtattttggtcaaaggcattcaacaagtctctaggaggttccaaactttcccacattttcctgtcttcttctgagccctccaaactgttagaacctttgcctgttacccagttccaaagcctcttgcacattttcaggtgtcttttcagcatcacaccactcctggtaccaattaactgtattagttcattttcatgctgctgataaagacatacctggatatccaggcagaagtttcctgcaggggtggaatcctcatggagaatctctgctagggcaatgcagaagggaagtgtggggtctgtacccccatgcagagtccacactggggcactgtctagtgaaactgtgagaagagggccactgtccttcagaacctcattctcctgcttgtccggggccatggctgtggcttctgaagccagctcacagctcaaggttctctggctctgctccagctgagaactgagctgctgcttctcatccctggctcggctccgcatgaactgagctgagagtttggtacaggcagaaagctctgacattctatggcctattttcatcccatttaattctggaggagaatatgcctgcaggaaaagtctcaatggactgtccccaaccaccctcctcaactctatgccgagagaaccttggacctttctctcctcacaactgcactcgaaccacatcagcttcacttttactggcttcaaaggttgggcttctgcataacatttcactgtcat

SEQ ID NO: 28337 - DNA, 1341 bp, Homo sapiens
  SIMILAR (1044)..(178): 891254mologous to Homo sapiens putative p150,accession number U93572,Smith-Waterman Score=1336.
ttatataattttgggcttcacaatctccttcatccttttgatttcctcctcagacatgacattataatacctgatgatgtcccactcatcatcctcttccaagtgagtgatgagaagctgtggagccctcttgccatggtagtacctacagaaaagcctctgctgcttctgtggtgcttcctcttttcctatctgaatacccgttatttctttttcttgcctgattgccctggccagaacttccaatactacgttgaataggagtggtgagagagggcatccttgtcttgtgtcggttttcaaaaggaatgcttccagcttttgcccattgagtatgatattggctgtgggtttgtcaaaaatagctcttattattttgagatgtgttccatcaatacctagtttattgagagcttttagcatgaaggggtgttgaattttgtcaaaggccttttctgcatctattgagataatcatgtggtttttgtcattggttctgtttatgtgatggattatgtttattgatttgcatatattgaaccagccttgcatcccagaaataaagccaacctgattgtggtggataagctttttgctgtgctgctggattcggtttgccattattttattgagggttttcgcatcaatgttcatcagggatattggcctgaaattttcattttttgttgtgtctctgccaggttttggtatcaggatgatgctggcctcataaaatgagttagggaggattccctccttttctattgtttggaatagtctcagaaggaatggtaccagctcctcttcgtacctctggtagaattcggctgtgaatccatctggtcctgggctttttttggttggcaggctattaattactgcctcaatttcagaacttgtcattggtctattcagagattcaacttcttcctggtttagtcttgggagggtgtatgtgtccaggaatttatccatttcttctagattttctagtttattttcatagaggtgtttatagtattctctgaaggtagtttgtatttctttctctctggctgcacttaacattttttccttcatttcaactttggtgaatctgatgattatgtgtcttggggttgctattcttgaggagtatctttgtggtgttctctgtatttcctgaattttaatgttgacctgtcttgctaggttggggaagttctcctggataatatcctgaggagtgttttccaacttggttccaatttccccctcactttcagatacaccaatcaaacgtaggtttggtcttttcacatagttccatatttcctggaggctttgttcatttcttttcat

SEQ ID NO: 28338 - DNA, 3021 bp, Homo sapiens
  SIMILAR (3020)..(2934): 721254mologous to Homo sapiens putative p150,accession number U93569,Smith-Waterman Score=110.
ctaaaaacccctttctactctcagagaaatgcccctgatttctggatccaaaaatgtcaacactgagttgcttttcatgctggatgtaagaaccagcagagcatggaaacgtctaccctctgactccctagagcccccccagttcattgataccttatctgtcatgaaaaggaccatctgccactggcaccaatacaggacatttgtgcttggcccaaagagctgcccatcaaattgagtattaaatccaggaccatctagctggaatacttcatcttcttccagttctctttgcctgttgtccccactatccactctaatcattggtcctttgtactggtttcctgacaaatgttgcctaattccaggacacgaacctgcagcatctccaagtttcctccacacaacattgcacatttctctgactatagctttttctgtctcactaaggtcatgttcatactctttaccctgttgacgatctatagtttcctgaacatccaagaccagattaacatcagctctgtgctcatttgaccttctccactccaggcacataactgtggctgcaaccattacataaaatgtgtatctatcctggggcagcatgcgattttcttcctccagctgtcttactcttgcctccagctgcctaacataggacaaggttgattctttataaaagagtcttgaaagatccctttccccttcatggcaggcactgcctatgggcttccaccagacaccaaatctatgggtgcctgcgtcttggactttccaaccttcaaaactgtgagcaataaatttctgttgtttataaattacccaacctaaggtattctgttgtatcagcccaaaaggactcccatcccaccccagtggaggggtactgacggagcaggagcaggcacagctgtgtgcaatgcacggcggggcaggtgtccgacactgaatgagaggctctgcaccgccagagagcagcctgttgtctcctgactttttaatgatcgccattctaactggtgtgagatggtatctcattgtggttttggtttgcatttctctgatggcccgtgatgatgagcattttttcatgtgtctgttggctgcataaacatcttcttttgagaattgtctgttcatatccatcacccactttttaatggggttgtttgattttttcttgtaaatctgtttgagttttttgtagattctggatactagccctttgtcagatgagtagattgcaaaaattttctcccattctgtaggttgcctgttcactctgatggtggtttcttttgctgtgaagaagctctttagtttaattagaacccatttgtcaatttgggcttttgctgccattgcttttggtgttttagacatgaagcccttgcccatgcctatggcctgaatggttttgcctaggttttcttctagagtttttatggctttaggtctaacatttaagtctttaatccatcttgaattgatttttgtataaggtgtaaggaagggatccagtttcagctttctacgtatggctagccagttttcccagcaacatttattaaatagggaatcctttccccatttcttgtttttgtcaggtttgtcaaagaccagatggttgtagatgtgtggtattatttctgagggctctattctgttccattggtctatatctctgttttggtaccagtaccacgctgttttggttactgtagccttgtagtatagtttgaagtcaggtagcttgatgcctccagctttgttcttttggcttaggattatcttggcaatgcgggctcttttttggttccatatgaactttaaagtagttttatccttctcctgcctgattgccctgaccagaacttccaacactatgttgaataggagtggtgagagagggcatccctgtcttgtgccagttttcaaagggaatgcttccagtttttgcccattcagtatgatattggctgtgggtttgtcataaatagctcttcttattttgagatacatcccatcaatacctaatttattgagaggttttagcatgaagggttgttgaattttgtcagaggccttttctgcatctgttgagataatcatgtggtttttgtctttggttctgtttatatgatggattacgtttattgatttgcatatgttgaaccagccttgcatcccagggatgcagcccacttgatcgtggtggataagctttttgatgtgctgctggattcggtttgccagtattttattgaggatttttgcattgatgttcatcagggatattggtctaaaattctctttttttattgtgtctctgccagcctttgatatcaggatgatgttggcctcataaaatgaattagggaggattccctctttttctattgattggaatagtttcagaaggaatggaaccagctcctcctcgtacctctggtagaattcagctgtgaatccatctggtcctggactttttttggttggtaggctattaattattgcctcaatttcagagcctgttattggtctcttcagggattcaacttcttcctggtttagtcttgggagggtgtatgtttccaggaattgatccatttcttctagatttcctagtttatttgtgtagaggtgtttatagtattctctgatggtagtttgtatttctgtgggatcggtggtgatatcccctttatcattttttattgcatctatttgattcttctctcttttcttctttattagtcttgctagtggtctatcaattttaatgatcttttcaaaaaaccagctccacctaggtattaagcccagcgtgtaatagctacttatcttgatgctctccttcccctgccaccccccaaaaggccccagtgtgtattgttctcctccttgtgtccatgtgttctcattgttcagctcccacttataagtgagaacattcggtgtttgattttctgttcctgcgttactttgctgaggataatggcttccaggtccatccat

SEQ ID NO: 28339 - DNA, 1644 bp, Homo sapiens
  SIMILAR (478)..(1320): 891254mologous to Homo sapiens putative p150,accession number U93572,Smith-Waterman Score=1300.
atgggtgaactgcatatgatcactgaggaaaagcaccagcccttcatggacactcagacagcagcaaagggaacactgcttgaggcgggccctggcctggacccagtttgtttgggacatattaagaaagtaatccagaggaaattttggaggtactcagcacctggcactgttcctaccacctctgctattcctggtgagactgagtggggcagactcccacagtggtctactgcatggagtgaaacagcacaacatgggtggccagctgccaggcagtcaagaattaccgtgctacatcagcaaccccagtgtgaccctggacctgaagtaacatctgagcaactaccaggtgtcataaatatgttgactcttaaatacattaaggtggctgcccacccccatggttcttggaacactcgtgtgccctgcttggttgctgtgttgttaacacctacccggctttcctactacatctctgaaatacaaactaccttcagagaatactataaacacctctatgaaaataaactagaaaatctagaagaaatggataaattcctggacacatacaccctcccaagactaaaccaggaagaagttgaatctctgaatagaccaatgacaagttctgaaattgaggcagtaattaatagcctgccaaccaaaaaaagcccaggaccagatggattcacagccgaattctaccagaggtacgaagaggagctggtaccattccttctgagactattccaaacaatagaaaaggagggaatcctccctaactcattttatgaggccagcatcatcctgataccaaaacctggcagagacacaacaaaaaatgaaaatttcaggccaatatccctgatgaacattgatgcgaaaaccctcaataaaataatggcaaaccgaatccagcagcacagcaaaaagcttatccaccacaatcaggttggctttatttctgggatgcaaggctggttcaatatatgcaaatcaataaacataatccatcacataaacagaaccaatgacaaaaaccacatgattatctcaatagatgcagaaaaggcctttgacaaaattcaacaccccttcatgctaaaagctctcaataaactaggtattgatggaacacatctcaaaataataagagctatttttgacaaacccacagccaatatcatactcaatgggcaaaagctggaagcattccttttgaaaaccgacacaagacaaggatgccctctctcaccactcctattcaacgtagtattggaagttctggccagggcaatcaggcaagaaaaagaaataccggcccctgcagatacctctagcctcattgctcaccatccatctccttcatatcagccctggaccccagtaacacgaaccagccacagcactcccaccatcacctgctacccctgcctggaatgcaccccagccaaatggttgacatctgtctccacaatggggggtggactgttatctgttcctcaggggactgtgagggtctctgctctgaactactgctttatcccccagctcggaggagggcccctcatggcatcaagtgccagcagtgactatgttccagagtctgatgaaagtgagcctcttttcacctttgaataa

SEQ ID NO: 28340 - DNA, 2310 bp, Homo sapiens; identical to SEQ ID NO: 6271
  SIMILAR (1138)..(2307): 911254mologous to Homo sapiens putative p150,accession number U93568,Smith-Waterman Score=1900.

SEQ ID NO: 28341 - DNA, 3793 bp, Homo sapiens
  SIMILAR (1309)..(2367): 861254mologous to Homo sapiens putative p150,accession number U93567,Smith-Waterman Score=1676.
atggggagaaaccagatcagaagagctgaaaattctaaaaatcagagcgcttcttctcctccaaaggaatgcagctcctcgccagcaatggaacaaaggtggacggagaatgactttgacaagttgagagaagaaggcttcagaagatcggtaataacaaactcctctgagctaaaggaggatgttcgaacccaatgcaaagaagctaaaaaccttgaaaaaagattagacaaatggctaactagcataaagagcatagagaagaccttaaatgacctgatggagctgaaaaccatggcacgagaactacgtgatgcgtgcacaagcttcagtggccgattcgatcaactggaagaaagagtatcagtgactgaagatcaaatgaatgaaaggaaaactagagaagcaagagcaaacacattcaaaagcagcagaaggcaagaaataactaagatcagagcagaactgaaggagatagagacacaaaaaacccttcaaaaaatcaatgaatccaggagctggttttttgaaaagataaacaaaactgacagatcgctagcaagactaataaagaagaaaagagaggagaatcaaatagatgcaataaaaaatgataaaggggatatcaccacagatctcacagaaatacaaactactatcagagaatactataaacatctctacccaaataaactagaaaatctagaagaaatggataaattcctgggcacctacaccctcccaagactaaaccagaaagaagttgaatccctgaatagatcaataacaagttctgaaattgaggcagtaattaatagcctaccaaccaaaaaaagtccaggaccagatggattcacagccaaattctaccagaggtacaaagaggagctggtaccattccttctgaaactattccaaaccatacaaaaagagagactcctccctaattcattttatgaggccagcatcatcctgataccaaaacctggcagagacacagcaataaaagaaaattccaggccaatatccctgatgagcatcgatgtgaaaatcctcaataaaatactggcaaaccaaatccagcagcacatcaaaaagctcatccaccatgatcaagtggacttcatccctgggatgcaaggttggttcaacatacgcaaatcaataaatgtaatccatcatacaaacagaaccaaagacaaaaatcacatgattatctcaaaagatgcagaaaaggcctttgacaaaattcaacagtccttcatgctaaaaactctcaataaattaggtattgacgggacaattggaaaaaactactttaaagttcatatggaaccaaaaaaagcccgcattgccaagacaatcctaagcaaaaagaacaaagctggaggcatcacgctacctgacttcaaactatactgcaaggctacagtaaccaaaacagcatggtactggtaccaaaacagagatatagaccaatggaacagaatagaggcctcagaaataataccacacatctacaaccatccaatctttgacaaatctgacaaaaacaagaaatggggaaaggattccctatttaataaatggtgttgggaaaactggctagccatatgtagaaagctgaaactggatcccttccttacaccttacacaaaaattaattcaagatggattaaagacttaaatgtcagacctaaaactataaaaaccctagaagaaaacctaggcaataccattcaggacataggcatgggcaaggacttcatggctaaaacacaaaaagcaatggcaacaaaagccaaaattgagcaatggaatctaattaaactaaagagcttctgcacagcaaaagaaactgccatcagagtgaacaggcaacctatagaatgggagaaaatttttgcaatctatccatctgacaaagggctaatatccagaatctacaaagaacttaaacaaatttacaagaaaaaaacaaacaaccccatcaaaaagtgggcaaaggatatgaacagacacttctcaaaagaagacatttatgcagccaatagacacatgaaaaaatgctcatcatcactggtcatcagagaaatgcaaatcaaaaccacaatgagataccatctcacaccagttagaatggcgatcattaaaaagtcagcaaacaacaggtgctggagaggatgtggagaaataggaacacttttacactgttggtgggtctgtaaagtagttcaaccattgtggaagacagtgtggcaattcctcaaggatctagagctagaaataccatttgacccagcaatcccattactggttatataccgaaaggatgataaatcatgctgctatgaagacacatgcacatcacccagtcccatcgatcacccaagcgctgaggagtgcgagcgcatggcgtgggactggcaggcagctccacctgcagcccaggtgcaggatccactgggtgaagccagctgggctcttgagtctggaatccaagacctggtttttgaaaagatcaacaaaatgcatagactgctagcaagactaataaagaagaaaagagagaagattcaaatagatgcaataaaaaatgataaaggggatatcactaccgatcccacagaaatacaaactaccatcagagaatactataaacacctctatgcaaataaactagaaaagctagaacaaatagataaattcctggacacatacaccttcccaagactaaaccaggaagaagttgaatctctgaagagaccaataacaggctctgaaattgaggcaataatcaatagcctaccaaccaaaaaaagtccaggaccagatggattcacagccaaattctaccagaggtacaaagaggagctggtaccattccttctgaaactattccaatcaatagaaaaagagggaatcctgcctaactcattttatgaggacagcatcattctgatatcaaaggctggcagagacacaaccaaaaaagagaattttagaccaatatccttgatgaacatcgatgcaaaaatcctcaataaaatactggattcggcaaaccgaatccagcagcacatcaaaaagcttatccaacatgatcaagtgggcttcatccctgggttgcaaggctggttcaacatacgcaaatcaataaatgtaatccagcatataaacagaaccaaagacaaaaaccacatgattatctcaatagatgcagaaaaggcctttgacaaaactcaacaacccttcatgctaaaaactctcaataaattcggtgttgatgggacatatctcaaaataataagagctatctatgacaaacccacagccaatatcatattgaatgggccaaaactggaagcattccctttgaaaacgggcacaagacagggatgccctctctcaccactcctattcaacacagtgttggaagttctggccagggcaatcaggcaggagaaggaaataaaggcccaaaatctcctcaagctgataagcaacttcagcaaagtctcaggatacaaaatcaatgtacaaaaatcacaagcattcttatacaccaataacagacaaacaaagagccaaatcatgagtgaactcccattcacaattgcttcaaagagaataaaatacctaggaatccaacttacaagggatgtgaaggacctcttcaaggagaactacaaaccactgctcaatgaaataaaagaggatacaaatgaatggaagaacattccatgctcatgggtaggaagaatcaatatcatgaaaatggccatactgccca

SEQ ID NO: 28342 - DNA, 710 bp, Homo sapiens
  SIMILAR (193)..(552): 851254mologous to Homo sapiens lysophosphatidic acid acyltransferase-delta,accession number AF156776,Smith-Waterman Score=534.
ctgacttacagctcttataaactaggggcaatttctgaacccagccggctccatctcagcttctggtttctaagtccatgtgccaaaggctgccaggaaggagacgccttcctgagtcctggatctttcttccttctggaaatctttgactgtgggtagttatttatttctgaataagagcgtccacgcatcatggacctcgcgggactgctgaagtctcagttcctgtgccacctggtcttctgctacgtctttattgcctcagggctaatcatcaacaccattcagctcttcactctcctcctctggcccattaacaagcagctcttccggaagatcaactgcagactgtcctattgcatctcaagccagctggtgatgctgctggagtggtggtcgggcacggaatgcaccatcttcacggacccgcgcgcctacctcaagtatggggaaggaaaatgccatcgtggttctcaaccacaagtttggaaatttgactttctgtgtggctggagcctgtccgaacgctttgggctgttaggggtaagtcaaaagtgcattcccccctgcctcacacatttttttggttcagcccccccacttgtctttttgctcctggtcattcagaacttgcagaagaatcaacagagtttttacttgatgaaatggtcctaataaactgcttttttattcttgctaggaaaaaaaaa

SEQ ID NO: 28343 - DNA, 2811 bp, Homo sapiens
  SIMILAR (2811)..(1648): 861254mologous to Homo sapiens putative p150,accession number U93574,Smith-Waterman Score=1717.
tcacccactttttgatggggttgtttttttcttgtaaatttgtttgagttcattgtagattctggatattagccctttgtcagatgagtaggttgcgaaaattttctcccattttgtaggttgcctgttcactctgatggtagtttcttttgctgtgcagaagctctttagttgaattagatcccatttgtcaattttgtctgttgttgccattgcttttggtgttttagacatgaagtccttgcccatgcctatgtcctgaatggtaatgcctaggttttcttccagagtttttatggttttaggtcgaaagtttaagtctttaatccatcttgaattaatttttgtataaggtgtaaggaagggatccagtttcagctttctacatatggctagccagttttcccagcaccatttattaaatagggaatccgttccccattgcttgtttttctcaggtttgtcaaagatcagatagttgtagatatgcggcgttatttctgagggctctgttctgttccattgatctatatctctgttttggtaccagtaccatgctgttttggttactgtagccttgtagtatagtttgaagtcaggtagcgtgatgcctccagctttgttcttttggcttaggattgacttggcgatgcgggctcttttttggttccatatgaactttaaagtatttttttccaattctgtgaagaaagtcattggtagcttgctggggatggcattgaatctataaattaccttgggcagtatggccattttcacgatattgattcttcctacccatgagcatggaatgttcttccatttgtttgtatcctcttttatttccttgagcagtggtttgtagttctccttgaagaggtccttcacgtcccttgtaagttggattcctaggtattttattctctttgaagcaatcgtgaatgggagttcactcatgatttggttctctgtttgtctgttattggtgtgtaagaatgcttgtggtttttgtacattgattttgtatcctgagactttgctgaagttgcttatcagcttaaggagaatttgggctgagacaatggggttttctagatatacaatcatgtcatctgcaaacagggacaatttgacttcctcttttccgaattgaataccctttatttccttctcctgcctgattgccctggccagaacttccaaggctatgttgaataggagtggtgagagagggcatccctgtcttgtgccagttttcaaagggaatgcttccagtttttgcccattcagtatgatattggctgtgggtttgtcatagatagctcttattattttgagatatgtcccatcaatacctaatttattgagagtttttagcatgaagggttgttgaattttgtcaaaggccttttctgctaaagcttggggtggagtgacataagcacccctgttgccaccaccactatgactgcattgactcagacctgatgccagcacagcactgggtctcactcgaggcctgctggaaccactccctggcttctgcctgtgtttcctcaaggccctggggctcccctccagaagcaggacaattgtaggaattttcactgcaagcttcacaatatgcagcacagtatctgagcgcagcagaactgtcactctggagtggatcttgggcagtatggccattttcacgatattgattcttcctacccatgagcatggaatgttcttccatttgtttgtatcctcttttatttcattgagcattggtttgtagttctccttgaagaagtccttcacgtccattgtaagttggattcctagatattttattctctttgaagcaattgtgaatgggagttcactcatgatttggctctctgtttgtctgttattggtgtataagaatgcttgtgatttttgcgcattgattttgtatcctgagactttgctgaagttgcctatcagcttaaggagattttgggctgagacgatggggttttctagatatacaatcatgtcatctgcaaacagggagaatttgacttcctcttttcctaattgaatatcctttatttccttctcctgcctgattgccctggacagaacttccaacgctatgttgaataggagtggtgagagagggcatccctgtcttgtgccagttttcaaagggaatgcttccagtttttgcccattcagtatgatattggctgtgggtttgtcatagatagctcttattattttgagatatgtcccatcaatacctaatttattgagagtttttagcatgaagcgctgttgaattttgtcaaaggcctttactgcatctattgagataatcatgtggtttttgtctttggttctgtttatatgctgggttacctttattgatttgcgtatgttgaaccagccttgcatcccagggatgaagcccacttgatcatggtggataagctttttgatgtactgctggatttggtttgccagtattttattgaggatttttgcatcgatgttcatcagggatattggtctaaaattctctttttttgttatgtctctgccgggctttggtatcaggatgatgctcctcataaaatgagttagggaggattccctctttttcagctcctcctcgtacctctggtagaattcggctgtgaatccatctggtcctggactttttttggttgttacactattaattattgcctcaatttcagagcctgttattggtctattcagagattcaacttcttcctggtttagtcttgggagggtgtatgtgtcgaagaatttatccat

SEQ ID NO: 28344 - DNA, 2674 bp, Homo sapiens
  SIMILAR (1714)..(2166): 841254mologous to Homo sapiens lysophosphatidic acid acyltransferase-delta,accession number AF156776,Smith-Waterman Score=659.
atggatgaattcctggacacatacaccttcccaagactacaccaggaagaagttgaatccctgaatagaccaataacaagttctgaaattgaggcaataattaatagcctaccaaccaaaaaaagtccaggaccagatggattcacagccgaattctaccagagaaccaaagacaaaaaccacacgatcatctcaagagatgcagaaaaggcctttgacaaaattcaacagcgcttcatgctaaaaactctcaataaactagcatctctaacggcatttacctgtccctactttacagagaagggggacattgagaaacatgccagaagtctcacaactaagctggtgatgctgctggagtggtggtcgggcacggaatgcaccatcttcacggacccgcgcgcctacctcaagtatgggaaggaaaatgccatcgtggttctcaaccacaagtttgaaattgactttctgtgtggctggagcctgtccgaacgctttgggctgttagggggaacagctttgccatctactggagagctgtggcccatgacggtgggtgagatggctggtgctcatctctgccaccctggaaggggcctcaaggacatgctggcagcgggtgtggagggcaccgagcacatctcctggtctgggttttactcccagcttggaccagctgtacccggagatcccactgggctccgcagcctgctctgtgagcggagactcctgtttgcctcaactgcagagctcagcagaggctccaaggtcctggccaagaaagagctggcctatgtcccaattatcggctggatgtggtacttcaccgagatggtcttctgttcgcgcaagtgggagcaggatcgcaagacggttgccaccagtttgcagcacctccgggactaccccgagaagtattttgcaccagagcagctgtgtcccaagggctcctgcaggactgtgaccgtgggacccccatgtgacttccacaggacacgtgactgtgtggtcctgtgcgactccagggctgtgtgtgaccatagggctgtgtataacctcagggatgtatgtgaccatggggccgtgtgtgaccgtggggccacgtatgactgtggggccgtgtatgaccatggggccgtgtgtgaccccagggctgtgtgtgaccccagggctgtgtgtgaccatggggccttcctgattcactgtgagggcacacggttcacggagaagaagcatgagatcagcatgcaggtggcccgggccaaggggctgcctcgcctcaagcatcacctgttgccacgaaccaagggcttcgccatcaccgtgaggagcttgagaaatgtagctgacctcggagtctggaaccctaaatggccatcgtgttccttgatgacctctattggcacaatgccatgtactccacacagtgtcaccttcaatccccacaacatcctggcaggcagctcttactcccggagaggagagagaaaagcaggctctggagtctcagcagctcacttgggcctgcagaaccgagggcccaccgggccagccacctccgaggacagcatcgtcatcatcactgacttcttgtctgatggtgcaggcaacagtctgccctgtgactcagttctgtggcatatgaaggcaggagaatcacccacctgcccgaaggagacctttagaccttctcctaggagtaaaagtagatcaaacagcaaagaagtagaggatccagagaagtgcagtgtgcgtaggaacagaaaaggtgaaagaatatttccggaggagcttatggggaggatcccactggaagacatccctgaagacgatgacgagtgctcggcctggctgcacaagctctaccaggagaaggatgcctttcaggaggagtactacaggacgggcaccttcccagagacgcccatggtgcccccccggcggccctggaccctcgtgaactggctgttttgggcctcgctggtgctctaccctttcttccagttcctggtcagcatgatcaggagcgggtcttccctgacgctggccagcttcatcctcgtcttctttgtggcctccgtgggagttcgatggatgattggtgtgacggaaattgacaagggctctgcctacggcaactctgacagcaagcagaaactgaatgactgactcagggaggtgtcaccatccgaagggaaccttggggaactggtggcctctgcatatcctcccttagtgggaacacggtgacaaaggcctgggtgaaacccctgctgggcacggcggaagtcacgacctctccagccagggagtctggtctcaaggccggatggggaggaagatgttttgtaatctttttttccccatgtgctttagtgggctttggttttttttttgtgccgagtgtgtgtgagaatggctgtgtggtgagtgtgaactttgttctgtgatcatagaaagggtattttaggctgcaggggagggcagggctggggaccgaaggggacaagttcccctttcatcctttggtgctgagtttttttgtaacccttggttgaccagagataaagtgaaaagtgctttaggtgagatgactaaattatgcctccaagaaaaaaaaattaaagtgcttttctgggtcgaaaaaaaaaaaaaaaaaaaaaagtcgtatcga

SEQ ID NO: 28345 - DNA, 2652 bp, Homo sapiens
  SIMILAR (1519)..(2649): 871254mologous to Homo sapiens putative p150,accession number U93563,Smith-Waterman Score=1711.
acccagattcataaagcaagtccttagagacctacaaagagacttagactcccacacaataataatgggagactttaacaccccacggtcaacattagacagatcaacgagacaggaagttaacaagcatatccaggaactgaactcagctctgcaccaagcggacctaatagacatctacagaactcaccaccccaaatcaacagaatatacatttttttcagcaccacaccacacctattccaaaattgaccacatacttggaagtaaagcactcctcagcaaatgtaaaagaacagaaattataacaaactgtttctcagaccacagtgcaatcaaactagaactcaggattaagaaactcactcaaaaccgctcaactacatggaaactgaacaacctgctcctgaatgactactggggacataacgaaatgaaggcagaaataaagatgttctttgaaaccaacgagaacaaagacacaacataccagaatctctgggacgcattcaaagcagtgtgtagagggaaatttatagcactaaatgcccacaagagaaagcaggaaagatctaaaattgacaccctaacatcacaattaaaagaactagagaagcaagagcaaacacattcaaaagctagcagaaggcaagagataactaagatcagagcagaattgaaggagatagagacacaaaaaacccttcaaaaaatcaatgaatccaggagctggttttttgaaaagatcaaccaaatttgatagacccgctagcaagactaataaagaagaaaagagagaagaatcaaatagacgcaataaaaaacgataaattgggatatcaccactgatcccacagaaatacaaactaccatcagagaatacctataaacaccctctacgcaaataaattagaatatcctagaagaaatgggataaattccctggacacatacactcttccaagactaaccccaggaagaagttgaatccctgaatagaccaataacaggctctgaaattgaggcaataattaatagcctaccaaccaaaaaaaaaagtccaggaccagatggattcgacgagccgaattctaccagaggtacaaggaggagctggtatcattccttctgaaactattccaatcaatagaaaaagagggaatcctccctaactcattttaatgaggccagcatcatcctgataccaaaacctggcagagacacaacaaaaaaaagagaatttcagacccatatccctgatgaacatcgatgcaaaaatcctcaataaaatactggcaaaccgaatccagcagcacatcaaaaagcttatccaccatgatcaagttggcttcctccctgggatgcaaggctggttcaatatatgcaaatcaataaacataatccatcacattaacagaaccaaagacaaaaaccacatgattatctcaatagatgcagaaaaggccttcaataaaaattcaacaccccttcatgctaaaaactctcaataaactagggttggaagttctggccagggcaataaggcaggagaaagaaataaagggtattcgattaggaaatgaggaagtcaaattgtccctgtttgcagatgtcatgatagcatatttagaaaaccccatcgtctcagcccaaaatctccttaagttgattagcaacttcagcaaagtctcaggatacaaaatcaatgtgcaaaaatcacaagcattcctgtacaccaatagcagacaaacagagagccaaatcatgagtgaactcccattcacaattgctaaaaagagaataaaagagctaggaatccaacttacaagggatgtgaaggatctcttcaaggagaactacaaaccactgctcaatgaaataaaagagtacccaaacaaatggaagaacattccatgctcattgataggaagaatcaataacatgaaaatggccatactgcctaaggtaatttgtagattcaatgccatccccatcaagctaccaatgactttctccacagaattggaaaaaactactttaaagttcatatggaaccaagaaagagccctcattgccaagacaatcctaagccaaaagaacaaagctggaggcatcgcactacctggcttcaaactatattacaaggctgcagtaagcaaaacagcatggtactggtaccaaaacagagatatagaccaatggaacagaacagagccctcagaaataataccacacatctacagccatctgatctttgacaaacctgacaaaaacaagaaatggggaaaggattccctatttaataaacggtgctgggaaaactggctagccatatgtagaaagctgaaattggatcccttccttacaccttatacaaaaactaattcaagatggattaaagacttaaatgttagacctataaccataaaaaccctagaagaaaacctaggccataccattcaggtcctaggcatgggcaagggcttgatgagtaaaacaccaaaagcaatggcaacaaaagctgaaatagacaaatgggatctaattaaactaaagagcttctgcacagcaaaagaaactaccatcagagtgaacaggcaacctacagaatgggagaaaatttcacaatctacccatctgacaaagggctaa

SEQ ID NO: 28346 - DNA, 704 bp, Homo sapiens
  SIMILAR (360)..(701): 1001254mologous to Homo sapiens apoptosis related protein APR -2,accession number AF143236,Smith-Waterman Score=630.
tttgaacataaacaacattttaatttgacttaagactatacatataatcagtgttgaaagaaataaattcctggaaacaatttgtaatctttcttgctaatccttagctgctcatcatggctgagtctaatctcgaaggcatctagacttgattaagatacctttactaatgcacccgaaatctgttattagcttgacatcagacacaggacttgaggacagcttagcagctcttgacagcagctggcaggaattatgtaatgtgagagtcttctggctttcagagaccactttcctcctccagggcagaaaactcagctgtttggccttggtttttgcgtctgcaaccaccgcttgccatggtttccttgtgggtggagggtactttcccgccccctggtttcgggcttgcccacgtggcttgctctggccatggaatgaagcagaaacgaaagcctgccagttctgagcctatgccggaagacgccttgggcggttccgcggtccctgtgcgcttccaccttcacccagaaggacttctctggtgcagccgctgcttcttcagccacggcccaaaaggatcggagccccctggccgatccgcaggtctgcagggagccacagagcgcagcggccggcccagcgttcaagcccaagcacaggcctgcgagaaccttgttccagccaccgtttgggatggttga

SEQ ID NO: 28347 - DNA, 647 bp, Homo sapiens
  SIMILAR (392)..(24): 681254mologous to Mus musculus ubiquitin-specific processing protease,accession number AF170563,Smith-Waterman Score=465.
ctggaatttcctcagattatttacatgtacctgtctatataaataatctgaggaaattccagcttattgtgaattttctctggctgcccaagggactgattaaactcaaatcttgagagttcaaaggtcaacactggaggtagctttgtaaaccaacgctcttgtccatacttcaccgagtgatcggagggaagaagctcaacatcaccctccaccatggccccttccaaacactcgtctaagttgcgataaccgtttacctgaagaggatactggccgaaggtctcattgttacaaaagggttttccttcacgaaccccttcagtcaggaaagtaccatagaacagctgcaccattggattttcagatttgttcctgggactgctgcttttaggaaaaggagacaattctggattgtttggattaagatatgtgctacataaaatccaagcatcattcaaaagcaaaaatagtgcattttcatcaacccccaaagagccaggtatgatctgctgttcctcagatgatcggaatgctccctttaatagatccagggctgcagacgggtctacaaattttctatttgatcccatcattagagcaaacaaatactgaagctcttgcataaacatgatatttctcttttc

SEQ ID NO: 28348 - DNA, 317 bp, Homo sapiens
  SIMILAR (35)..(214): 481254mologous to Homo sapiens Human neuregulin related ligand NRG3 extracellular domain,accession number W97621,Smith- Waterman Score=93.
atatgaagcggagccgctgccgcgaccgaccgcagccgccgccgcccgaccgccgggaggatggagttcagcgggcagcggagctgtctcagtctttgccgccgcgccggcgagcgccgcccgggaggcagcggctggaggagcggacgggccccgcggggcccgagggcaaggagcagccgcctgccttggcctcccaaagtgccgagattgcagcctctgcccggctgccaccccgtctgggaaggcttctgggattccagaaagcctgcaggtgttggagcctcaaccctcatatcctcatggccctgctgagg

SEQ ID NO: 28349 - DNA, 2580 bp, Homo sapiens
  SIMILAR (826)..(1053): 561254mologous to Mus musculus ubiquitin-specific processing protease,accession number AF170563,Smith-Waterman Score=221.
atgcgcgcgtgcggggggcgggacgcgtgtggggccgccgccgcggcgccgctgcgggtgccgccggcgggtgtgggccggggcgcccgcggcggtgccgcgcgagcccagaatggtgggtccaccgacagcttgcactgtgtgcccggaaaagctgcagacactcaatgccagcccatgaaagcagccaagagggagactgtaccctgcaaagccacaggggcagagctgcccaagaccatgggaacccaccttttgcatcagtgtgacctggataattcccacgtgtttgtgggtgatggtgaacacttcttcatgtcattggagttggaaatggctacaaagcctgatgggaaatcctttattccacggtcattcggcagtttcccacggcgggggaacagttttaactcgcccgtggggagggtggagccggaggtcagtcctacaaatgaggttttgagggcagagagcggagaagactcaggaacgcggctcccaggattcgcaaacccagttcccggacactggcagcgcggcccgcagcctccaccggctgtgaagctgaccaacagcgacaggcggggccgggatcacgtgaccgacgtctgtcctgagaggctgggccggcggcggctgcggcgggagaccggtgacccgcggctgggcgcctcggccatgactgcggagctgcagcaggacgacgcggccggcgcggcagacggccacggctcgagaaaacgggaaatctgtgccagttgttcaaatacgagtttggagatgagaaactatatttgtcgtacaaagctggcagacagataccctcagtctctctttcaattgcctgaatttcgaagacttgttctcagttatagtctgccacaaaatgtacttgaaaattgtcgaagtcatacagaaaagagaaatatcatgtttatgcaagagcttcagtatttgtttgctctaatgatgggatcaaatagaaaatttgtagacccgtctgcagccctggatctattaaagggagcattccgatcatctgaggaacagcagggaactgagtttcaaagagggttgaattctctggttaaactcaccccggcggccgctgcctcccgggcggcgctcgccggcgcggcggcaaagactgagacagctccgctgcccgctgaaatccatcctcccggcggtcgggcggcggcggctgcggtcggtcgcggcagcggctccgcttcatatctgcagctggggcccgcgggcgtcagcgccgcgactgtcccagctccgcactgccccgggccgcagcgcagccgcgccaaccaccagccgcggccaccatggccggacgggctccctaagccaccgaccccagcccgcggcgccttcgacccttctagcatgtttgatgagattagagagatctccctacctctaagtgccatctgggcccccgatatcatcatcaatgagttcctatgttttgaaatgaccaacatcctctctgtgacaaccaagttctcttgtgtttcatatagtgtggacattgaaagatcccctgaccttccctatgtttatgtgaactcatctgggaccattgagaactataagcccatccaggtggtctctgcgtgcagtttagagacatatgcttttccatttgatgtccagaattgcagcctgaccttcaagagcattctgcatacaggaaaacccttttgtaacaatgagaccttcggccagtatcctcttcaggtaaacggttatcgcaacttagacgagtgtttggaaggggccatggtggagggtgatgttgagcttcttccctccgatcactcggtgaagtatggacaagagaggggaaatggaatggccaaaactaaaggaaaacccctcttaccgccttttacgtggctccggcgacacgtccgggccgcgacggccgtgcgcgcgactcccgcgagccgcggcgcccagacgccgccgcgctcgccgcgcgacgccgcctcgcgcgccaccacgacgcgcaccgcgcgcgctctggcagccgaacgcgggcggcggccagccaccgccgacactcaccggcgcttcgatgccgcgcccgtgccagccgcgcccacggcgcgcgcggcgccgcaccgccgagcgcgcgccgaggccgcgcctgcgcccgacgtccgtgcccgctgcgtggcagccgtgcctgccgccgcgagcatcggcgccgctctcgtaccccgcccggccgcccaactctgcgacagggcgctaacactgcgccccctgcgcgggactgacgatcgcctggcaccgcgtctccatggagtcctgcccactaccggtccgccgttgggcagcgaccagtacgaggcgtctccgttccgaacccctctgtctgtctcacccatccttactgacatgggtcgcgacccatctcatccccgatgcgcctacgccagggcgcgagtcctgtcggcgtcatcactccggcataacccagactcgctgcctctccgtcgccaactctttcttccctgtgttcctcccatctttctggaacactcaatgaacacttactag

SEQ ID NO: 28350 - DNA, 672 bp, Homo sapiens
  SIMILAR (1)..(669): 881254mologous to Rattus norvegicus Chp,accession number AF097887,Smith-Waterman Score=1056.
atgccgccgcgggttctgagcgaggccgagccgcccccgctccgtgccccgacccctcccccgcggcgtcgtagcgcgcccccagagctgggcatcaagtccgttatggtgggcgacggcgccgtgggcaagagcagcctcatcgtcagctacacctgcactgggtaccccgcgcgctaccggcccctgccgctggacaccttctctggtccgtccgttcattcgcccgaggattttgaccgacttcgttccctttgctacccggataccgatgtcttcctggcgtgcttcagcgtggtgcagcccagctcctttcaaaacatcacagagaaatggctgcccgagatccgcacgcacaacccccaggcgcctgtgctgctggtgggcacccaggccgacctgagggacgatgtcaacgtactaattcagctggaccaggggggccgggagggccccgtgccccaaccccaggctcagggtctggccgagaagatccgagcctgctgctaccttgagtgctcagccttgacgcagaagaacttgaaggaagtatttgactcggctattctcagtgccattgagcacaaagcccggctggagaagaaactgaatgccaaaggtgtgcgcaccctctcccgctgccgctggaagaagttcttctgcttcgtttga

SEQ ID NO: 28351 - DNA, 1092 bp, Homo sapiens
  SIMILAR (40)..(210): 821254mologous to Rattus norvegicus Chp,accession number AF097887,Smith-Waterman Score=238.
atggaccaccattacccaccaacagggatattcattcatcctcgtccatgtcctacaagggagcggcggggtagcgcgccccaagagctgggcatccagtgcgtgctggtgggcgacggcgccgtgggcaagagcagcctcatcgtcagctacacctgcaatgggtaccccgcgcgctaccggcccactgcgctggacaccttctctgttgcgaatagatcccgttcatatagatgtcagacggatcagattcgtaacggatcgaatgcgttcgaatcgttcaagtccaatccaatccatccggtcagatccgatccataccgttcatgtccattgcgcccgaactcgtatcgaatacagccgattcggatcagatcgcagctcggtcgcattcccatctccgtcacgaatcagatcgcgattccgattcacgattccatcgagattgcggtccggatccggactcgaatccatacgcatccggaccgcatcgcgcatccgatcgcaatgcacttcgcagttagagtccgattgcggattcgggtgcatatcgatccgcgtgcgatcctgatcgcatccagttccagttcggttcgatcggatcgatatgcatacgtgacgatacgaagccgatcgagacgcatacatccagatgcagacgcatcgtacgccatcgcgttcggtccaatggatagcggtgcagtccggtccgaatgcatccattcgcatgatatcgatcgatcagatcagtcgatacgatcaagcagtcaatcgatcgatcgaatcaatcgtatgttcgatcgatcaatcggacagaccgtccgagcaatcagtcagtccgatcgtacgatcgaagatccgatccatccgatcgatcagtcggtcgaatcgatcgtcagatcgtcctatcgatcaataaatggttccagccatgcaattcatcgattgattcattcgttcattgatacctgcatccgagagaacgatcaatcgtacggcgtacaatcgatcattggtccaataagagatcagccagaatttactgttaataaaactacaagagtcatcgtgttttatctatcgtcgttctaa

SEQ ID NO: 28352 - DNA, 513 bp, Homo sapiens
  SIMILAR (351)..(205): 361254mologous to Rattus norvegicus ceruloplasmin,accession number M14102,Smith-Waterman Score=67.
ccttgccccaaggcccagctctgcccttcattcctttagcacctccccgtaccttccttccatgggtcttaagctgtggcaagtccttaagctgggacggccagcgccagccctgcccccaacaggtcactcagcggctcggagcccacgtcctcctcggtgacacaggaaaatggtgcagatgtgcaagggcatgagagggtcccatggaaggcacgttccagaaggttctgtcccatggaaggcacgttccggaaggttccatcccatggaagccacgttccagaagtttccatgctgtggaaggcatgttccggaagtttccgtcccgtggaaggtcactctgtgcggtgtgcactgaccccagccagtggatgttccccgtccaagagcaaagctacagtcggctgcaggtgcagtgacttttgcacagtggaagaatttctccagaagatattcctgcaggtggaatcactggatcgtaggcccagatgtcttccacttacttgatta

SEQ ID NO: 28353 - DNA, 1213 bp, Homo sapiens
  SIMILAR (85)..(771): 971254mologous to Escherichia coli Altronate dehydratase,accession number D13328,Smith-Waterman Score=1173.
atgctagccgccggggcggcccgtcgccccacactggagcgcccgagcgggcaccgcggcgcgaaatatcgactcggtccgtgcattggtctgggctgtgaaaacaaccaggttgccgcattccgtgaaacgctgggcgatatcgatcctgaacgcgttcatttcatgatctgccaacagcaggatgatgagatcgaagccggaatcgagcatttgcatcagctgtataacgtgatgcgcaacgataaacgcgagccaggcaaactcagcgaactgaagtttggtctggagtgcggtggttctgacggtctttctggtattactgctaacccgatgctggggcgtttctctgactacgtgattactaacggcggtactaccgtactgaccgaagtgccggagatgtttggcgcagagcagttgctgatggaccattgccgcgacgaagcaacgtttgaaaaactggtcaccatggtcaacgacttcaaacagtactttattgcccatgatcagccgatctatgaaaacccatcgccggggaacaaagcgggcggtatcaccacgctggaagacaaatcacttggctgtacccagaaagcgggttccagcgtcgtggttgacgtgctgcgttacggcgagcgtctgaaaacgccagggctgaacttgttaagtgcgccgggtaacgatgccgtagcgaccagcgccctggcgggtgcgggctgccatatggtgctgttcagtactggtcgtggcagtggtaccatcggatttaccgaacacagtgatgcgcacactccgtgtcctctcgtactaggagcagcccccctcagttctccagcgcccacggcagatagggaccgaactgtctcacgacgttctaaacccagctcgcgtaccactttaaatggcgaacagccatacccttgggacctacttcagccccaggatgtgatgagccgacatcgaggtgccaaacaccgccgtcgatatgaactcttgggcggaacccttggtcttccggcgagcgggcttttcacccgctttatcgttacttatgtcagcattcgcacttctgatacctccagcatacctcacagcacaccttcacaggcttacagaacgctcccctacccaacaacgcataagcgtcgctgccgcagcttcggtgcatggtttagccccgttacatcttccgcgcaggccgactcgacca

SEQ ID NO: 28354 - DNA, 607 bp, Homo sapiens
  SIMILAR (300)..(235): 361254mologous to Mus musculus trefoil factor,accession number U46858,Smith-Waterman Score=55.
aattccccttttctgcatccgccagaaacgaatgatattcaggccattcataagcagaaaactaccctcaatcatcgtgccgcctatcgaccccgcccagaagttgtgaatcacccagcaacacgttgaaaaccacattacgcagcgcatggtcagccctttacagcagaatagcgcccaggtactgacaatcgtgccgataaccggcaatagttcgacaggatgatggaacttcgcgaggccaattccgccagtcagcacaataaaaatcgccattacccataagctgcgcgtgcgtaaggtaatcaatgtacgaatggcattaaggatggcactggcaccagcgggataggtgcccagaagaaaaaaatgtacgccaataacggcgctatagaccgaaagctgctttttgaagcgacgttcgtcacgattgaaaaatgttgtgataccaatcagaaaggcgatgacacccacgccctgggccagccaatacgcggtcatgataaatccttagcaggtatggaaaagcaaacggcgcttcacattatgaaacgccgttttttattaacaactcatttcgactttatagcgttacgccgcttttgaa

SEQ ID NO: 28355 - DNA, 1473 bp, Homo sapiens; identical to SEQ ID NO: 4167
  SIMILAR (568)..(1452): 951254mologous to Escherichia coli RhsB core protein with unique extension,accession number U00039,Smith-Waterman Score=1490.
  misc_feature (1)...(1473): n = a,t,c or g

SEQ ID NO: 28356 - DNA, 2943 bp, Homo sapiens
  SIMILAR (2283)..(1570): 911254mologous to Escherichia coli multidrug resistance-like ATP-binding protein Mdl,accession number U82664,Smith-Waterman Score=1140.
ctattttggtgatctcacaaaccacacttcttctggatcatcaatgtactgtgccagtgaggaaagaccgaactgcacgcttttcgccgtaacatcgatatcttcttcgcggttataacgaatcgcccgacgtaacagcgcctgcgtttcatcgtcgtctgccggaacatcatgatggcggtacagccattcgcttaccgcttcacgcgttggcgcgcaaagcattgaaggcagcagcgtgctgtcgttttccatttttagcaaatgcggtttaccgtcacgcatgaccgccactgaacagtttgctgtaccgtaatcaaaaccaataaacacgaaataatccccatgccggtgaagaaggggcgtgactttagcgaaatgttgccgtcgcgacaaccggaatatgaaagcaaagcgcagcgtctgaataacgtttatgctgaaagcggatgaataaggagatgcgatgtataccctgaactggcagccgccgtatgactggtcgtggatgttgggatttccattcattccgcgccagcgcacgttactggcctgcaacaaaatatcagccgtaaagccttgcagtccctgataggccggttcatcaatacgcgaagaaatgaccgggcgcggcaacgttgattggctctgcccctgctgcgcggcaccgttttcaccattcgcggtttcattaagcgggatgaggttgtcaagattcacttgcgggaattgcagcctcagctgccattccggtttctctgtcagcgtaacctgtgcttgcccgcttagcgtactatcattggcggtcaaactaatttggttaaatgaaaggcgtttatgtgactcctgccactgggcctggaaactcccctgcccctgaataccttgttttggtaaatcggcaccctgcaactgccagttaatttgatcaatagccgccgttaaatcatgcggataatcagaagcatctaccgtaccgataagggatatcgtgagatcgcgctgatcgcgattaacccgcccggagaactcaaatgaaccacgatgttggggatcttgttccatttgcaggcgaatattgcggattgtcacctgctcgtcatcttcatgccgaacgcaggcgcagtgctggtgattggtctgggctgtgaaaacaaccaggttgccgcattccgtgaaacgctgggcgatatcgatcctgaacgcgttcatttcatgatctgccaacagcaggatgatgagatcgaagccggaatcgagcatttgcatcagctgtataacgtgatgcgcaacgataaacgcgagccaggcaaactcagcgaactgaagtttggtctggagtgcggtggttctgacggtctttctggtattactgctaacccgatgctggggcgtttctctgactacgtgattgctaacggcggtactaccgtactgaccgaagtgccggagatgtttggcgcagagcagttgctgatggaccattgccgcgacgaagcaacgtttgaaaaactggtcaccatggtcaacgacttcaaacagtactttattgcccatgatcagccgatcgccgccaatcgccagcaagttcgccataccaatcgcgatatagatggtcgggtcgaaacgagcatcaatacgcgccacccgcatgttttttttgccggtatcttcggcatccgcggcaaataacgccgactggcgatcttccatgaccaagtaggtggaaaacgccgcctgtgccagcttaaagcgttcatgcaaagcatcgccgttgcgcttaatcatgatcgccatcactggcatcggcaacagggaaaataaggtcaactgccagctaatttgcgtagacatcataatcaacacagcgcagcccatcaccagtgaatccaccagcgtcagcaccccttctccggcggcaaacacgacgcgatcgacgtcattggtcgcacgagccatgaggtcaccggtgcgatgacgcaggtaaaactcaggatgctgccggcttagctgacggtaataatcttcacgcagttcaacagccagttgataagacgcaccaaacagcaatacccgccagacgtaacgcaggagataaaccacaacggcaatcagcaccatggtggcgatccacatcaggatctgcccggtagtaaagtgttgttctgtcacgccatcgacaacaataccaaccacttttggcggaaccagttgcagcatcgcgataatgacaagcaaggcgacagccccgagatagcgacgccattcccgacggaaataccagcgctgcgtttccagctggccgatttcgctccacgcgacaatttccccagtgaagctgcactcctgacagtccactctagaggatccccgggcaagcgtaatgccgtcgatatccggcagatcaaaatccaccagtgcggcagcaaacggttcgctattttgcagtgtctctaaagcctgcgcggcattgccaacagcaacaatctgcgcaccactggttttcagcatctcaatggtaattcgctgggttagcgggttatcttcaattaacagcaaacgtaaaccgtcaagacgcaccgcctgattgactgtttttggcacgggtgccgtggcaacacgtaacggcaagcgtaaacaaaaacagcttccaacctccggcgtgctggtggcgctcagttcgccgcccatcgcctgggccagacggctactgatagtcagtcccagcccggtgccgccgcgtttgccgcttacctgcacaaatggctggaagatttctgccagtttcgcgggatcaataccgcaaccgctgtcttccacttcgaccagccattgctcgccatcagtgcgactacgcaagataatgtacccttcgtcagtaaaacgcagggcgttgctcaacaggttggttataacctgacgaatacgtcgtggatcgcccat

SEQ ID NO: 28357 - DNA, 2409 bp, Homo sapiens
  SIMILAR (325)..(1575): 911254mologous to Escherichia coli Altronate dehydratase,accession number D13328,Smith-Waterman Score=1995.
atgacccctgcccccactgcacaggacctccagactcagggagaggagaaagatgatggtgttaaggaaaccgtgtggaccccaggtctccagcaggtaggaagtttggaactggccatattctatcccaacaagtacaaggctagccaggctggaacatatcgacggtccttcttaggtcactctgtgcggtgtgcactgaccccagccagtggatgttccccgtccaagagcaaagctacagtcggctgcaggtgcagtgacttttgcacagtggaagaatttctccagaagatattcctgcaggtggaatcactggatcgtgttcacgttcacgcccacaatacgcgcacgaatctgagcgatctggatcagtatcgctatcaacctgattttcaggatctgcctgcgcaagcggcagatcgtgaagtgcagatctatcgtcgcgctaacggcgatgtcggggtgcgtaatgagctgtggatcctgccaaccgtgggctgtgtcaacggcatcgcgcggcagatccagaaccgttttctgaaagagaccaacaacgccgaaggtactgacggcgtgttcctcttcagccacacctacggctgctcacagctgggcgacgatcacattaatacccgcaccatgctgcaaaacatggtgcgccacccgaacgcaggcgcagtgctggtgattggtctgggctgtgaaaacaaccaggttgccgcattccgtgaaacgctgggcgatatcgatcctgaacgcgttcatttcatgatctgccaacagcaggatgatgagatcgaagccggaatcgagcatttgcatcagctgtataacgtgatgcgcaacgataaacgcgagccaggcaaactcagcgaactgaagtttggtctggagtgcggtggttctgacggtctttctggtattactgctaacccgatgctggggcgtttctctgactacgtgattgctaacggcggtactaccgtactgaccgaagtgccggagatgtttggcgcagagcagttgctgatggaccattgccgcgacgaagcaacgtttgaaaaactggtcaccatggtcaacgacttcaaacagtactttattgcccatgatcagccgatctatgaaaacccatcgccggggaacaaagcgggcggtatcaccacgctggaagacaaatcacttggctgtacccagaaagcgggttccagcgtcgtggttgacgtgctgcgttacggcgagcgtctgaaaacgccagggctgaacttgttaagtgcgccgggtaacgatgccgtagcgaccagcgccctggcgggtgcgggctgccatatggtgctgttcagtactggtcgtggcacgccgtatggtggatttgtgccgacggtgaaaatcgccaccaacagtgaactggcggcgaagaaaaaacactggatcgactttgacgcgggatttatcatgaccgcgtattggctggcccagggcgtgggtgtcatcgcctttctgattggtatcacaacatttttcaatcgtgacgaacgtcgcttcaaaaagcagctttcggtctatagcgccgttattggcgtacatttttatcttctgggcacctatcccgctggtgccagtgccatccttaatgccattcggcccttcagcgcctcggaggcgccgtaccccgcccctcccgcctctcctgccccgtacgctctgcccgtcgctgagccggggctggaggacgtcaaggacggagtggacgccgtccccgccgccatctccacctcagaggcggctccctacgcccctccctccgggctggagtccttcttcagcaactgcaagtcacttccggaagccccgctggacgtggcccccgagcccgcctgtgtagccgctgtggctcaggtggaggctctggggcccctggaaaatagcttcctggacggcagccgcggcctgtctcacctcggccaggtggagccggtgccctgggcggacgccttcgccggccccgaggacgacctggacctggggcccttctccctgccggagcttcccctgcagactaaagatgccgcagatggtgaagcggaacccgtggaagaaagtcttgctcctccagaagagatgcctccaggggcccccggggtcataaacggtggggatgtttccaccgtagtggctgaggagccgccggcactgcctcctgaccaggcctccacccggctccctgcagagctcgagcctgagccctcaggggagccaaagctggacgtggctctagaagctgcggtggaggcggagacggtgccggaagagagggcccgtggggatccggactccagcgtggagcccgcgcccgtttccccagaacagcgcccactggggagcggagaccaggggctgagctga

SEQ ID NO: 28358 - DNA, 2931 bp, Homo sapiens
  SIMILAR (202)..(954): 921254mologous to Homo sapiens p53-GM-CSF immunostimulant fusion protein,accession number W19763,Smith-Waterman Score=1234.
gccggctcgagactcccgggcgccgaggcgctgccgcccgcctcgccgccccacgccgaaggaccacgcgcccgccgccgccagcctctcagcgctcccatgatcgcccggtgccttttggctgtgcgaagcctccgcagttcatctggaggctcgcggctctcatatctagtgcaagggattttcagcgaaaattgtgaacccaggtttccattccgaggtgtaaacgcggccatcccagctgcaagcctcaagtcgactctagaggatccccgtttccgtctgggcttcttgcattctgggacagccaagtctgtgacttgcacgtactcccctgccctcaacaagatgttttgccaactggccaagacctgccctgtgcagctgtgggttgattccacacccccgcccggcacccgcgtccgcgccatggccatctacaagcagtcacagcacatgacggaggttgtgaggcgctgcccccaccatgagcgctgctcagatagcgatggtctggcccctcctcagcatcttatccgagtggaaggaaatttgcgtgtggagtatttggatgacagaaacacttttcgacatagtgtggtggtgccctatgagccgcctgaggttggctctgactgtaccaccatccactacaactacatgtgtaacagttcctgcatgggcggcatgaaccggaggcccatcctcaccatcatcacactggaagactccagtggtaatctactgggacggaacagctttgaggtgcgtgtttgtgcctgtcctgggagagaccggcgcacagaggaagagaatctccgcaagaaaggggagcctcaccacgagctgcccccagggagcactaagcgagcactgcccaacaacaccagctcctctccccagccaaagaagaaaccactggatggagaatatttcacccttcagatccgtgggcttaacgccaatatcggcaactcggcggtcacctcttccatcgaagaagaagtggaaaagctggtatggtccacgcgctggggagcggatacggtgatggatctctccaccggtcgctatattcacgaaacccgcgagtggattttgcgtaacagcccggtgccgatcggtacagtgccgatctaccaggcgctggagaaggttaacgggatcgccgaagatcttacctgggaagcgttccgcgacacgctgctggaacaggccgagcaagcaaagaccacgattgaagagccgagccggaggcagctgggaaacatgaagagcgttttgctgctgaccacgctcatcgtgcctgcacacatggtggccgcctggagcaataattatgcggtggactgccctcaacactgtgacagcagtgagtgcaaaagcagcccgcgctgcaagaggacagtgctcgacgactgtggctgctgccgagtgtgcgctgcagggcggggagaaacttgctaccgcacagtctcaggcatggatggcatgaagtgtggcccggggctgaggtgtcagccttctaatggggaggatccttttggtgaagagtttggtatctgcaaaggttttattttcatgtcacagtctacatccgtgcttcgtcgtaatggatttacttttaaacagttttttgttgctcacgatcgctgtgcgatgaaagtgggaacggatggtattttattgggcgcatgggcaccggtggctggggtaaaacgttgccttgatatcggcgcgggtagcgggttgctggcattaatgctggcgcagcgaaccgatgacagcgtgatgattgatgcagttgaactggaaagtgaagctgccgcgcaggcgcaggaaaatatcaaccagtccccgtgggcagagcggattaacgtccatacggcggatattcagcagtggatcacacagcagacagcgggagaatgctttagcgatcgcttagtcattcgtgggccagacccagaactattccgaagcgtatacggcgctgacccaggctttttctctgtttatgtaatgattgccgggggaaaggatcgacggaccggaatgggccgcagcccggtttattccagccttccacctccaaacacggcccggttacataaccgcgtttatacgcaactagcaaattccagtggtgaattaaaacgccacaaacaacgtgtggcaattgcccgtgcgttagccagcaatcccaaagtattgctgtgtgatgaagccaccagcgcgctggacccggcaacgacacgttctattctcgaactgctgaaagacatcaaccgccgtctggggttgacgattctgttgatcacccacgaaatggacgttgtgaagcgcatttgtgattgcgtggcggtcatcagcaatggagaactgatcgagcaggacacggtaagtgaagtgttctcgcatccgaaaacgccgctggcgcagaagtttattcagtcgaccctgcatctggatatcccggaagattaccaggaacgtctgcaagcggagccatttactgactgcgtgccgatgctgcgtctggagtttaccggatgtgatggttcaggtaaatcgaccctcacggcaagcctggtaaatgaactggcagcaagaatgccaacagaacacatttatctcgggcaatcgtccgggcgaattggcgaatggatttcacagctccctgttattggcgcaccttttgggcgttatctgcgaagtaaagcggcacatgtgcacgaaaagccctcaacaccgcctggcaatattactgcactggttatctatctgctttcctgctggcgggcgtacaagtttcgcaaaatgttgtgtaaaagccagcaaggctttctgctcatcaccgaccgctacccgcaggttgaagtgccgggtttcgctttgatggcccgctattggcaaaaaccacggctgtaa

SEQ ID NO: 28359 - DNA, 1273 bp, Homo sapiens
  SIMILAR (56)..(514): 981254mologous to Homo sapiens ESM-1 secretory protein,accession number X89426,Smith-Waterman Score=858.
cttcccaccagcaaagaccacgactggagagccgagccggaggcagctgggaaacatgaagagcgtcttgctgctgaccacgctcctcgtgcctgcacacctggtggccgcctggagcaataattatgcggtggactgccctcaacactgtgacagcagtgagtgcaaaagcagcccgcgctgcaagaggacagtgctcgacgactgtggctgctgccgagtgtgcgctgcagggcggggagaaacttgctaccgcacagtctcaggcatggatggcatgaagtgtggcccggggctgaggtgtcagccttctaatggggaggatccttttggtgaagagtttggtatctgcaaagactgtccctacggcaccttcgggatggattgcagagagacctgcaactgccagtcaggcatctgtgacagggggacgggaaaatgcctgaaattccccttcttccaatattcagtaaccaagtcttccaacagatttgtttctctcacgggtcaggatccccaaattccagctatggtttctctgagtggtgcttctgttgttggtcttggtattctctcagcatcgagcaggtttgtgttgaggctgttctgtgcttggtgtggagcttacaaatctaaagtcatggctctgggaggggaagaacatgctaatgtggacagcaccaaggcagcactggagggctgtccaaagctaaaaaggatgaatacggttgtgcaggtgttactccaggagcacatcctgataaaccacctgcatgctaatctccatctcagaataggaaccagggaactggcctgggggctgtccatggcatggcctgagcatgctgattgccggcgctggaggatttcccccactacatctgatgcaaacctgacttggatgaaaaagtggagatttagaaccatagagaaacatcaggaatgtgcacgcgtagaagaaagactgtgcgaagaacagcaaaagtcaggcctggtcagaaacaacaacagcagcagcagcaacaacaacaacaacaacaacaacaacaacaacaacaacaacaacactgtgcatttcaataccgggaagtttcataggtgttggaagagctggaagtgcaaaagggaaaatggaggaggtctggaagtaataaaggaagaaggaacaatacccagaggtcagaagctgcatgcactcccacactggagctcacaagcttgccatgctggagatgctgttgtgtcaggtctgcatcttcaggatcagtgctga

SEQ ID NO: 28360 - DNA, 974 bp, Homo sapiens
  SIMILAR (661)..(888): 441254mologous to Homo sapiens P8 protein,accession number AF069073,Smith-Waterman Score=150.
tttcgtcagttttctcgtcagagtggggactggtaagagcgacctccccgccaggtcctgtgtgttgccggctgaagaagggtagctgaaaaattcagacccagcacagtgtttatgttggtcaaaaatagaaaactatgtctggcgcggccgaggcgggaggacccttcaggccaagagcagcctagcaacatggcgcaaccccatctctgtagtcctacctcagctccccccagccctcaagtatgaatccaacggttcaaggctccagtgagctatgatcccaccacagcattccagcctgcgaggattgaggacacaaagaccaacgagccaccacagctaccagtcccagaacccgctaatgctggggaacggaaaatgagggagttcaactctgcaacaacaggacctggcggggaggtcccggttaccaggctgcactccaaggagaagacagccctgctccaggcactgtaccgccactgtgacgtcgtcgaaggtccgcctctgtggcgtcgccgaaggcacccccaccttcacgcggagcccatcggaactcgaggcggggctgctgggtcttccaggagcgcccagacgcgggcaggtggccgccggtggccacaggcctgggcaggatggaagcgcccgcagacgcttccacgtctgcaggctctggctcggccgccgccacccataagctacgaggaggagctttacgactgcctggactactactactacctgcgcgacttcccggcctgcggggcagggcgcagcaagggccggactcggcgcgagcaggcgctgcgcaccaactggcctgcacctggcgggcacgagcgcaaggtcgcgcagaagctcctcaatggccagcgcaagcgccgccagcgccagctgcatcccaagatgcgcactcgcctcacctgagcctgggataccgaaggacctgttcgaagtatttactgtaactc

SEQ ID NO: 28361 - DNA, 312 bp, Homo sapiens
  SIMILAR (3)..(59): 891254mologous to Rattus norvegicus vacuolar ATPase subunit F,accession number U43175,Smith-Waterman Score=84.
ggggtaagctcatcgcagtgatcggagacgaggacacggtgactggtttccctgttgggcggcataggggagcttaacaagaaccgccatcccaatttcctggtggtggagaaggatacaaccatcaatgagatcgaagacactttccggcaatttttaaaccgggatgacattggcgcttttaggttgctggggctctgctggttaaggaacaggaagcctgaccatctccctccactacctcttccctgtgctgttacacagtgtcattgttgatgttaaattaaagtcatattcttaattcaaaaaaaa

SEQ ID NO: 28362 - DNA, 795 bp, Homo sapiens
  SIMILAR (14)..(172): 1001254mologous to Rattus norvegicus vacuolar ATPase subunit F,accession number U43175,Smith-Waterman Score=272.
cccggctgcagggatggcggggaggggtaagctcatcgcagtgatcggagacgaggacacggtgactggtttcctgctgggcggcataggggagcttaacaagaaccgccatcccaatttcctggtggtggagaaggatacaaccatcaatgagatcgaagacactttccgttcacttggaagccttccgggcagtgttgtagaagccaaccctaatcagcgtgaccctccgctttgggatgaaattgattctaggcaattttctaaacccgggatgacattgggcatcatccttattaaaccaggtacattcgcaggagatgggtgcgggcatgcccctggaacgcccaaccagcaagtccaatccccggctgtcctggggagatcccccttccaagggagcaccccatattgacggccgccaaaggacttccatccttgcggcaggggccagggggcattgtttcattgcccgaaggaccttgcggctaagggggacttcctcatgaggccctcaagcccttcccctcgttttccagggccttttccccagggtttgccattcagccttctttactttttggagcctctgatttccaatttccctgctccttcccaaatccattaagaggctaaggtgaggcgcttctaggttgctggggctctgctggttaaggaacaggaagcctgaccatctccctccactacctcttccctgtgctgttacacagtgtcattgttgatgttaaattaaagtccatattcttgcttctctccagaaaaaaaaaaaaaaaa

SEQ ID NO: 28363 - DNA, 693 bp, Homo sapiens
  SIMILAR (373)..(528): 551254mologous to Arabidopsis thaliana putative protein,accession number AL162506,Smith-Waterman Score=147.
atgaacaggttcacactggatgaattagtggttgagaatgaactagtacccactttgaggtccaggctctgtggccctgtgacccgcaggtattgggagactacagctaagacgccaggaacccctggaagcctagaaatggggccattgacatttagggatgtggccatagaatttttctggaggagtggcaatgcctggacactgctcagcaggatttgtatagaaagtgatgttagagaactacagaaacctggtcttcttgggtctgctgagtttgctggaggtccacttcagaccctgttcacctgggtatcaccacaaagagaaaaagaaaacagaagcagaagaatccaaaaaagcagcacagcaggagaaggagaagaggaggaggaggaggaggaggagaaaaaggagaggaggaggagaaggaggaggaggaggagaaaaaggaggaggagaagggaagaagaaggagaagaagaagaagaagaggaagaagaagaagaggaagagagtaaaaaggaaggggactgtgtttcagtaaggagtcacagcctcaccagtgttctgaatcctggtctgagagtcattaccaactgtggaaaacattcacgtaggagagtcacaatttcaacttttgatgaatccaggtgtgagattaagaacttcgacagcggggtggctttatga

SEQ ID NO: 28364 - DNA, 3020 bp, Homo sapiens
  SIMILAR (2330)..(3019): 671254mologous to Homo sapiens zinc finger protein,accession number L11672,Smith-Waterman Score=849.
tggtgcctgacgcctggacacgtcggaattcctggtcgacccacgcgcccgcggacgcgtgggcggggcctttgtccctcgctgtggcctgatctccaggtctcgtcttcagcgctctgtgtcctctgctcctagaggtccaggctctgtggccctgtgacctgcaggtattgggagatctacagctaagacgccaggaacccctggaagcctagaaatggagaacctgaagtctggagtgtatcctctcaaggaagcaagtggatgccctggggctgacaggaatcttctggtgtactctttttatgaaaaggggccattgacatttagggatgtggccatagaattttctctggaggagtggcaatgcctgggacactgctcagcaggatttgtatagaaaagtgatgttagagaactacagaaacctggtcttcttggcaggtattgctgtttctaagccagacctgatcacctgtctagagcaaggaaaagagccctggaatatgaagagacatgcgatggtagatcaacccccagttacatattctcattttgcccaagacctttggccagagcagggcataaaagattctttccaagaagtcatattgagaagatatggaaaatgtggacatgaagatttacagttaagaacaggctgtaaaagtgtggatgagtgtaatctgcacaaagaatgttatgatgaactaaaccagtgtttgacaactacccagagtgaaatatttcaatatgataaatatgtgaatgtcttttataaattttcaaatccaaatatacaaaagataagacatactggaaagaagcctttcaaatgtaaaaaatgtgacaaatcgttttgcatgcttttacacctaactcaacataaaagaattcatattagggaaaattcttaccaatgtgaagaatgtggtaaagtctttaactggttctcaacccttactagacacagaagaattcatactggagagaaaccctacaaatgtgaacaatgtggcaaagcttttaagcagtcctcaacccttactacacataagataattcatactggagagaaaccctacagatgtgaagaatgtggcaaaacctttaaccggtcctcacaccttactacacataaaagaattcatactggagagaaaccctacagatgtgaagaatgtggcagagcttttaaccggtcctcacaccttactacacataagattattcatactggagagaaaccctacaaatgtgaagaatgtggcaaagcttttaaccaatcctcaacccttactacacataagataattcatgctggagagaaaccttacaaatgtgaagaatgtggcaaagctttttaccgattctcataccttactaaacataagataattcatactggagagaaattctacaaatgtgaagaatgtggcaaaggctttaattggtcctcgacccttactaaacataaaagaattcatactggagagaaaccctacaaatgtgaacaatgtggcaaagcttttaatgagtcctcaaaccttactgcacataagataattcatactggagagaaaccctacaaatgtgaagaatgtggcaaagcctttaaccggtccccaaaacttactgcacataaggtaattcattctggagagaaaccctacaaatgtgaagaatgtggcaaagcttttaaccaattctcaaaccttactaaacataagataactcatattggagatacatcttacaaatacctagaatgtgataaagcctttagccagtcttcaactcttactaaacataaggtaattcatactggagagaaaccctacaactgtgaagaatacggcaaagctttcaaccagtcctcaaaccttattgaacaaaaggaaccctatgagtgtgaagaatatggcaaagccttcaacaagtcctcaattcttaccagacataagataattctggctggggcacgagaaggtggggttttaaaagttatccaatcagcgacgctgggttgggaaccgtccaatcaggcctgcagctggagcggacaggacggcttcggggatgtggcggggcctttgtctctcgctgcagctggagctgcaggtctcgccttcactgccctgtgtcctctgctcgcagaggcccagcctctgtggccctgtgacctgcaggtattgagagatccacagctaagacgccaggaccccctagaagcctagaaatggatgacccgaggtatggaatgtgtcctctcaagggagcaagtggatgccctggggctgagaggagtcttctggtgcagtcttattttgaaaaggggccattgacgtttagggatgtggccatagaattctctctggaggagtggcaatgcctggacagtgctcagcagggtttgtataggaaagtgatgttagagaactacagaaacctggtcttcttgggtattgctgtctctaagccagatctggtcacctgtctggagcaaggaaaagatccctggaatatgaagatatgtgagatggtggatgaatccccagctatgtgttcttcttttaccagagacctttggccagagcaagacataaaagattcttttcaacaagtgatactgagaagacatggcaaatgtgaacatgagaatttacagttaagaaaaggctccgcaaatgtggttgagtgtaaggtgtacaaaaaaggttatgaactaaaccagtgtttgacaactacccagagcaaaatatttccatgtgataaatatataaaagtctttcataaaattttcaattcaaatagacacaagacaagacatactggagagaaacctttcaaatgtaaaaaatgtgatgaatcattttgcatgcttttacacctacatcaacataaaagaattcatattagagagaattcttaccaatgtgaagaatgtgacaaagtgtttaagcggttctcaacccttactagacacaagagagttcatactggagagaaacccttcaaat

SEQ ID NO: 28365 - DNA, 339 bp, Homo sapiens
  SIMILAR (14)..(286): 951254mologous to Homo sapiens nucleotide-binding site protein 1,accession number AF298547,Smith-Waterman Score=452.
cggacgcgtgggcaaggagttggaggccatttttgtttgccggatgtcaccggacatcaaacaggaattgctgcgatgcgacataagttgtaagggtggacattcaacggtgacagacctgcaggagctcctcggctgtctgtacgagtctcaggaggaggagctggtgaaggaggtgatggctcacttcaaagaaatatccctgcacttaaatgcagtagacgttgtgccatcttcattctgcgtcaagcactgtcgaaacctgcagaaaatgtcactgcagatcccaggatgatcagcacatgctttctttctggacggacctttgttccatatttg

SEQ ID NO: 28366 - DNA, 316 bp, Homo sapiens
  SIMILAR (314)..(126): 981254mologous to Homo sapiens Human PRO1430 (UNQ736) amino acid sequence SEQ ID NO:116,accession number Y99372,Smith-Waterman Score=318.
tgcgggcatggcggccgccagtcctgggtctcccggctcaggtagtgccaggaagctgcgggcatggcggacagctgtcctcggtctggaggcgccatcctggctttcaaatctgctccagaggttatcaggcgggcactttcagcccaaagcctccgggccacctcctcatcctcagcctcgggggccggggccttctgtttgagtccatcgaagtactttccggaaacatccgccagttcctccgccacggccaggtatgtgctgggctgggcggccagctcggggctcttgaccagcagccagaagatgggcc

SEQ ID NO: 28367 - DNA, 400 bp, Homo sapiens
  SIMILAR (1)..(390): 1001254mologous to Homo sapiens Human PRO1430 (UNQ736) amino acid sequence SEQ ID NO:116,accession number Y99372,Smith-Waterman Score=679.
gtcaccggtggggcttgccccagcaaggccaccatccctgggaagacggtcatcgtgacgggcgccaacacaggcatcgggaagcagaccgccttggaactggccaggagaggaggcaacatcatcctggcctgccgagacatggagaagtgtgaggcggcagcaaaggacatccgcggggagaccctcaatcaccatgtcaacgcccggcacctggacttggcttccctcaagtctatccgagagtttgcagcaaagatcattgaagaggaggagcgagtggacattctaatcaacaacgcgggtgtgatgcggtgcccccactggaccaccgaggacggcttcgagatgcagtttggcgttaaccacctgggtcactttctcttgacaacttggtgct

SEQ ID NO: 28368 - DNA, 516 bp, Homo sapiens
  misc_feature (1)...(516): n = a,t,c or g
tctcgttctgtcacncaggctggagtgcagtggcgcaatctcggctcgctgcaagctctgcctcccggattcccgccattctcctgcctcagcctccctagtagctgggactgcaggcgccccccaccatgcccggctaatttttgatatttttagtagagacagggtttcgctgtgttagccaggatggtctcgatctcctgacctcgtgatccacctgcctcggcctcccaaagtgctgggattacatgtgtgagccaccacacccggccccatttttaatacgttttttaaagatgcatataaaatgcattaccctctggaagattccagtaacttactgaagcaagtttctcctctacatatacctatttctgccatgagtaactgttcattttcagtgagtcatttgagtttctgttattcaggtatacagagttcctgttgtctttttagtcaacaaagtttaacaaagaccataataaagatggctttcagcagctctgttattgggaa

SEQ ID NO: 28369 - DNA, 590 bp, Homo sapiens
  SIMILAR (354)..(590): 731254mologous to Homo sapiens nucleotide-binding site protein 1,accession number AF298547,Smith-Waterman Score=294.
gaacaaatagcctctgacacctgtcatctccagagagtggtgttcaaaaacatttccccagctgatgctcatcggaacctctgcctagctcttcgaggtcacaagactgtaacgtatctgacccttcaaggcaatgaccaggatgatatgtttcccgcattgtgtgaggtcttgagacatccagaatgtaacctgcgatatctcgggttggtgtcttgttccgctaccactcagcagtgggctgatctctccttggcccttgaagtcaaccagtccctgacgtgcgtaaacctctccgacaatgagcttctgggatgagggtgctaagttgctgtacacaactttgagacaccccaagtgctttcttgcagagggttgtcgttggaaaaactggtcaccttacagaagccaatttgcaagggaccttgctgctgtgttgggttttcagccgggagctgacacacctgtgcttggccaagaaccccattgtgaatacaggggtgaagtatctgtgtgagggcttgaggtaccccgagtgtaaactgcagaccttggtgctttggaactgcgacataactagcgagggctgc

SEQ ID NO: 28370 - DNA, 4787 bp, Homo sapiens
  SIMILAR (82)..(2490): 981254mologous to Homo sapiens NALP2,accession number AF310106,Smith-Waterman Score=4122.
atgggcaaccggccgggcgcggtggtcacgcctgtaatcccagcactttgggaggccgaggcggctcccacgtgggacaagatggtgtcttcggcgcagatgggcttcaacctgcaggctctcctggagcagctcagccaggatgagttgagcaagttcaagtatctgatcacgaccttctccctggcacacgagctccagaagatcccccacaaggaggtagacaaggctgatgggaagcaactggtagaaatcctcaccacccattgtgacagctactgggtggagatggcgagcctccaggtctttgaaaagatgcaccgaatggatctgtctgagagagcaaaggatgaagtcagagaagcagctttgaaatcctttaataaaaggaaacctctatcattagggataacacggaaagaacgaccacctctagacgtggacgaaatgctggagcgcttcaaaacagaagcacaagcgtttacagaaacgaaaggaaatgtcatctgcctgggtaaagaagtctttaaaggaaaaaagccagacaaagacaataggtgcaggtatatattgaagacgaagttccgggagatgtggaagagctggcctggagatagcaaagaggtccaggttatggctgagagatacaagatgctgatcccattcagcaaccccagggtgcttcccgggcccttctcatacacggtggtgctgtatggtcctgcaggccttgggaaaaccacgctggcccagaaactaatgctagactgggcagaggacaacctcatccacaaattcaaatatgcgttctacctcagctgcagggagctcagccgcctgggcccgtgcagttttgcagagctggtcttcagggactggcctgaattgcaggatgacattccacacatcctagcccaagcacggaaaatcttgttcgtgattgacggctttgatgagctgggagccgcacctggggcgctgatcgaggacatctgcggggactgggagaagaagaagccggtgcccgtcctcctggggagtttgctgaacagggtgatgttacccaaggccgccctgctggtcaccacgcggcccagggccctgagggacctccggatcctggcggaggagccgatctacataagggtggagggcttcctggaggaggacaggagggcctatttcctgagacactttggagacgaggaccaagccatgcgtgcctttgagctaatgaggagcaacgcggccctgttccagctgggctcggcccccgcggtgtgctggatcgtgtgcacgactctgaagctgcagatggagaagggggaggacccggtccccacctgcctcacccgcacggggctgttcctgcgtttcctctgcagccggttcccgcagggcgcacagctgcggggcgcgctgcggacgctgagcctcctggccgcgcagggcctgtgggcgcagacgtccgtgcttcaccgagaggatctggaaaggctcggggtgcaggagtccgacctccgtctgttcctggacggagacatcctccgccaggacagagtctccaaaggctgctactccttcatccacctcagcttccagcagtttctcactgccctgttctacaccctggagaaggaggaggaagaggatagggacggccacacctgggacattggggacgtacagaagctgctttccggagtagaaagactcaggaaccccgacctgatccaagcaggctactactcctttggcctcgctaacgagaagagagccaaggagttggaggccacttttggctgccggatgtcaccggacatcaaacaggaattgctgcgatgcgacataagttgtaagggtggacattcaacggtgacagacctgcaggagctcctcggctgtctgtacgagtctcaggaggaggagctggtgaaggaggtgatggctcagttcaaagaaatatccctgcacttaaatgcagtagacgttgtgccatcttcattctgcgtcaagcactgtcgaaacctgcagaaaatgtcactgcaggtaataaaggagaatctcccggagaatgtcactgcgtctgaatcagacgccgaggttgagagatcccaggatgatcagcacatgcttcctttctggacggacctttgttccatatttggatcaaataaggatctgatgggtctagcaatcaatgatagctttctcagtgcctccctagtaaggatcctgtgtgaacaaatagcctctgacacctgtcatctccagagagtggtgttcaaaaacatttccccagctgatgctcatcggaacctctgcctagctcttcgaggtcacaagactgtaacgtatctgacccttcaaggcaatgaccaggatgatatgtttcccgcattgtgtgaggtcttgagacatccagaatgtaacctgcgatatctcgggttgtgggagcacaggagtgtttctgctggtgcatcaggctggggtctgtcctcaccgggatgtctcctcctccacccctctcttccagaggaggagcgagtggacattctaatcaacaacgcgggtgtgatgcggtgcccccactggaccaccgaggacgggcttcgagatgcagtttggcgttaaccacctgggtcactttctcttgacaaacttgctgctggacaagctgaaagcctcagccccttcgcggatcatcaacctctcgtccctggcccatgttgctgggcacatagactttgacgacttgaactggcagacgaggaagtataacaccaaagccgccctactgccagagccaagctcgccatcgtcctctttcaccaaggagctgagccggcggctgcaaggctctggtgtgactgtcaacgcccccgcaccccggcgtggcccagggacagagctgggcagacacacgggcatccatggctccacctttctccagcaccacaactcgggccccatcttctggctgcctggtcaaagagcccccgaagctggcccgccccagcccagcacaataccctggccgtggcggaggaactggcggatgttttccggaaagtacttcgatggactcaaacagaatgccccggcccccgaggctgaggatgaggaggtggcccggaggctttgggctgaaagtgcccgcctggtgggcttagaggctcccctctgtgagggagcagcccctccccagataaccctctggagcagatttgaaagccaaggattgggcccttccaagacccgaaggacagcctgtccgccatgcccgcagcttccatggcactacctgagccgggagacccaggactggcggccgccatgcccgcgagtaggttctaggggggcggtgctggccgcagatggactggcctgcaggtgagcactgccctgggctctggctggttccgtctgctctgctgccagcagggtaagaggggccatctgatgcttcccctgggaatctaaactgggaatggccgaggaggaagtgggctccgtgcacttgcaggccacgtcaggagagccagcggtgcctgtcaggggagggttcccaaggtgctcccgtgaaagagcatggggcaagttgtcttgacacttggtgggattctttgggtccccgttggcctaggtggcaagccatggtcctcttctgagccttggttttctttcagcagtgaagatgctcagaaataacttgcttgtctcccatggatgggtgttggtacagcgagctttttgttctggctaattggcattggctgtgcccggggggtgtttgcttaaggggcttcgtgtgccagagcccagcccagagagcaggtgcaggtgtcatccctgagttcaggctctgcacggcatggagtgggaaccccaccagctgctgctacaggacctgggattgcctgggactcccaccttcctatcaattctcatggtagtccaaactgcagactctcaaacttgctcatttaaaagaaaaaaaaaaagaagaaaatgtacccgagtcgtagattttatttttcctctgtgcatgggtgaatgcccatgagctgaacaaaggcaactcatggctttattccttttaggaaacaaggcatcagtttatcaccagggcaacaggccatgcaaaagttcagacttggccgggcgcggtggatcacgaggtcaggagatcgagaccatcctggctaacacaatgaaaccctgtttctactaaaaaaatacagaaaatgaggcctggcgcagtggctcatgcctgtaatgccagcactttgggaggccgaggcgggtggatcacgaggtcaggagatcgagaccatcctggctaatacggtgaaaccctgtctctactaaaaaaaaaattacaaaaaaaattagccgggcgtggtggtgggcacctgtaatcccagctactcgggaggctgaggcaggagaatggcgtgaacccgggaggcggagcttgcagtgagccgagatcgcgccactgcactctagcctgggcggacagagcgagactccatctcaaaaaaaaaaaaaaaaaaaaaaaaaaaaaaaagaaatgtaagaactggaagaaaattcaggaggcatttttaaaaataatttttaagtggaaaagatatttctaagcaagacacaaaactcagaagcccgaaaaggaaagactgatgaagttgagtacatgttcatttgtggagaacaaacatacagttaaaaaaacaaaactgggccgagagttattcatgcctgtaatcccagcaatttgggag

SEQ ID NO: 28371 - DNA, 2216 bp, Homo sapiens
  SIMILAR (205)..(2028): 981254mologous to Mus sp. type II zinc finger DNA binding transcription factor=mTR2R1,accession number S75970,Smith-Waterman Score=3038.
ggcaaactgtcatcaggagcttaaataggacagattttcacggcagtggatataccagcatggctattatctatggagtgttctctgcttcaaatttgattacaccgtcagtggttgccattgtaggacctcaactctctatgtttgccagtggtttattttacagcatgtacattgccgttttcatccagcctttcccgtggtccttctacacagacctctcggccggaatctccagggatgaccagcccctccccacgcatccagataatctccaccgactctgctgtagcctcacctcagcgcattcagattgtcacagaccagcagacaggacagaaaatccagatagtcaccgcagtggacgcctccggatcccccaaacagcagttcatcctgaccagcccagatggagctggaactgggaaggtgatcctggcttccccagagacatccagcgccaagcaactcatattcaccacctcagacaacctcgtccctggcaggatccagattgtcacggattctgcctctgtggagcgtttactggggaagacggacgtccagcggccccaggtggtagagtactgtgtggtctgtggcgacaaagcctccggccgtcactatggggctgtcagttgtgaaggttgcaaaggtttcttcaaaaggagtgtgaggaaaaatttgacctacagctgccggagcaaccaagactgcatcatcaataaacatcaccggaaccgctgtcagttttgccggctgaaaaaatgcttagagatgggcatgaaaatggaatctgtgcagagtgaacggaagcccttcgatgtgcaacgggagaaaccaagcaattgtgctgcttcaactgagaaaatctatatccggaaagacctgagaagtcccctgatagctactcccacgtttgtggcagacaaagatggagcaagacaaacaggtcttcttgatccagggatgcttgtgaacatccagcagcctttgatacgtgaggatggtacagttctcctggccacggattctaaggctgaaacaagccagggagctctgggcacactggcaaatgtagtgacctcccttgccaacctaagtgaatctttgaacaacggtgacacttcagaaatccagccagaggaccagtctgcaagtgagataactcgggcatttgataccttagctaaagcacttaataccacagacagctcctcttctccaagcttggcagatgggatagacaccagtggaggagggagcatccacgtcatcagcagagaccagtcgacacccatcattgaggttgaaggccccctcctttcagacacacacgtcacatttaagctaacaatgcccagtccaatgccagagtacctcaacgtgcactacatctgtgagtctgcatcccgtctgcttttcctctcaatgcactgggctcggtcaatcccagcctttcaggcacttgggcaggactgcaacaccagccttgtgcgggcctgctggaatgagctcttcaccctcggcctggcccagtgtgcccaggtcatgagtctctccaccatcctggctgccattgtcaaccacctgcagaacagcatccaggaagataaactttctggtgaccggataaagcaagtcatggagcacatctggaagctgcaggagttctgtaacagcatggcgaagctggatatagatggctatgagtatgcataccttaaagctatagttctctttagccccgatcatccaggtttgaccagcacaagccagattgaaaaattccaagaaaaggcacagatggagttgcaggactatgttcagaaaacctactcagaagacacctaccgattggcccggatcctcgttcgcctgccggcactcaggctgatgagctccaacataacagaagaacttttttttactggtctcattggcaatgtttcgatagacagcataatcccctacatcctcaagatggagacagcagagtataatggccagatcaccggagccagtctatagcgcaaaccacacacctgccaaggagcaacagaatccttccaggaccgttcacatacaaagaaagtagtggtattttggtatgtgcaaatatttccatatgttagccatttcctgtctggtttctccttatctgttaatcccagacaatagcaattaaaaagactagtaggatcctttcctgacat

SEQ ID NO: 28372 - DNA, 3069 bp, Homo sapiens; identical to SEQ ID NO: 7110
  SIMILAR (2293)..(3036): 961254mologous to Cloning vector pZC320 SopB,accession number U26464,Smith-Waterman Score=1172.

SEQ ID NO: 28373 - DNA, 3225 bp, Homo sapiens
  SIMILAR (2494)..(2742): 1001254mologous to unidentified cloning vector chloramphenicol acetyltransferase,accession number Y09893,Smith- Waterman Score=459.
  misc_feature (1)...(3225): n = a,t,c or g
atgaccctggttttgaataacgcgggctttgcacgagttttaagaatggggaaggggtcggcgagctcggtcggagggaaccgatatgtggacgcggccgaagcctgcacggcggacgcgcggtgccagcgtttgcgctccgagtatgtggcgcagtgcctgggccgggctgcgcaggggggctgtccccgcgcccgctgccgccgggccctgcgccgcttcttcgcccgcgggccgcccgcgctcacccacgcantgaattttcgcctggtggggcaaaccagcgtggaccgcttgctgcaactttctcaggcccaggcggtgaagggcaatcagctgttgcccgtctcactggtgaaaagaaaaaccaccctggcgcccaatacgcaaaccgcctctccccgcgcgttggccgattcattaatgcagctggcacgacaggtttcccgactggaaagcgggcaggattttgccgatttcggaaccaccatcaaacaggattttcgcctgctggggcaaaccagcgtggaccgcttgctgcaactctctcagggccaggcggtgaagggcaatcagctgttgcccgtctcactggtgaaaagaaaaaccaccctggcgcccaatacgcaaaccgcctctccccgcgcgttggccgattcattaatgcagctggcacgacaggtttcccgactggaaagcgggcaggattttgccgatttcggaaccaccatcaaacaggattttcgcctgctggggcaaaccagcgtggaccgcttgctgcaactctctcagggccaggcggtgaagggcaatcagctgttgcccgtctcactggtgaaaagaaaaaccaccctggcgcccaatacgcaaaccgcctctccccgcgcgttggccgattcattaatgcagctggcacgacaggtttcccgactggaaagcgggcaggattttgccgatttcggaaccaccatcaaacaggattttcgcctgctggggcaaaccagcgtggaccgcttgctgcaactctctcagggccaggcggtgaagggcaatcagctgttgcccgtctcactggtgaaaagaaaaaccaccctggcgcccaatacgcaaaccgcctctccccgcgcgttggccgattcattaatgcagctggcacgacaggtttcccgactggaaagcgggcagtcctgttctacgccccccccaaacactgataaacagagcaaagaaaaatgtcccatgaaatttacattccagcaggtggagacaaacatgactggcgatgctgtcggaatggacgatatcccgcaagaggcccggcagtaccggcataaccaagcctatgcctacagcatccagggtgacggtgccgaggatgacgatgagcgcattgttagatttcatacacgggtcaccgtcgacagcgacacacttgcatcggatgcagcccggttaacgtgccggcacggcctgggtaaccagatattgaacgtgatggccggggaatcggggtgtgaagaaaattgcgggaacggcggaggcgggaacaagggaaaccggaataagcgtaaacagatacgcaagcgacgcaaaagggcggaaccgcggaaaggcccgacaaagcggggaacaccgcccacaccaacagaagcccgacgcgcccgcgtggcccgaagcgaagaatcaaccgaaacgccggaacgacggcatcagcaacgccgaaccggcgacccccaagcaccaggggcacggccctgcacagccatgcggaccacgcggaatgaaacccaagagaagaccctcagagctcccaccaagcccgcaaagcacaaggggggtacagaatccgggaaaaagcatctggctcagacgccgcgtgccacggcgtggacagcgtacaagcgaaaaacacggaaaacgtcattcagcaacctcggactagaagggcagacacgctttaaaaggacgaaggacgatcaacaccaacgtacaccccgggtctacgctcctcagcgcgcaaagcgccgagcaaggacaggtgacacgccaaaacacctaaaacgagcatacagggtcattccgtttgtagtgacgccaacgcgggattctgcggacatgatcggcccaccaaaggattttgccgatttcggaaccaccatcaaacaggattttcgcctgctggggcaaaccagcgtggaccgcttgctgcaactctctcagggccaggcggtgaagggcaatcagctgttgcccgtctcactggtgaaaagaaaaaccaccctggcgcccaatacgcaaaccgcctctccccgcgcgttggccgattcattaatgcagctggcacgacaggtttcccgactggaaagcgggcagtggaaattacggcttttaaaagccgtaaaagaaaaaaaagcccagttttatccggccttaattcacatctgtgcccgcctgatgaatgttcaccggaggttccgtatggcaataaaagacgggtttattgagaatatgtttttcgtctcagccaatccctgggtgagtttcaccagttttgatttaaacgtggccaatatggacaacttcttcgcccccgttttcaccatgggcaaatattatacgcaaggcgacaaggtgctgatgccgctggcgattcaggttcatcatgccgtttgtgatggcttccatgtcggcagaatgcttaatgaattacaacagtactgcgatgagtggcagggcggggcggattttgccgatttcggaaccaccatcaaacaggattttcgcctgctggggcaaaccagcgtggaccgcttgctgcaactctctcagggccaggcggtgaagggcaatcagctgttgcccgtctcactggtgaaaagaaaaaccaccctggcgcccaatacgcaaaccgcctctccccgcgcgttggccgattcattaatgcagctggcacgacaggtttcccgactggaaagcgggcaggattttgccgatttcggaaccaccatcaaacaggattttcgcttgctggggcaaaccagcgtggaccgcttgctgcaactctctcagggccaggcggtgaagggcaatcagctgttgcccgtctcactggtgaaaagaaaaaccaccctggcgcccaatacgcaaaccgcctctccccgcgcgttggccgattcattaatgcagctggcacgacaggtttcccgactggaaagcgggcagtga

SEQ ID NO: 28374 - DNA, 2640 bp, Homo sapiens; identical to SEQ ID NO: 25746
  SIMILAR (1)..(678): 981254mologous to Cloning vector pZC320 SopA,accession number U26464,Smith-Waterman Score=1163.
  misc_feature (1)...(2640): n = a,t,c or g

SEQ ID NO: 28375 - DNA, 3662 bp, Homo sapiens; identical to SEQ ID NO: 7426
  SIMILAR (1921)..(2490): 991254mologous to Cloning vector pZC320 SopA,accession number U26464,Smith-Waterman Score=993.

SEQ ID NO: 28376 - DNA, 2868 bp, Homo sapiens
  SIMILAR (1723)..(2337): 921254mologous to unidentified cloning vector 29kD protein essential for the replication of mini F plasmid,accession number AB015619,Smith-Waterman Score=979.
atggtgaaggattttgtggggcaagtgcctgtcagcatctttagggattttgccgatttcggaaccaccatcaaacaggattttcgcctgctggggcaaaccagcgtggaccgcttgctgcaactctctcagggccaggcggtgaagggcaatcagctgttgcccgtctcactggtgaaaagaaaaaccaccctggcgcccaatacgcaaaccgcctctccccgcgcgttggccgattcattaatgcagctggcacgacaggtttcccgactggaaagcgggcaggattttgccgatttcggaaccaccatcaaacaggattttcgcctgctggggcaaaccagcgtggaccgcttgctgcaactctctcagggccaggcggtgaagggcaatcagctgttgcccgtctcactggtgaaaagaaaaaccaccctggcgcccaatacgcaaaccgcctctccccgcgcgttggccgattcattaatgcagctggcacgacaggtttcccgactggaaagcgggcaggattttgccgatttcggaaccaccatcaaacaggattttcgcctgctggggcaaaccagcgtggaccgcttgctgcaactctctcagggccaggcggtgaagggcaatcagctgttgcccgtctcactggtgaaaagaaaaaccaccctggcgcccaatacgcaaaccgcctctccccgcgcgttggccgattcattaatgcagctggcacgacaggtttcccgactggaaagcgggcagcaaagctgtactctgaaagctggccccaatggggaggttaggactgtgcctgctcagaagtctgtgggtgcctcagagaagggcaacaaccctaggctggaccctagccttgagagtacttcctactgccagagcccccagatttcttccggtggcagcagatactgccagaagagcctgcggtgcacacaccagaatccggttcagaactctgatattgaaagtgtgctgttcctgatcagtgtccacgctaatgtgaattcaagagtccaggatgcctccaagttgacccccctgcacctcgctgtccaagcaggctcagaaattattgtccgcaatttggataaagcccacacagcggaagccagtgttccaggcccttctgcagtgctggtctccagtgctttcaaggattttgccgatttcggaaccaccatcaaacaggattttcgcctgctggggcaaaccagcgtggaccgcttgctgcaactctctcagggccaggcggtgaagggcaatcagctgttgcccgtctcactggtgaaaagaaaaaccaccctggcgcccaatacgcaaaccgcctctccccgcgcgttggccgattcattaatgcagctggcacgacaggtttcccgactggaaagcgggcaggattttgccgatttcggaaccaccatcaaacaggattttcgcctgctggggcaaaccagcgtggaccgcttgctgcaactctctcagggccaggcggtgaagggcaatcagctgttgcccgtctcactggtgaaaagaaaaaccaccctggcgcccaatacgcaaaccgcctctccccgcgcgttggccgattcattaatgcagctggcacgacaggtttcccgactggaaagcgggcaggattttgccgatttcggaaccaccatcaaacaggattttcgcctgctggggcaaaccagcgtggaccgcttgctgcaactctctcagggccaggcggtgaagggcaatcagctgttgcccgtctcactggaacatgacggtatctgcgagatccatgttgctaaatatgctgaaatattcggattgacctctgcggaagccagtaaggatatacggcaggcattgaagagtttcgcggggaaggaagtggttttttatcgccctgaagaggatgccggcgatgaaaaaggctatgaatcttttccttggtttatcaaacgtgcgcacagtccatccagagggctttacagtgtacatatcaacccatatctcattcccttctttatcgggttacagaaccggtttacgcagtttcggcttagtgaaacaaaagaaatcaccaatccgtatgccatgcgtttatacgaatccctgtgtcagtatcgtaagccggatggctcaggcatcgtctctctgaaaatcgactggatcatagagcgttaccagctgcctcaaagttaccagcgtatgcctgacttccgccgccgcttcctgcaggtctgtgttaatgagatcaacagcagaactccaatgcgcctctcatacattgagaaaaagaaaggccgccagacgactcatatctgcaagttagtagaggccaataatccacaggcaatttctcaacaagacctggtacacatggctattcagattgcctgtggaatgagctacctggccagaacggaagtcatccacaaagacctggctgctaggaactgtatcactgatgacacacttcaagttaagatcacagacaatgccgtctcatggactatcactgtctggaagacaatgaaaacaggccagtttgttggatggctcttgaaagtctggttaataacgagttttctagcactagtgatgtgtggggcctttggagtgatgctgtgggaactcatgactctgggccagacgccctacatggacactgaccccttcgagatggccgcatacctgaaagatggttaccgaatagcccagccaatcaactgtcctgatgaaccatttgctgtgatggcctgttgctgggccttagatccgggggagaggcccaagtttcagcagctggtacagtgtctcacagtttcatgcagcctgggggcctacgtctga

SEQ ID NO: 28377 - DNA, 2112 bp, Homo sapiens; identical to SEQ ID NO: 4012
  SIMILAR (763)..(1458): 991254mologous to Cloning vector pZC320 SopA,accession number U26464,Smith-Waterman Score=1213.
  misc_feature (1)...(2112): n = a,t,c or g

SEQ ID NO: 28378 - DNA, 3810 bp, Homo sapiens; identical to SEQ ID NO: 25753
  SIMILAR (3450)..(3542): 351254mologous to Homo sapiens similarto human ZFY protein,accession number D86966,Smith-Waterman Score=48.

SEQ ID NO: 28379 - DNA, 3573 bp, Homo sapiens; identical to SEQ ID NO: 5666
  SIMILAR (2492)..(2542): 881254mologous to Bacillus amyloliquefaciens precursor (AA - 29 to 443),accession number X52988,Smith-Waterman Score=80.

SEQ ID NO: 28380 - DNA, 2232 bp, Homo sapiens; identical to SEQ ID NO: 4932
  SIMILAR (1)..(639): 991254mologous to Cloning vector pZC320 SopA,accession number U26464,Smith-Waterman Score=1117.
  misc_feature (1)...(2232): n = a,t,c or g

SEQ ID NO: 28381 - DNA, 2602 bp, Homo sapiens; identical to SEQ ID NO: 16907
  SIMILAR (1478)..(2029): 801254mologous to Homo sapiens p40,accession number U93570,Smith-Waterman Score=765.

SEQ ID NO: 28382 - DNA, 3198 bp, Homo sapiens; identical to SEQ ID NO: 10652
  SIMILAR (1)..(1062): 961254mologous to Cloning vector pZC320 SopA,accession number U26464,Smith-Waterman Score=1749.
  misc_feature (1)...(3198): n = a,t,c or g

SEQ ID NO: 28383 - DNA, 2172 bp, Homo sapiens
  SIMILAR (304)..(1047): 991254mologous to Cloning vector pSacBII SacB,accession number U09128,Smith-Waterman Score=1333.
atgcccacaaattcttgggcatttcggcagtccttctccatccaccggaaggttcctgaagatggagagactcgggaggaaacgcttctgcaggagtcagcatcgaaggaggcttactatctggggaagatcttggagatgcagaacgagctgaaacagagccgggctgtggtcagtaatgtacaggcagcttacgagaggctcaccgcagtcgtgcaggatctgaaggaggcccacaatttctggacttttttacgaattgcaacttctggcaaggaagaagcgaactcaagcctttcgcgaaaagaaaataaccaaaaagcatacaaagaaacgtacggcgtctctcatattacacgccatgatatgctgcagatccctaaacagcagcaaaacgaaaaataccaagtgcctcaattcgatcaatcaacgattaaaaatattgagtctgcaaaaggacttgatgtgtgggacagctggccgctgcaaaacgctgacggaacagtagctgaatacaacggctatcacgttgtgtttgctcttgcgggaagcccgaaagacgctgatgacacatcaatctacatgttttatcaaaaggtcggcgacaactcaatcgacagctggaaaaacgcgggccgtgtctttaaagacagcgataagttcgacgccaacgatccgatcctgaaagatcagacgcaagaatggtccggttctgcaacctttacatctgacggaaaaatccgtttattctacactgactattccggtaaacattacggcaaacaaagcctgacaacagcgcaggtaaatgtgtcaaaatctgatgacacactcaaaatcaacggagtggaagatcacaaaacgatttttgacggagacggaaaaacatatcagaacgttcagcagtttatcgatgaaggcaattatacatccggcgacaaccatacgctgagagaccctcactacgttgaagacaaaggccataaataccttgtattcgaagccaacacgggaacagaaaacggataccaaggcgaagaaactttggctatcagagatgccgagaaagcagggcgactaccgcacccggatatggaaattcgaggacgggttgagcaacgtgttggttatacaattgaacaaattaatcatatgcgtgatgtgtttggtacgcgattgcgacgtgctgaagacgtatttccaccggtgatcggggttgctgcccataaaggtggcgtttacaaaacctcagtttctgttcatcttgctcaggatctggctctgaaggggctacgtgttttgctcgtggaaggtaacgacccccagggaacagcctcaatgtatcacggatgggtaccagatcttcatattcatgcagaagacactctcctgcctttctatcttggggaaaaggacgatgtcacttatgcaataaagcccacttgctggccggggcttgacattattccttcctgtctggctctgcaccgtattgaaactgagttaatgggcaaatttgatgaaggtaaactgcccaccgatccacacctgatgctccgactggccattgaaactgttgctcatgactatgatgtcatagttattgacagcgcgcctaacctgggtatcggcacgattaatgtcgtatgtgctgctgatgtgctgattgttcccacgcctgctgagttgtttgactacacctccgcactgcagtttttcgatatgcttcgtgatctgctcaagaacgttgatcttaaagggttcgagcctgattggataccatcaggcatttctagaattcacaattcactgaatgtttggtccactttattgatcttaaccttcaaactatgggtctttacaaaggcaaaaattaaaatgagatcattagaggaggcccaatccgatagggctgctgtctttataaaaaggggaaattcagccacacagaaactgacacatacttctgcatgtgggatgggaagactatgtgaagaaacacagggaaaagatggccacgtgaccatggaggcagagaccgaagtgacccatctacacgccaaggaacatcaaggattgccagcaaacaccagaggccaggaaggggcaaggaaaggcctttccctagagctgccagagggagcatggccctggcgacaccaggatttctga

SEQ ID NO: 28384 - DNA, 2262 bp, Homo sapiens; identical to SEQ ID NO: 4935
  SIMILAR (1)..(405): 1001254mologous to Cloning vector pZC320 SopA,accession number U26464,Smith-Waterman Score=691.

SEQ ID NO: 28385 - DNA, 2421 bp, Homo sapiens; identical to SEQ ID NO: 5218
  SIMILAR (1597)..(2319): 981254mologous to Cloning vector pBACe3.6 levansucrase,accession number U80929,Smith-Waterman Score=1250.

SEQ ID NO: 28386 - DNA, 1974 bp, Homo sapiens; identical to SEQ ID NO: 13192
  SIMILAR (1)..(552): 1001254mologous to Cloning vector pZC320 SopA,accession number U26464,Smith-Waterman Score=971.

SEQ ID NO: 28387 - DNA, 2078 bp, Homo sapiens
  SIMILAR (3)..(395): 481254mologous to Homo sapiens Human masking protein subunit hMPU-3,accession number R53088,Smith-Waterman Score=318.
atattgatgaatgtttgaatccaagcacttgtccagatgagcagtgtgtgaattctcctggatcttaccagtgcgttccctgcacagaaggattccgaggctggaatggacagtgccttgagttaaataatgattacacattgaaaaaagtaatgaagccgctgatcacttcaaacacggtaactgatgaaatcgagcgcgcgaatgttttcaaaatgaacggcaaatggtacttgttcactgattcacgcggttcaaaaatgacgatcgatgatatcaatgaatgcttggaggacaagagtgtttgccagagaggagactgcattaatactgcagggtcctatgattgtacttgtccggatggatttcagctagatgacaataaaacatgtcaaggtgggcccgacaagtttcccgacgggaaagcgggccaggattttgccgatttcggaaccaccatcaaacaggattttcgcctgctggggcaaaccagcgtggaccgcttgctgcaactctctcagggccaggcggtgaagggcaatcagctgttgcccgtctcactggtgaaaagaaaaaccaccctggcgcccaatacgcaaaccgcctctccccgcgcgttggccgattcattaatgcagctggcacgacaggtttcccgactggaaagcgggcaggattttgccgatttcggaaccaccatcaaacaggattttcgcctgctggggcaaaccagcgtggaccgcttgctgcaactctctcagggccaggcggtgaagggcaatcagctgttgcccgtctcactggtgaaaagaaaaaccaccctggcgcccaatacgcaaaccgcctctccccgcgcgttggccgattcattaatgcagctggcacgacaggtttcccgactggaaagcgggcaggattttgccgatttcggaaccaccatcaaacaggattttcgcctgctggggcaaaccagcgtggaccgcttgctgcaactctctcagggccaggcggtgaagggcaatcagctgttgcccgtctcactggtgaaaagaaaaaccaccctggcgcccaatacgcaaaccgcctctccccgcgcgttggccgattcattaatgcagctggcacgacaggtttcccgactggaaagcgggcaacgcaggccaatccatcaccatgtaggtaaaggacctgtatttgtcaagccaaagaacactcaacctgttgctaaaagtactcatcctccacctctcccagccaaggaagagccagtggaggccctgaccttctcccgggaacacgggccaggagtggcggagccagaagagagtcacgttcgtcattcggcactgtattccttggacctgacattcagcctggagttgctgcccactcgatccccacctttaatgactatttcatcactctgggttctggccagttccaaatggctatttcaaccaagtcctttcttaagggaagccaccctgtcagatattaatgaatgtgaacatccagggctctgtggtccgcaaggggagtgcctaaacacagagggttctttccattgtgtctgccagcagggtttctcaatctctgcagatggccgtacgtggaaggcttggttatgccgggtactgccgggcctcttgcgggatatcgtccattccgacagcatcgccagtcactatggcgtgctgctagcgctatatgcgttgatgcaatttctatgcgcacccgttctcggagcactgtccgaccgctttggccgccgcccagtcctgctcgcttcgctacttggagccactatcgactacgcgatcatggcgaccacacccgtcctgtggatctacccactagtcaattcaccagattttcgcctgctggggcaaaccagcgtggaccgcttgctgcaactctctcagggccaggcggtgaagggcaatcagctgttgcccgtctcactggtgaaaagaaaaaccaccctggcgcccaatacgcaaaccgcctctccccgcgcgttggccgattcattaatgcagctggcacgacaggtttcccgactggaaagcgggcagtga

SEQ ID NO: 28388 - DNA, 5100 bp, Homo sapiens; identical to SEQ ID NO: 25767
  SIMILAR (1894)..(2610): 941254mologous to Leishmania major probable levansucrase precursor,accession number AL160371,Smith-Waterman Score=1184.

SEQ ID NO: 28389 - DNA, 2305 bp, Homo sapiens; identical to SEQ ID NO: 25768
  SIMILAR (698)..(1399): 941254mologous to Cloning vector pSacBII SacB,accession number U09128,Smith-Waterman Score=1178.
  misc_feature (1)...(2305): n = a,t,c or g

SEQ ID NO: 28390 - DNA, 2082 bp, Homo sapiens
  SIMILAR (1348)..(1914): 981254mologous to Cloning vector pZC320 SopA,accession number U26464,Smith-Waterman Score=971.
atgaacatgaacatcaaaaaaattgtaaaacaagccacagttctgacttttacgactgcacttctggcaggaggagcgactcaagccttcgcgaaagaaaagaaccaaaaagcacacaaagaaactgacatcgcggaaggaaaatacgatatgagtcgtctggcggcctttctttttctcaagtttttcgataggcttcgtgatcggcccaagaacgttgatcttaaagggttcgagcctgatggacgaatttggcttaccaaatacagcaataggccagccggtgaaggccaatcacttgttgcccgtctcacgggtgaaaagaaaaaccaccctggcgcccaatacgcaaaccgcctctccccgcgcgttggccgattcattaatgcagctggcacgacaggtatcccgactggaaagcgggcagtgagcgcaacgcaattaatggcatttctttctatttttgtggctgttctgcacggaatcggaataccgggagcaccgggtaggaaacgggataggatcgaccgaaggcagaccgcgagccagacacgacgatacagcccgcaacaccccacagacacgcatcgcaccccgacgtcgcgtcctcacaaccccgacgcagcgctccgcccatcacaaccgggggtggcagacactaagggcgcgggagagcgacttagagcaaaagaggcagccgggccacacaacgtcccctgtactcagccgcgagcacgggagaaagctcgtgagtcagcagccatggcgccgaaccacgcagcccccatcaaaccaggattttcgcctgctggggcaaaccagcgtggaccgcttgctgcaactctctcagggccaggcggtgaagggcaaccagctgttgcccgtctcactggtgaaaagaaaaaccaccctggcgcccaatacgcaaaccgcctctccccgcgcgttggccgattcattaatgcagctggcacgacaggtttcccgactggaaagcgggcatgcactcttgttccaaacttggaacaacaatccaaccactatctcggggctattcttttgatttataagcgatttgctcgatttcgtaaccaccatcaaacaggattttcgcctgttggggcaaaccagcgtggaccgcttgctgcaactctctcagggccaggcggtgaagggcaatcagctgttgcccgtctcactggtgaaaagaaaaaccaccttggcgcccaatacgcaaaccgcctctccccgcgcgttggccgattcattaatgcagctggcacgacaggtttcctgactggaaagcgggcagtgagcgcaacgcaattaataagacactctcctgcttttctttctggggaaaaggacgatgtcacttatgcaataaagcccacttgctggccggggcttgacattattccttcctgtctggctctgcaccgtattgaaactgagttaatgggcaaatttgatgaaggtaaactgcccaccgatccacacctgatgctccgactggccattgaaactgttgctcatgactatgatgtcatagttattgacagcgcgcctaacctgggtatcggcacgattaatgtcgtatgtgctgctgatgtgctgattgttcccacgcctgctgagttgtttgactacacctccgcactgcagtttttcgatatgcttcgtgatctgctcaagaacgttgatcttaaagggttcgagcctgatgtacgtattttgcttaccaaatacagcaatagtaatggctctcagtccccgtggatggaggagcaaattcgggatgcctggggaagcatggttctaaaaaatgttgtacgtgaaacggatgaagttggtaaaggtcagatccggatgagaactgtttttgaacaggccattgatcaacgctcttcaactgctcgccccagacggcgagtcagggaagggggtggggagggaggcgagaacaaaaccgtatgctgtattggcaaagccgagttgtgtctgctgcttcttggcagtccccaaagtacgtcctctcagcagacggagctgctggcaaatgaaacaggggattccacttga

SEQ ID NO: 28391 - DNA, 2037 bp, Homo sapiens
  SIMILAR (151)..(696): 991254mologous to Cloning vector pBACe3.6 levansucrase,accession number U80929,Smith-Waterman Score=936.
  misc_feature (1)...(2037): n = a,t,c or g
atgtacgcagaggaggcacagttgtgtgggagaaaaatcacaggacgcggattcagatgtctgagagtaagtcgtacctgctgtgcaacccgaagcaagtctgtttacctcatggaacctgcctctactgctggaagtggggatgtgtcagcgtactacggcggcggcacgaacttcttctgtaaagaaagccagaagcttcagcagagcgctaaaaaacgcgatgctgagttagcgaacggcgccctcggtatcatagagttaaataatgattacacattgaaaaaagtaatgaagccgctgatcacttcaaacacggtaactgatgaaatcgagcgcgcgaatgttttcaaaatgaacggcaaatggtacttgttcactgattcacgcggttcaaaaatgacgatcgatggtattaactcaaacgatatttacatgcttggttatgtatcaaactctttaaccggcccttacaagccgctgaacaaaacagggcttgtgctgcaaatgggtcttgatccaaacgatgtgacattcacttactctcacttcgcagtgccgcaagccaaaggcaacaatgtggttatcacaagctacatgacaaacagaggcttcttcgaggataaaaaggcaacatttgcgccaagcttcttaatgaacatcaaaggcaataaaacatccgttgtcaaaaacagctcgtggggatctatagagagaactgggtgtcagccacaattcggcggcggccaaagcggtcggacagtgctcgagaacgnncacgccatagtgactggcgatgctgtcggaatggacgatatcccgcaagaggcccggcagtaccggcataaccaagcctatgcctacagcatccagggtgacggtgccgaggatgacgatgagcgcattgttagatttcatacacgggtcaccgtcgacagcgacacacttgcatcggatgcagcccggttaacgtgccggcacggcctgggtaaccaggtattttgtccacataaccgtgcgcaaaatgttgtggataagcaggacacagcagcaatccacagcaggcatacaaccgcacaccgagtgttggaagttctggccagggcaatcaggcaggagaaggaaataaagggtattcaattaggaaaagaggaagtcagattgtccctgtttgcagatgacatgattgtatatctagaaaaccccattgtctcagcccaaaatctccttaagctgataagcaacttcagcaaagtctcaggatacaaaatcaatgtacaaaaatcacaagcattcttatacaccaataacagacaaacggagagccaaatcatgagtgaactcccattcacaattgcttcaaagagaataaaatacctaggaatccaacttacaagggatgtgaaggacctcttcaaggagaactacaaaccactgctcaatgaaataaaagaggttacaaacaaatggaagaacatttcatgctcatgggtaggaagaatcaatattgtgaaaatggccatactgcccaagggattttgccgatttcggaaccaccatcaaacaggattttcgcctgctggggcaaaccagcgtggaccgcttgctgcaactctctcagggccaggcggtgaagggcaatcagctgttgcccgtctcactggtgaaaagaaaaaccaccctggcgcccaatacgcaaaccgcctctccccgcgcgttggccgattcattaatgcagctggcacgacaggtttcccgactggaaagcgggcagtgagcgcaacgcaattaatggattttgccgatttcggaaccaccatcaaacaggattttcgcctgctggggcaaaccagcgtggaccgcttgctgcaactctctcagggccaggcggtgaagggcaatcagctgttgcccgtctcactggtgaaaagaaaaaccaccctggcgcccaatacgcaaaccgcctctccccgcgcgttggccgattcattaatgcagctggcacgacaggtttcccgactggaaagcgggcagtga

SEQ ID NO: 28392 - DNA, 2127 bp, Homo sapiens; identical to SEQ ID NO: 25770
  SIMILAR (1081)..(1836): 981254mologous to Cloning vector pBACe3.6 levansucrase,accession number U80929,Smith-Waterman Score=1318.

SEQ ID NO: 28393 - DNA, 3990 bp, Homo sapiens; identical to SEQ ID NO: 25771
  SIMILAR (3178)..(3891): 961254mologous to Cloning vector pBACe3.6 levansucrase,accession number U80929,Smith-Waterman Score=1208.

SEQ ID NO: 28394 - DNA, 1953 bp, Homo sapiens; identical to SEQ ID NO: 25773
  SIMILAR (1170)..(1193): 1001254mologous to Cloning vector pSacBII SacB,accession number U09128,Smith-Waterman Score=42.

SEQ ID NO: 28395 - DNA, 2233 bp, Homo sapiens; identical to SEQ ID NO: 25776
  SIMILAR (1639)..(1764): 921254mologous to Cloning vector pSacBII SacB,accession number U09128,Smith-Waterman Score=213.
  misc_feature (1)...(2233): n = a,t,c or g

SEQ ID NO: 28396 - DNA, 2236 bp, Homo sapiens
  SIMILAR (1867)..(1187): 951254mologous to Cloning vector pZC320 SopA,accession number U26464,Smith-Waterman Score=1121.
taaatagttccgctttcgatatcgtcaggctcagatgcatcaccaaacacggtccggctgacggttcactaattaacctggcaacttcatcgcgatgcagcgctcgctgaagagagcgttgcaatatgtcggattcggttccattgtcataaataactcggagtcgacgggtaccgagctcgaattcgtaatcatggtcatagctgtttcctgtcgtgccagctgcattaatgaatcggccaacgcgcggggagaggcggtttgcgtattgggcgccagggtggtttttcttttcaccagtgagacgggcaacagctgattgcccttcaccgcctggccctgagagagttgcagcaagcggtccacgctggtttgccccagcaggcgaaaatcctgtttgatggtggttccgaaatcggcaaaatcccttataaatcaaaagaatagcccgagatagggttgagtggtgttccagtttggaccaagatccactattaaagaacgtggactccaacgtcaaaggcgaaaaaccgtctatcagggcgatggcccacgcctggccctgagagagttgcagcaagcggtccacgctggtttgccccagcaggcgaaaatcctgtttgatggtggttccgaaatcggcaaaatcccgccggcttatgcgcggtacgggccgtgcaactcgtgcttgaagccctgtgggggactctaaagaccccccattatcctgagaataaatgccttggcctttatatggaaatgtggaactgagtggatatgctgtttttgtcttgacccacgtgtaaagactgaataattcaacctttgtgagaaacatgctgatgttgactattgtgttctgatatgacagcccagcttcagctatcaaaagggaagatacttccatttcaccaacattgtttccaacattgtctcctgtgtctgcagttactgaggactggcaaataacttttaactccattgcccgctttccagtcgggaaacctgtcgtgccagctgcattaatgaatcggccaacgcgcggggagaggcggtttgcgtattgggcgccagggtggtttttcttttcaccagtgagacgggcaacagctgattgcccttcaccgcctggccctgagagagttgcagcaagcggtccacgctggtttgccccagcaggcgaaaatcctttaccaacttcatccgtttcacgtacaacattttttagaaccatgcttccccaggcatcccgaatttgctcctccatccacggggactgagagccattactattgctgtatttggtaagcaaaatacgtacatcaggctcgaaccctttaagatcaacgttcttgagcagatcacgaagcatatcgaaaaactgcagtgcggaggtgtagtcaaacaactcagcaggcgtgggaacaatcagcacatcagcagcacatacgacattaatcgtgccgatacccaggttaggcgcgctgtcaataactatgacatcatagtcatgagcaacagtttcaatggccagtcggagcatcaggtgtggatcggtgggcagtttaccttcatcaaatttgcccattaactcagtttcaatacggtgcagagccagacaggaaggaataatgtcaagccccggccagcaagtgggctttattgcataagtgacatcgtccttttccccaagatagaaaggcaggagagtgtcttctgcatgaatatgaagatctggtacccatccgtgatacattgaggctgttccctgggggtcgttaccttccacgagcaaaacacgtagccccttcagagccagatccgcctggccctgagagagttgcagcaagcggtccacgctggtttgccccagcaggcgaaaatcctgtttgatggtggttccgaaatcggcaaaatcctgcccgctttccagtcgggaaacctgtcgtgccagctgcattaatgaatcggccaacgcgcggggagaggcggtttgcgtattgggcgccagggtggtttttcttttcaccagtgagacgggcaacagctgattgcccttcaccgcctggccctgagagagttgcagcaagcggtccacgctggtttgccccagcaggcgaaaatcctgtttgatggtggttccgaaatcggcaaaatcccctccaacaactggttcatatgggcttgccacgaccgctggataagaagaattttcaggaaccttagggcttgacat

SEQ ID NO: 28397 - DNA, 1938 bp, Homo sapiens; identical to SEQ ID NO: 25778
  SIMILAR (802)..(1269): 921254mologous to Cloning vector pSacBII SacB,accession number U09128,Smith-Waterman Score=759.

SEQ ID NO: 28398 - DNA, 2370 bp, Homo sapiens; identical to SEQ ID NO: 4937
  SIMILAR (952)..(2367): 1001254mologous to Cloning vector pBACe3.6 levansucrase,accession number U80929,Smith-Waterman Score=2482.

SEQ ID NO: 28399 - DNA, 20974 bp, Homo sapiens
  SIMILAR (7)..(387): 1001254mologous to Bacillus amyloliquefaciens precursor (AA - 29 to 443),accession number X52988,Smith-Waterman Score=664.
  misc_feature (1)...(20974): n = a,t,c or g
atgaacatgaacatcaaaaaaattgtaaaacaagccacagttctgacttttacgactgcacttctggcaggaggagcgactcaagccttcgcgaaagaaaataaccaaaaagcatacaaagaaacgtacggcgtctctcatattacacgccatgatatgctgcagatccctaaacagcagcaaaacgaaaaataccaagtgcctcaattcgatcaatcaacgattaaaaatattgagtctgcaaaaggacttgatgtgtgggacagctggccgctgcaaaacgctgacggaacagtagctgaatacaacggctatcacgttgtgtttgctcttgcgggaagcccgaaagacgctgatgacacatcaatctacatgttttatcaaaagggattttgccgatttcggaaccaccatcaaacaggattttcgcctgctggggcaaaccagcgtggaccgcttgctgcaactctctcagggccaggcggtgaagggcaatcagctgttgcccgtctcactggtgaaaagaaaaaccaccctggcgcccaatacgcaaaccgcctctccccgcgcgttggccgattcattaatgcagctggcacgacaggtttcccgactggaaagcgggcagtgagcgcaacgcaattaataaccagtgccaaaagagaaaagaagaagaggggacagacaagaacaccaacaaccatgcaggaacaccgagggcacggccctgagggtgtgggccgcacgggatcaaactctttaaccggccctgacgagccgctgaacaaaacagggcttgtgctgcaaatgggtcttgatccaaacgatgtgacaaacaattactctcacttcgcagtgccgcaagccaaaggcaacaataaaaaaatcacaagaaacatgacaaacagaggcttcttcgaggataaaaaggcaacatttgcgccaagcttcttaatgaacatcaaaggcaataaaacatccgttgtcaaaaacagcatcctggagcaaaacactggggttgggggcggggtgccggagaggggggccaacggccctgaaaagacgggtgattccgcccctgggccgtgggaagaccgcggttctttgaatagtggactccttgttccagagactggacaaaaccaccgaaccctatcccggggctattctgtggaaataataagggattatgcccgatttcggaaccaccatcaaacaggattttcgcctgcgggggcaaaccagcgtggaccgcttgctgcaactctctcagggccaggcggtgaagggcaatcagctgttgcccgtctcactggtgaaaagaaaaaccaccctggcgcccaatacgcaaaccgcctctccccgcgcgttggccgattcattaatgcagctggcacgacaggtttcccgactggaaagcgggcaggattttgccgatttcggaaccaccatcaaacaggattttcgcctgctggggcaaaccagcgtggaccgcttgctgcaactctctcagggccaggcggtgaagggcaatcagctgttgcccgtctcactggtgaaaagaaaaaccaccctggcgcccaatacgcaaaccgcctctccccgcgcgttggccgattcattaatgcagctggcacgacagtgcttggaaccgaggccattatcaccggtgttcttcgtcccgttgatgttcgaattccaaggaaagtgagggccagaggagaggttgctcacaacacaagagccaacagcccaaccgggagagttccaaaaaggagaaaaaagcaagggattttgccgatttcggaaccaccatcaaacaggattttcgcctgctggggcaaaccagcgtggaccgcttgctgcaactctctcagggccaggcggtgaagggcaatcagctgttgcccgtctcactggtgaaaagaaaaaccaccctggcgcccaatacgcaaaccgcctctccccgcgcgttggccgattcattaatgcagctggcacgacaggtttcccgactggaaagcgggcagtgagcgcaacgcaattaatggattttgccgatttcggaaccaccatcaaacaggattttcgcctgctggggcaaaccagcgtggaccgcttgctgcaactctctcagggccaggcggtgaagggcaatcagctgttgcccgtctcactggtgaaaagaaaaaccaccctggcgcccaatacgcaaaccgcctctccccgcgcgttggccgattcattaatgcagctggcacgacaggtttcccgactggaaagcgggcaggattttgccgatttcggaaccaccatcaaacaggattttcgcctgctggggcaaaccagcgtggaccgcttgctgcaactctctcagggccaggcggtgaagggcaatcagctgttgcccgtctcactggtgaaaagaaaaaccaccctggcgcccaatacgcaaaccgcctctccccgcgcgttggccgattcattaatgcagctggcacgacaggtttcccgactggaaagcgggcaggattttgccgatttcggaaccaccatcaaacaggattttcgcctgctggggcaaaccagcgtggaccgcttgctgcaactctctcagggccaggcggaaacagctatgaccatgattacgaattcgagctcggtacccgaacatccctatatggtctgcggcaagtcgtgcctggcgggcgatattttcggcgatttccgttcgacaaggagtgaaggtcggcgaccgctctcttccaggatcggccggcacagattcctcaacctcaactatgcatgtaaaggctcgtgggatctctacagtagacctggtgtcagcacgaaaggctcccctaaagttcaccctttagatttaaacatggactcttgttccaaactggaacaacactcaaccctatctcgggctattcttttgatttataagggattttgccgatttcggaaccaccatcaaacaggattttcgcctgctggggcaaaccagcgtggaccgcttgctgcaactctctcagggccaggcggtgaagggcaatcagctgttgcccgtctcactggtgaaaagaaaaaccaccctggcgcccaatacgcaaaccgcctctccccgcgcgttggccgattcattaatgcagctggcacgacaggtttcccgactggaaagcgggcagtgagcgcaacgcaattaattgagtctgcaaaaggacttgatgtgtgggacagctgcccgctgcaaaacgctgacggaacagtagctgaatacaacggctatcacgttgtgtttgctcttgcgggaagcccgaaagacgctgatgacacatcaatctacatgttttatcaaaaggtcggcgacaactcaatcgacagctggaaaaacgcgggccgtgtctttaaagacagcgataagttcgacgccaacgatccgatcctgaaagatcagacgcaagaatggtccggttctgcaacctttacatctgacggaaaaatccgtttattctacactgactattccggtaaacattacggcaaacaaagcctgacaacagcgcagggattttgccgatttcggaaccaccatcaaacaggattttcgcctgctggggcaaaccagcgtggaccgcttgctgcaactctctcagggccaggcggtgaagggcaatcagctgttgcccgtctcactggtgaaaagaaaaaccaccctggcgcccaatacgcaaaccgcctctccccgcgcgttggccgattcattaatgcagctggcacgacaggtttcccgactggaaagcgggcagtgagcgcaacgcaattaatgggattttgccgttttcgaaaccaccatcaaacaggattttcgcttgctggggcaaaccagcgtggaccgcttgctgcaactctctcagggccaggcggtgaagggcaatcagctgttgcccgtctcactggtgaaaagaaaaaccaccctggcgcccaatacgcaaaccgcctctccccgcgcgttggccgattcattaatgcagctggcacgacaggtttcccgactggaaagcgggcagagcgcccccccggagccccgccccaaggacagaacggaaagacaaagcaaacacagggaggagggaaaaaagggaacgggcccaaccaaggggacagagtagaccctgagcccgaaaaggacagaaccaacgccagagagaaaaaaccaggaagaaacacggccagaacaaaaacagaaagggccaagagggggggagggccggagaaaaccgggccgaacgcccaaaagggggtagagagaataggagggtcggagcagccaaagcccgggggaagtttcaacagcaaggacccaaagggagccaagatggacaacctcttcgcccccggacatttagcaatgtctggacatatttttggttgtcacaacttaggggcaggtgggaagagtgcagtactcacagctctcatagtcggtcttggtggaagagcagttgctactaatagaggatcctctttaaaaggttttgtgaaagatggacagaaggtttccgatttaagtggttttacggcccccctggacccccaaaaaaactttaattgggtgatggttccggtagtgggcccatcgcccctgatagacggtttttcgcccttttcacgttggagtccacgttcttttaatagtggactcttgttccaaactggaacaacactcaaccctatctcgggctattcttttgatttataagggattttgccgatttcggaaccaccatcaaacaggattttcgcctgctggggcaaaccagcgtggaccgcttgctgcaactctctcagggccaggcggtgaagggcaatcagctgttgcccgtctcactggtgaaaagaaaaaccaccctggcgcccaatacgcaaaccgcctctccccgcgcgttggccgattcattaatgcagctggcacgacaggtttcccgactggaaagcgggcagtgagcgcaacgcaattaatggattttgccgatttcggaaccaccatcaaacaggattttcgcctgctggggcaaaccagcgtggaccgcttgctgcaactctctcagggccaggcggtgaagggcaatcagctgttgcccgtctcactggtgaaaagaaaaaccaccctggcgcccaatacgcaaaccgcctctccccgcgcgttggccgattcattaatgcagctggcacgacaggtttcccgactggaaagcgggcagggaggtgaagattccccaaaccgattttttgacggcggacgaaaaaaacaaatcagaacggtccgccagtttatcgatgaaggcaataatacaccggcggacacccaaacgctgagagaccctcactacgttgaagacaaaggccataaataccttgtattcgaagccaacacgggaacagaaaacggataccaaggcgaagaatctttatttaacaaagcgtactacggcggcggcacgaacttcttccgtaaagaaagccagaagcttcagcagagcgctaaaaaacgcgatgctgagttagcgaacggcgccctcggtatcatagagttaaataatgattacacattgaaaaaagtaatgaagccgctgatcacttcaaacacggtaactgatgaaatcgagcgcgcgaatgttttcaaaatgaacggcaaatggtacttgttcactgattcacgcggttcaaaaatgacgatcgatggtattaactcaaacgatatttacatgcttggttatgtatcaaactctttaaccggcccttacaagccgctgaacaaaacagggcttgtgctgcaaatgggtcttgatccaaacgatgtgacattcacttactctcacttcgcagtgccgcaagccaaaggcaacaatgtggttatcacaagctacatgacaaacagaggcttcttcgaggataaaaaggcaacattgggggattttgccgatttcggaaccaccatcaaacaggattttcgcctgctggggcaaaccagcgtggaccgcttgctgcaactctctcagggccaggcggtgaagggcaatcagctgttgcccgtctcactggtgaaaagaaaaaccaccctggcgcccaatacgcaaaccgcctctccccgcgcgttggccgattcattaatgcagctggcacgacaggtttcccgactggaaagcgggcaggattttgccgatttcggaaccaccatcaaacaggattttcgcctgctggggcaaaccagcgtggaccgcttgctgcaactctctcagggccaggcggtgaagggcaatcagctgttgcccgtctcactggtgaaaagaaaaaccaccctggcgcccaatacgcaaaccgcctctccccgcgcgttggccgattcattaatgcagctggcacgacaggtttcccgactggaaagcgggcaggattttgccgatttcggaaccaccatcaaacaggattttcgcctgctggggcaaaccagcgtggaccgcttgctgcaactctctcagggccaggcggtgaagggcaatcagctgttgcccgtctcactggtgaaaagaaaaaccaccctggcgcccaatacgcaaaccgcctctccccgcgcgttggccgattcattaatgcagctggcacgacaggtttcccgactggaaagcgggcaggattttgccgatttcggaaccaccatcaaacaggattttcgcctgctggggcaaaccagcgtggaccgcttgctgcaactctctcagggccaggcggtgaagggcaatcagctgttgcccgtctcactggtgaaaagaaaaaccaccctggcgcccaatacgcaaaccgcctctccccgcgcgttggccgattcattaatgcagctggcacgacaggtttcccgactggaaagcgggcaggattttgccgatttgggaaccaccatcaaacaggattttcgcctgctggggcaaaccagcgtggaccgcttgctgcaactctctcagggccaggcggtgaagggcaatcagctgttgcccgtctcactggtgaaaagaaaaaccaccctggcgcccaatacgcaaaccgcctctccccgcgcgttggccgattcattaatgcagctggcacgacaggtttcccgactggaaagcgggcagtttcccatgaaatataagcctttcaagggcttcaaggaatccaaggtttgcacttccaggcatttccaggcttattctgctggaactctaattcctccatcctttcctaactgccacatctgggattttgccgatttcggaaccaccatcaaacaggattttcgcctgctggggcaaaccagcgtggaccgcttgctgcaactctctcagggccaggcggtgaagggcaatcagctgttgcccgtctcactggtgaaaagaaaaaccaccctggcgcccaatacgcaaaccgcctctccccgcgcgttggccgattcattaatgcagctggcacgacaggtttcccgactggaaagcgggcaaaaatttcgtaacggacaccagtgcgcccgaaggggggattggttaattgcgcgcgagggagaaaaggctcgcggaaaggccaatacttggctggtacgtggcggggatgtgaagtttactcttgaagtgctccggggtgaaagtgttaagaagacctttcgggtaaggccaggtaatgaacgtgaccaggagctgcttactgaggacgcactggatgatctcatcccttcttttctactgactggtcatcagacaccggcgttcggtcgaagagtatctggtgtcatagaaattgccgatgggagtcgccgtcgtaaagctgctgcacttaccgaaagtgattatcgtgttctggttggcgagctggatgatgagcagatggctgcattatccagattgggtaacgattatcgcccaacaagtgcttatgaacgtggtcagcgttatgcaagccgattgcagaatgaatttgctggaaatatttctgcgctggctgatgcggaaaatatttcacgtaagattattacccgctgtatcaacaccgccaaattgcctaaatcagttgttgctcttttttctcaccccggtgaactatctgcccggtcagggatttgccggatttcggaacccaccatcaaacaggattttcgcctgctggggcaaaccagcgtggaccgcttgctgcaactctctcagggccaggcggtgaagggcaatcagctgttgcccgtctcactggtgaaaagaaaaaccaccctggcgcccaatacgcaaaccgcctctccccgcgcgttggccgattcattaatgcagctggcacgacaggtttcccgactggaaagcgggcaggattttgccgatttcggaaccaccatcaaacaggattttcgcctgctggggcaaaccagcgtggaccgcttgctgcaactctctcagggccaggcggtgaagggcaatcagctgttgcccgtctcactggtgaaaagaaaaaccaccctggcgcccaatacgcaaaccgcctctccccgcgcgttggccgattcattaatgcagctggcacgacaggtttcccgactggaaagcgggcagtatcccaagggttactttgtccagaacacagactttgacttcttcaactatgcgggactgcagcggtctgtgcttctgtacacgacacctaccacctacatcgatgacatcaccatcaccaccggcgtggagcatgacagtgctgaatctctttgccttgaataccagggtccacctctgatgttcactgaagagtaccagaagagtctgccagagcagtaccatctgggtctggatcaaaaacgcagaaaatacgtggttggagagcttatcgggaattctgccgatttcacgactatgcagtacgctgatgacacatcaatctacatgttttatcaaaaggtcggcgacaattcatatgaccagctggaaaaacgcggggccgtgtctttaagaccagcgataagtttgacggccaacgatccgatcctgaaagatcagacgcaagaatggtccggttctgcaacctttacatctgacggaaaaatccgtttattctacactgactattccgggaaacattacggcaaacaaagcctgacaacagcgcaggtaaatgtgtcaaaatctgatgacacactcaaaatcaacggagtggaagatcacaaaacgatttttgacggagacggaaaaacatatcagaacgttcagcagtttatcgatgaaggcaattatacatccggcgacaaccatacgctgagagaccctcactacgttgaagacaaaggccataaataccttgtattcgaagccaacacgggaacagaaaacggataccaaggcgaagaatctttatttaacaaagcgtactacggcggcggcacgaacttcttccgtaaagaaagccagaagcttcagcagagcgctaaaaaacgcgatgctgagttagcgaacggcgccctcggtatcatagagttaaataatgattacacattgaaaaaagtaatgaagccgctgatcacttcaaacacggtaactgatgaaatcgagcgcgcgaatgttttcaaaatgaacggcaaatggtacttgttcactgattcacgcggttcaaaaatgacgatcgatgggtgtggtgtggacggtgtgtcccaggaacagggtgtggtgtggacggtgtgtcccacgaacagggtgtggtgtggacggtgtgtcccacgaacagggtgtggtgtggacggtgtgtcccacgaacaggaaagtggcagctttaccaagccgatgcagaaaaatttgctgcaaaattttgcgctgggcgatcgaaaaatatttcacgtaagattattacccgctgaatcaacaccgccaaattgcttaaatcagttgttgctctttatcgtcaccccggtgaactatctgcccggtcaggctttgcagaactttcagcggtataccggcatacagcatgtgcatcgcataggaatggcggaacgtatgtggtgtgaccggaacagagaacgtcacaccgtcagcagcagcggcggcaaccgcctccccaatccaggtcctgaccgttctattcatcatggaaggctgcagtacaagtttgactgtggaagtggccctggaattgtctctgttcagagcattcaggtcaatgatgggcagtggcacgcagtggccctggaagtgaatggaaactatgctcgcttggttctagaccaagttcatactgcatcgggcacagccccagggactctgaaaaccctgaacctggataactatgtgtttttggtggccacatccgtcagcagggaacaaggcatggaagaagtcctcaagttgaacgttcagcagtttatcgatgaaggcaattatacatccggcgacaaccatacgctgagagaccctcactacgttgaagacaaaggccataaataccttgtattcgaagccaacacgggaacagaaaacggataccaaggcgaagaatctttatttaacaaagcgtactacggcggcggcacgaacttcttccgtaaagaaagccagaagcttcagcagagcgctaaaaaacgcgatgctgagttagcgaacggcgccctcggtatcatagagttaaataatgattacacattgaaaaaagtaatgaagccgctgatcacttcaaacacggtaactgatgaaatcgagcgcgcgaatgttttcaaaatgaacggcaaatggtacttgttcactgattcacgcggttcaaaaatgacgatcgatggtattaactcaaacgatatttacatgcttggttatgtatcaaactctttaaccggcccttacaagccgctgaacaaaacagggcttgtgctgcaaatgggtcttgatccaaacgatgtgacattcacttactctcacttcgcagtgccgcaagccaaaggcaacaatgtggttatcacaagctacatgacaaacagaggcttcttcgaggataaaaaggcaacatttgcgccaagcttcttaatgaacatcaaaggcaataaaacatccgttgtcaaaaacagcatcctggagcaaggacagctgacagtcgggggccaaccccttcgcccagtgaaaaaccgcggccgggtctttaaaaacagcgatagttcgacgcccaacgatccgatcctgaaagatcagacgcaagaatggtccggttctgcaacctttacctctgagggaaaaatccgtttattctacactgactattccggtaaacattccggcaaacaaagcttgacaacagcgcaggtaaatgtgtcaaaatctgatgacacactcaaaatcaacggagtggaagatcacaaaacgatttttgacggagacggaaaaacatatcagaacgttcagcagtttatcgatgaaggcaattatacatccggcgacaaccatacgctgagagaccctcactacgttgaagacaaaggccataaataccttgtattcgaagccaacacgggaacagaaaacggataccaaggcgaagaatctttatttaacaaagcgtactacggcggcggcacgaacttcttccgtaaagaaagccagaagcttcagcagagcgctaaaaaacgcgatgctgagttagcgaacggcgccctcggtatcatagagttaaataatgattacacattgaaaaaagtaatgaagccgctgatcacttcaaacacggtaactgatgaaatcgagcgcgcgaatgttttcaaaatgaacggcaaatgcagtggcagtgtggacgtgtgtggactgtggcaaggtgctagccagcgccggggtgccagcctccatgcaggcatttgcagcagctgggtggcagcatggctggaggagggcagggggtccctgcaaggaatagaattgggcactcatgggggcagtctgctgttctccatgcttagttttgggcaggcagcagtgtcggcggcaggggctggtggtctcattgctgccagtgctcctatgacagtggtggtttactctagaggatccccgatcctgaaagatcagacgcaagaatggtccggttctgcaacctttacatctgacggaaaaatccgtttattctacactgactattccggtaaacattacggcaaacaaagcctgacaacagcgcaggtaaatgtgtcaaaatctgatgacacactcaaaatcaacggagtggaagatcacaaaacgatttttgacggagacggaaaaacatatcagaacgttcagcagtttatcgatgaaggcaattatacatccggcgacaaccatacgctgagagaccctcactacgttgaagacaaaggccataaataccttgtattcgaagccaacacgggaacagaaaacggataccaaggcgaagaatctttatttaacaaagcgtactacggcggcggcacgaacttcttccgtaaagaaagccagaagcttcagcagagcgctaaaaaacgcgatgctgagttagcgaacggcgccctcggtatcatagagttaaataatgattacacattgaaaaaagtaatgaagccgctgatcacttcaaacacggtaactgatgaaatcgagcgcgcgaatgttttcaaaatgaacggcaaatggtacttgttcactgattcacgcggttcaaaaatgacgatcgatggtattaactcaaacgatatttacatgcttggttatgtatcaaactctttaaccggcccttacaagccgctgaacaaaacaggggatcctctagagtcgacctgcaggcatgcaagcttggtgggattttgccgatttcggaaccaccatcaaacaggattttcgcctgctggggcaaaccagcgtggaccgcttgctgcaactctctcagggccaggcggtgaagggcaatcagctgttgcccgtctcactggtgaaaagaaaaaccaccctggcgcccaatacgcaaaccgcctctccccgcgcgttggccgattcattaatgcagctggcacgacaggtttcccgactggaaagcgggcagtgagcgcaacgcaattaatggattttgccgatttcggaaccaccatcaaacaggattttcgcctgctggggcaaaccagcgtggaccgcttgctgcaactctctcagggccaggcggtgaagggcaatcagctgttgcccgtctcactggtgaaaagaaaaaccaccctggcgcccaatacgcaaaccgcctctccccgcgcgttggccgattcattaatgcagctggcacgacaggtttcccgactggaaagcgggcagatttttgccgatttcgcaaccaccatcaaacagatttttcgcctgctggggcaaaccagcgtggaccgcttgctgcaactctctcagggccaggcggaaacagctatgaccatgattacgaattcgagctcggtacccccatcggatggccaacgaagcgtgcgtcgatgccgtgcttggcatagatcgggggttccatcgggaacaggcacagcaccaggcccagaccgaggggctcacgtaatgcacggtcggcacgccgcgctgcttcagccagcgttcgatgcccaggttgaagtcgggcgcgtcgatgccgatgaacacgtccggctgccattccagtgcacgctggcgaaacgcggaacgcagtttcagcaggcgtggcagacgtttcagcagtttatcgatgaaggcaattatacatccggcgacaaccatacgctgagagaccctcactacgttgaagacaaaggccataaataccttgtattcgaagccaacacgggaacagaaaacggataccaaggcgaagaatctttatttaacaaagcgtactacggcggcggcacgaacttcttccgtaaagaaagccagaagcttcagcagagcgctaaaaaacgcgatgctgagttagcgaacggcgccctcggtatcatagagttaaataatgattacacattgaaaaaagtaatgaagccgctgatcacttcaaacacggtaactgatgaaatcgagcgcgcgaatgttttcaaaatgaacggcaaatggtacttgttcactgattcacgcggttcaaaaatgacgatcgatggtattaactcaaacgatatttacatgcttggttatgtatcaaactctttaaccggcccttacaagccgctgaacaaaacagggcttgtgctgcaaatgggtcttgatccaaacgatgtgacattcacttactctcacttcgcagtgccgcaagccaaaggcaacaatggggnagaatccccattgcgacgtgctgaagacgtatttccaccggtgatcggggttgctgcccataaaggtggcgtttacaaaacctcagtttctgttcatcttgctcaggatctggctctgaaggggctacgtgttttgctcgtggaaggtaacgacccccagggaacagcctcaatgtatcacggatgggtaccagatcttcatattcatgcagaagacactctcctgcctttctatcttggggaaaaggacgatgtcacttatgcaataaagcccacttgctggccggggcttgacattattccttcctgtctggctctgcaccgtattgaaactgagttaatgggcaaatttgatgaaggtaaactgcccaccgatccacacctgatgctccgactggccattgaaactgttgctcatgactatgatgtcatagttattgacagcgcgcctaacctgggtatcggcacgattaatgtcgtatgtgctgctgatgtgctgattgttcccacgcctgctgagttgtttgactacacctccgcactgcagtttttcagatatgcttctgtgatctgctcaagaacgttgatcttaaagggttcgagcctgatgggaaggcaaacagaagagaattcagcaactgccactttgaaacaattttggggcaagacatgaagattcacaaaatgcagtttctagaagcggctggaatcgcctacatcacctccctctacttcgcactcagcagcctcaccagcgtgggctttggcaacgtgtccgccaacacggacaccgagaagatcttctccatctgcaccatgctcatcggcgccctgatgcacgcggtggtgtttgggaacgtgacggccatcatccagcgcatgtacgcccgccgctttctgtaccacagccgcacgcgcgacctgcgcgactacatccgcatccaccgtatccccaagcccctcaagcagcgcatgctggagtacttccaggccacctgggcggtgaacaatggcatcgacaccaccgagctgctgcagagcctccctgacgagctgcgcgcagacatcgccatgcacctgcacaaggaggtcctgcagctgccactgtttgaggcggccagccgcggctgcctgcgggcactgtctctggccctgcggcccgccttctgcacgccgggcgagtacctcatccaccaaggcgatgccctgcaggccctctactttgtctgctctggctccatggaggtgctcaagggtggcaccgtgctcgcctcctanatggtgcacacgcttgccagcaacggggccaactccatctgggagcactccctgctggaccccgcacaagtgcagagcggccggcgtaaagccaacccccaagacaaagtccagaacagagaactaatggaagaacagactaagcagtctattaccgcacctcaacttcgattctccgctcgttgtaaacataagaaccagttggctataactttacggaaacgaaatcgcaaacttgctactagtctgttctcatcaacccatattcgcatctctggcaccagtgtaattattagcgggaagggcgacctgatcggctgtgagctgccccggcgggagcaggtggtaaaggccaatgccgacgtgaaggggctgacgtactgcgtcctgcagtgtctgcagctggctggcctgcacgacagccttgcgctgtaccccgagtttgccccgcgcttcagtcgtggcctccgaggggagctcagctacaacctgggtgctgggggaggctctgcagagcgtaacggctggagccccacaggacgtttcaacctgtggtttgttctggctgcttacaaagcagcacagctgccaccgcaggagtatcactggctttctgggcctgattctcaggggctgctagattcatccctgatggcatcaggcactgccagccgctcagaggatgaggagtcactggcagggcagaagcgagcctcctcccaggccttgggcaccatccctaaacggagaagctcctccaggttcatcaagaggaagaagttcgatgatgagctggtggagagcagcctggcaaaatcttctacccgggcaaagggggccagtggggtggaaccagggcgctgttcggggagtgaaccctcctccagtgagaagaagaagggtttcaacctggttaacgattcatcaggattcatttttgatttgcagtccaataccgtactggcccagggaggagcttttgagaacatgaaagagaagctccagctggagtggaacgttcacctgaacatccctgaggtcacctcgccaaagccaaagaaatgcaagttgcctgcagcctcaccccggcacatccgccccagtggccccacctacaagcagccctttctgtctaggcaccgggcatgtgtgcccctgcagatggcccgtgtgtgggcttcagggactagcctgaccagtgcatttcaaactatgcgacggaaagactctgaggacccacacctgaaaacttataacctttctaccctgagcatcgatttggcatctgccgttggatgttcgagcaacagtgttgtgtcgccggccaaaaagggtcaagtgccccggcgcgtggcggaaggacgagccacaggacgagaacttcgtgcggacggcaaggacatcaacccggaaaaggccctcttggcttggatttcaatgaaggtgccgcaggcgtgtcccgttcggaacagcaacagccacagtggcagtggcagcaacagttgcgtggccgctttcagcgctttcattgttcgacttaagacccacacgggatctaccgcccgcccgcggggaccgctggtagaaacaggccagaggaagcaggtaaagtctgataagaagattgggttaggaacaatatttgataagcctactttgcttcgcaagtacctggttggcagccaaggcacgtgtagattcactgtggggactgctgaagccctggggctgaggtttctcattcatctggcaatccacaatcaagatgagaagcaggaaagggccaggaagataaatgcggtacgtgcaatagttcctaataagagcaacaatgaaattatcctggttttgcagcactttgataactgtgtggacaaaacagtacaagcattcatggaagtgatgaggctacgagtagaagtttcggctcttaaaaggcgtagacacaggaaaaaagaggagatggcccaaagcgaagggagagggcggcatttggtcggttacaaggccatgaccatctctgactgttactacttatactcctacaacctccacctctacaagccccgcagtcaaattagtgacttcatcagtctgccggccgagcaggctcagattcgatttgagattcacttaagccgctcattaatcaaactccgagcccaaggtatcgggaccaaagcacagaactctgctgcagcggtgagcccagcttattgccttcagctgggctgcccggccttccacttccggcgcggaagttggcgtcacgtcatggcgcgcctcggtggcgtcagagcggcgtcgggcctggcgggaaagtcgaaaactacgggcggcgacggcttctcggtagcagggaatccaatggccccagacttctctttgaactcatttgctccacccttcgccaatggccttccccggaacgttctccaggatcctccagagagccccaaagctttctccctcccttcactcaggctgctgctcaaatgtcacctccttagaaaagcccaccctgacagcccatctgaggaacaagatcatggtgttggccggacaggaacagttaatagtgttggaagtaatcaatccattcccagcatgtccatcagtgccagcagccaaagcagtagtgttaacagtcttccagatgtctcagatgacaagaattgtccccgtgtgaaaacaggtatttttcttctccaaaataaagctagtatcccatatggacgcttttctcaaggtggctcagactgccagatccaacaatttctccgcggcgacggtagcagccgcagggccaaagccggcttccgtgaggtacgtctacttccggttaacgaaccagggggctggcaatctcttccggttcgtcttggcaacgtgtgtgaagggggcgtggccatgtcagacctcttccaggacgatctgtacccggatacgccaggcccggagccggccctagaagcggacgaatggctatccggccaggacgccgaacccgtgctcatttcgctgagggacggctatgtgccccccaagcaccgcgagctccgggtcacgaagcgcaacatcctggacgtgcgcccgccctccggcccccgccgcagccagtcggccagcgacgcccccttgtcggtaagatcggccctgctgcactctggcccaatctacatctcccccaaccgcccctatacgacacggcctctctgtcctccgccccagcagcagcacaccctggagacgctgctggaagagatcaagcccctccgcgagcgggtgcaggcccaggagcagcgcatcacggctctggagaacatgctgtgcgagctggtggacggcccgcactacccccgtgcgccaggcagggcgagcgggctacctactgatcctttcggtggagctgtgcgccgtgcctgcccggtgccacctcctctcgtgcccctggcccgtgctgtgcgaaccttgcccctccgctacgcttcgtcgatagccgcactagtggtcggngcatccctaaacagcagcaaaacggaaaataccaagtgcctcaattcgatcaatcaacgattaaaaaatatgagtcttgcaaaggacttgatgtgtgggacagcttgtcgctgcaaaacgctgtacggaacaatagctgaatacaacgggtatcacgtacttcatcaagttcacagtctgattaatcgctcgccgccggagctgatgaaggagataatcctggtggacgatcacagtgaccgcgaatatttgggaaaggagctggagacctatatagcggaacactttaagtgggtgcgcgtggtgaggctgccaaggcgcacgggactgattggtgcccgagcggcgggcgcaaggaatgccactgcagaggtgctcatcttcctcgattcccacgtggaggccaactacaattggttgccaccgttgctggagccgattgccctgaacaaacggacggcggtgtgtccctttatcgatgtgattgaccacaccaacttccactaccgggcgcaggatgagggagcccgaggagcgttcgactgggagttcttttacaagcgcctgccattgctgccagaggatctaaagcatccggccgatccgttcaagagtcccatcatggctggcggtctatttgccatttctagggagttcttctgggaactgggcggctacgacgagggcctggacatctggggcggagaacagtatgagctaagcttcaagatctggatgtgtggtggtgaaatgtacgatgcgccctgctcccgcattgggcatatctatcgcggacctcgcaaccatcagccgagtcccaggaagggcgattacctgcacaagctgccttctagcttagagtgcgtttttattgccaaagaagaagattgcctaaggttgcaagggtcagaactaatcagctgccaatccattggttttaggtcaagatctgacacctgtaaagttgaacagggacaaccagcaacatcagctgcaatttcagtcaaagaaattgtcactgaaattgagtccatcagtcaaggagttgggcagattcaactgaaaggagacatcttacccaacccatgccatacaccaaagaagaacagcatccatgagctgctccttgagagggcccagactccagagaacaaacctggacatatggagcaagatgaggactcctgcacagcccagcctgagctagccaaagactcagggatgtgcaacccagaaggctgcctaaccacacactcatctatagcagacttggaagaaggggaaccagctgagggggaacaagagctccagggctcagggatgcacccaggtgccaagtggtaccctgggtctgtgaggcgagccaccttggagttcgaagagcgcttacggcaggagcaagagcatcatggtgctgccccaacatgtacctcattgtccactcgtaagaattcaaagaatgattcttctgtggcagacctagcaccaaaagggaaaagtgatgaagcccccccagaacattcatttgtcctcaaggaaccagaaatgagcaaaggcaaagggaaatacagtgggtctgaggctggctcactgtcccattctgagcagaatgccactgttccagctcccagggtgctggagtttgaccacttgccagatcatcaggagggcccagggtcagatactggaacacagcaggaaggagtcctgaaggatctgaggactgtgattccataccaggagtctgaaacacaagcagtccctcttccccttcccaagagggtgaggattcatggcaactcgactgacatacctgggaaagacttaaaatttggttga

SEQ ID NO: 28400 - DNA, 20795 bp, Homo sapiens
  SIMILAR (961)..(899): 1001254mologous to Cloning vector pBACe3.6 levansucrase,accession number U80929,Smith-Waterman Score=110.
  misc_feature (1)...(20795): n = a,t,c or g
ctactctagagatccccatggggcgttgccgttggccggtgtctcagcgcactggctgtcgggctggtccccctgggttcgctgctggcgtgcttgttctccgagcactcgccgttcacgtcctctccgttccacactggcctttgctattttctccacgcgggtcttatggatgctgtccgagctgtggagcatctgccctcctggccctcctgcagctcgggctgtgctccaagagaaacgaaaacatgtccacaaaaagacttgtaaagaatgttcaggggtaccgagctcgaattcgtaatcatggtcatagctgtttcccgtgttggcttcgaatacaaggtatttatggcctttgtcttcaacgtagtgagggtctctcagcgtatggttgtcgccggatgtataattgccttcatcgataaactgctgaacgttctgatatgtttttccgtctccgtcaaaaatcgttttgtgatcttccactccgttgattttgagtgtgtcatcagattttgacacatttacctgcgctgttgtcaggctttgtttgccgtaatgtttaccggaatagtcagtgtagaataaacggatttttccgtcagatgtaaaggttgcagaaccggaccattcttgcgtctgatctttcaggatcggatcgttggcgtcgaacttatcgctgtctttaaagacacggcccgcgtttttccagctgtcgattgagttgtcgccgaccttttgataaaacatgtagattgatgtgtcatcagcgtctttcgggcttcccgcaagagcaaacacaacgtgatagccgttgtattcagctactgttccgtcagcgttttgcagcggccagctgtcccacacatcaagtccttttgcagactcaatattttttaatcgttgattgatcgaattgaggcacttggtatttttcgttttgctgctgtttagggattgcccgctttccagtcgggaaacctgtcgtgccagctgcattaatgaatcggccaacgcgcggggagaggcggtttgcgtattgggcgccagggtggtttttcttttcaccagtgagacgggcaacagctgattgcccttcaccgcctggccctgagagagttgcagcaagcggtccacgctggtttgccccagcaggcgaaaaatcctgttgatggtggttccgaaatcggcaaaatccgttttccaaaagtggcacgatattggctctgcgtagaccatggggtgaagtgtgcgtgcagtgaaacctggagtgaccctgaccgctgatacaagcaatggtgtggacgctgcttgcagacacgccgagcacccaagagtgcattcggggtgattccatttatatgatgtttcaaacaggaaacgttcatcaatgcggccggactcggtgatctcgttgagggcccggagcaggtcgccacctagcttcttgacattcctgaggtcatcaagcatggagtaggagaggtccatcagatagtacaggtcgatggggtagcccttggcccgccggaaggtcacgttgaacgctgctgcctggctgtccggatgaggataatcgggccctttagggcggctgctctgtgaattccctgagtgggtgagctcagtacccacgacgcactgcccgccgggcaccactacccctttcacagatgaggaaactgagggctcggggtaaggaagggcctggggcgtctgcccgctttccagtcgggaaacctgtcgtgccagctgcattaatgaatcggccaacgcgcggggagaggcggtttgcgtattgggcgccagggtggtttttcttttcaccagtgagacgggcaacagctgattgcccttcaccgcctggccctgagagagttgcagcaagcggtccacgctggtttgccccagcaggcgaaaatcctgtttgatggtggttccgaaatcggcaaaatcctgcccgctttccagtcgggaaacctgtcgtgccagctgcattaatgaatcggccaacgcgcggggagaggcggtttgcgtattgggcgccagggtggtttttcttttcaccagtgagacgggcaacagctgattgcccttcaccgcctggccctgagagagttgcagcaagcggtccacgctggtttgccccagcaggcgaaaatcctgtttgatggtggttccgaaatcggcaaaatcctgcccgctttccagtcgggaaacctgtcgtgccagctgcattaatgaatcggccaacgcgcggggagaggcggtttgcgtattgggcgccagggtggtttttcttttcaccagtgagacgggcaacagctgattgcccttcaccgcctggccctgagagagttgcagcaagcggtccacgctggtttgccccagcaggcgaaaatcctgtttgatggtggttccgaaatcggcaaaatcctgcccgctttccagtcgggaaacctgtcgtgccagctgcattaatgaatcggccaacgcgcggggagaggcggtttgcgtattgggcgccagggtggtttttcttttcaccagtgagacgggcaacagctgattgcccttcaccgcctggccctgagagagttgcagcaagcggtccacgctggtttgccccagcaggcgaaaatcctgtttgatggtggttccgaaatcggcaaaatcctgcccgctttccagtcgggaaacctgtcgtgccagctgcattaatgaatcggccaacgcgcggggagaggcggtttgcgtattgggcgccagggtggtttttcttttcaccagtgagacgggcaacagctgattgcccttcaccgcctggccctgagagagttgcagcaagcggtccacgctggtttgccccagcaggcgaaaatcctgtttgatggtggttccgaaatcggcaaaatcctgcccgctttccagtcgggaaacctgtcgtgccagctgcattaatgaatcggccaacgcgcggggagaggcggtttgcgtattgggcgccagggtggtttttcttttcaccagtgagacgggcaacagctgattgcccttcaccgcctggccctgagagagttgcagcaagcggtccacgctggtttgccccagcaggcgaaaatcctgtttgatggtggttccgaaatcggcaaaatcctcagcatcgcgttttttagcgctctgctgaagcttctggctttctttacggaagaagttcgtgccgccgccgtagtacgctttgttaaataaagattcttcgccttggtatccgttttctgttcccgtgttggcttcgaatacaaggtatttatggcctttgtcttcaacgtagtgagggtctctcagcgtatggttgtcgccggatgtataattgccttcatcgataaactgctgaacgttctgatatgtttttccgtctccgtcaaaaatcgttttgtgatcttccactccgttgattttgagtgtgtcatcagattttgacacatttacctgcgctgttgtcaggctttgtttgccgtaatgtttaccggaatagtcagtgtagaataaacggatttttccgtcagatgtaaaggttgcagaaccggaccattcttgcgtctgatctttcaggatcggatcgttggcgtcgaacttatcgctgtctttaaagacacggcccgcgtttttccagctgtcgattgagttgtcgccgaccttttgataaaacatgtagattgatgtgtcatcagcgtcttttcggtgcccgctttccagtcgggaaacctgtcgtgccagctgcattaatgaatcggccaacgcgcggggagaggcggtttgcgtattgggcgccagggtggtttttcttttcaccagtgagacgggcaacagctgattgcccttcaccgcctggccctgagagagttgcagcaagcggtccacgctggtttgccccagcaggcgaaaatcctgtttgatggtggttccgaaatcggcaaaatcctgcccgctttccagtcgggaaacctgtcgtgccagctgcattaatgaatcggccaacgcgcggggagaggcggtttgcgtattgggcgccagggtggtttttcttttcaccagtgagacgggcaacagctgattgcccttcaccgcctggccctgagagagttgcagcaagcggtccacgctggtttgccccagcaggcgaaaatcctgtttgatggtggttccgaaatcggcaaaatccgggagcccccgttttaggtcttgccgggaaggccgccaaggttggtccctgcggtggtgattggcgggggtgtgcgtgggcccttgggtgggggggggtgggtggccctgtctttccgcgggggggtggtggttcccgtgtgtccagggcgccgccggggtcggctttatttgcgtacgttttccaggttcttgatctgatgggtaccgagctcgaattcgaatcatggtcatagctgtttcccatttttcagtgtctaccttgtgaaggaagtcagtttgagggttttcggaggaaatgtcatcctcatcatccgatctgtctaagatgtggtccactttgataatttcctttagcaaactcctctcttgggtgatttttcttaatctgcaggcctgagtggcttggtctggtggcggcttattaaaagacttgcctgcccctggagggtcaaactggtaaaggtggcgttggcctggctgctggcccgtgaccccctccgcgtccatggttcttggaaatccttccctgtactctgcgtgcggtggggttttcctagaggtctttttccgctcgtggtggtgttggggcccgggtgggttcgggtgcggcttctccgcgtgggcccgtgtgcgctcgcccagttgcgttcgtgtggtggtgtgtcggtgcccgctttccagtcgggaaacctgtcgtgccagctgcattaatgaatcggccaacgcgcggggagaggcggtttgcgtattgggcgccagggtggtttttcttttcaccagtgagacgggcaacagctgattgcccttcaccgcctggccctgagagagttgcagcaagcggtccacgctggtttgccccagcaggcgaaaatcctgtttgatggtggttccgaaatcggcaaaatccattaattgcgttgcgctcactgcccgctttccagtcgggaaacctgtcgtgccagctgcattaatgaatcggccaacgcgcggggagaggcggtttgcgtattgggcgccagggtggtttttcttttcaccagtgagacgggcaacagctgattgcccttcaccgcctggccctgagaagagttgcagcaagcggtccacgctggttttgccccaccaggcgaaaattcctgttttgagggtgggttccgaaatcggcaaaatcccagtgagacgggcaacagctgattgcccttcaccgcctggccctgagagagttgcagcaagcggtccacgctggtttgccccagcaggcgaaaatcctgtttgatggggtggttccgaaatcggcaaaatcccagtgagacgggcaacagctgattgcccttcaccgcctggccctgagagagttgcagcaagcggtccacgctggtttgccccagcaggcgaaaatcctgtttgatggtggttccgaaatcggcaaaatcctgcccgctttccagtcgggaaacctgtcgtgccagctgcattaatgaatcggccaacgcgcggggagaggcggtttgcgtattgggcgccagggtggtttttcttttcaccagtgagacgggcaacagctgattgcccttcaccgcctggccctgagagagttgcagcaagcggtccacgctggtttgccccagcaggcgaaaatcctgtttgatggtggttccgaaatcggcaaaatcctgcccgctttccagtcgggaaacctgtcgtgccagctgcattaatgaatcggccaacgcgcggggagaggcggtttgcgtattgggcgccagggtggtttttcttttcaccagtgagacgggcaacagctgattgcccttcaccgcctggccctgagagagttgcagcaagcggtccacgctggtttgccccagcaggcgaaaatcctgtttgatggtggttccgaaatcggcaaaatcctgcccgctttccagtcgggaaacctgtcgtgccagctgcattaatgaatcggccaacgcgcggggagaggcggtttgcgtattgggcgccagggtggtttttcttttcaccagtgagacgggcaacagctgattgcccttcaccgcctggccctgagagagttgcagcaagcggtccacgctggtttgccccagcaggcgaaaatcctgtttgatggtggttccgaaatcggcaaaatccgccccgccctgccactcatcgcagtactgttgtaattcattaagcattctgccgacatggaagccatcacaaacggcatgatgaacctgaatcgccagcggcatcagcaccttgtcgccttgcgtataatatttgcccatggtgaaaacgggggcgaagaagttgtccatatgggtaccgagctcgaattcgtaatcatggtcatagctgtttctcaccagctgctggtagagcttagtgttcctttgatcttcttcactctggaagctgtattcctcctttagtttcagatatggagaacaggcttgaaatgttgttttgcaagccagtgagacgggcaacagctgattgcccttcaccgcctggccctgagagagttgcagcaagcggtccacgctggtttgccccagcaggcgaaaatcctgtttgatggtggttccgaaatcggcaaaatcctgcccgctttccagtcgggaaacctgtcgtgccagctgcattaatgaatcggccaacgcgcggggagaggcggtttgcgtattgggcgccagggtggtttttcttttcaccagtgagacgggcaacagctgattgcccttcaccgcctggccctgagagagttgcagcaagcggtccacgctggtttgccccagcaggcgaaaatcctgtttgatggtggttccgaaatcggcaaaatcctgcccgctttccagtcgggaaacctgtcgtgccagctgcattaatgaatcggccaacgcgcggggagaggcggtttgcgtattgggcgccagggtggtttttcttttcaccagtgagacgggcaacagctgattgcccttcaccgcctggccctgagagagttgcagcaagcggtccacgctggtttgccccagcaggcgaaaatcctgtttgatggtggttccgaaatcggcaaaatcctgcccgctttccagtcgggaaacctgtcgtgccagctgcattaatgaatcggccaacgcgcggggagaggcggtttgcgtattgggcgccagggtggtttttcttttcaccagtgagacgggcaacagctgattgcccttcaccgcctggccctgagagagttgcagcaagcggtccacgctggtttgccccagcaggcgaaaatcctgtttgatgggtggttccgaaatcggcaaaatcctgcccgctttccagtcgggaaacctgtcgtgccagctgcattaatgaatcggccaacgcgcggggagaggcggtttgcgtattgggcgccagggtggtttttcttttcaccagtgagacgggcaacagctgattgcccttcaccgactggccctgagagagttggagcaagcggtccacgctggtttgccccaacaggcgaaaatcctgcaggaagcggcggcggaagtcaggcatacgctggtaactttgaggcagctggtaacgctctatgatccagtcgattttcagagagacgatgcctgagccatccggcttacgatactgacacagggattcgtataaacgcatggcatacggattggtgatttcttttgtttcactaagccgaaactgcgtaaaccggttcgctgcaagagcatttctccaggcaccagttgaagagcgttgatcaatggcctgttcaaaaacagttctcatccggatctgacctttaccaacttcatccgtttcacgtacaacattttttagaaccatgcttccccaggcatcccgaatttgctcctccatccacggggactgagagccattactattgctgtatttggtaagcaaaatacgtacatcaggctcgaaccctttaagatcaacgttcttgagcagatcacgaagcatatcgaaaaactgcagtgcggaggtgtagtcaaacaactcagcaggcgtgggaacaatcagcacatcagcagcacatacgacattaatcgtgccgatacccaggttaggcgcgctgtcaataactatgacatcatagtcatgagcaacagtttcaatggccagtcggagcatcaggtgtggatcggtgggcagtttaccttcatcaaatttgcccattaactcagtttcaatacggtgcaaagccagacaggaaggaataatgtcaagccccggccagcaagtgggctttattgcataagtgacatcgtccttttccccaagatagaaaagcaggagagtgtcttctgcatgaatattaaagatctggtaccccatccctgatacattggagctgttccctggttacccaggccgtgccggcacgttaaccgggctgcatccgatgcaagtgtgtcgctgtcgacggtgacccgtgtatgaaatctaacaatgcgctcatcgtcatcctcggcaccgtcaccctggatgctgtaggcataggcttggttatgccggtactgccgggcctcttgcgggatatcgtccattccgacagcatcgccagtcactatggcgtgcgcctggccctgagagagttgcagcaagcggtccacgctggtttgccccagcaggcgaaaatcctgtttgatggtggttccgaaatcggcaaaatcctgcccgctttccagtcgggaaacctgtcgtgccagctgcattaatgaatcggccaacgcgcggggagaggcggtttgcgtattgggcgccagggtggtttttcttttcaccagtgagacgggcaacagctgattgcccttcaccgcctggccctgagagagttgcagcaagcggtccacgctggtttgccccagcaggcgaaaatcctgtttgatggtggttccgaaatcggcaaaatccctgaaatgtttatgatggtctttagacctgatagttgcagctcggtcattgggaaaggctaatagcatatccttcactggctcttcacatgagcgatgattgtgagtgcgtgtcatggctgattgaagcattgctacaggtgcataattcttgcgttttgccaagtctttgaccacaaactttcccgtgggattacggatcgaaggcaatatacttacaagaagatagtcaaacctgatatgtggacttccaacacccaaaggcttatgtggaaaatattgtatcccttgttttccttctgttcctctattgcctttgatgttcattaagaagcttggcgcaaatgttgcctttttatcctcgaagaagcctctgtttgtcatgtagcttgtgataaccacattgttgcctttggcttgcggcactgcgaagtgagagtaagtgaatgtcacatcgtttggatcaagacccatttgcagcacaagccctgttttgttcagcggcttgtaagggccggttaaagagtttgatacataaccaagcatgtaaatatcgtttgagttaataccatcgatcgtcatttttgaaccgcgtgaatcagtgaacaagtaccatttgccgttcattttgaaaacattcgcgcgctcgatttcatcagttaccgtgtttgaagtgatcagcggcttcattacttttttcaatgtgtaatcattatttaactctatgataccgagggcgccgttcgctaactcagcatcgcgttttttagcgctctgctgaagcttctggcttactttacggaagaagttcgtgccgccgccgtagtacgctttgttaaataaagattcttcgccttggtatccgttttctgttcccgtgttggcttcgaatacaaggtatttatggcctttgtcttcaacgtagtgagggtctctcagcgtatggttgtcgccggatgtataattgccttcatcgataaactgctgaacgttctgatatgtttttccgtctccgtcaaaaatcgttttgtgatcttccactccgttgattttgagtgtgtcatcagattttgacacatttacctgcgctgttgtcaggctttgtttgccgtaatgtttaccggaatagtcagtgtagaataaacggatttttccgtcagatgtaaaggttgcagaaccggaccattcttgcgtctgatctttcaggatcggatcgttggcgtcgaacttatcgctgtctttaaagacacggcccgcgtttttccagctgtcgattgagttgtcgccgaccttttgataaaacatgtagattgatgtgtcatcagcgtctttcgggcttcccgcaagagcaaacacaacgtgatagccgttgtattcagctactgttccgtcagcgttttgcagcggccagctgtcccacacatcaagtccttttgcagactcaatatttttaatcgttgattgatcgaattgaggcacttggtatttttcgttttgctgctgtttagggatctgttgaagttgggaatggccctttgcagacagctgcccgctttccagtcgggaaacctgtcgtgccagctgcattaatgaatcggccaacgcgcggggagaggcggtttgcgtattgggcgccagggtggtttttcttttcaccagtgagacgggcaacagctgattgcccttcaccgcctggccctgagagagttgcagcaagcggtccacgctggtttgccccagcaggcgaaaatcctgtttgatggtggttccgaaatcggcaaaatccattaattgcgttgcgctcactgcccgctttccagtcgggaaacctgtcgtgccagctgcattaatgaatcggccaacgcgcggggagaggcggtttgcgtattgggcgccagggtggtttttcttttcaccagtgagacgggcaacagctgattgcccttcaccgcctggccctgagagagttgcagcaagcggtccacgctggtttgccccagcaggcgaaaatcctgtttgatggtggttccgaaatcggcaaaatccctcctgcttgtttgattttccaaggcatgaaaatcttgcatgcctgcaggtcgactctagaggatcccccgctctgctgaagcttctggctttctttacggaagaagttcgtgccgccgccgtagtacgctttgttaaataaagattcttcgccttggtatccgttttctgttcccgtgttggcttcgaatacaaggtatttatggcctttgtctgcgctgttgtcaggctttgtttgccgtaatgtttaccggaatagtcagtgtagaataaacggatttttccgtcagatgtaaaggttgcagaaccggaccattcttgcgtctgatctttcaggatcggatcgttggcgtcgaacttatcgctgtctttaaagacacggcccgcgtttttccagctgtcgattgagttgtcgccgaccttttgataaaacatgtagattgatgtgtcatcagcgtctttcgggcttcccgcaagagcaaacacaacgtgatagccgttgtattcagctactgttccgtcagcgttttgcagcggccagctgtcccacacatcaagtccttttgcagactcaatatttttaatcgttgattgatcgaattgaggcacttggtatttttcgttttgctgctgtttagggatgggcccaattataggccgtgagatgggggcacataaacacaatattttggggccggggagctcccttggatttttccggaaagggtgctttgggcccacaaacttcttgagtcccttgggcccggggaaatcgtttttcttcaacacgggggggggtccctgcgtggtttttaaggtcgactctagaggatcccctcttaaaatctcatcatttgatccatcatgatgcaaccagcttaagtcaggctgcttgctgttcaggggcgcctggccctgagagagttgcagcaagcggtccacgctggtttgccccagcaggcgaaaatcctgtttgatggtggttccgaaatcggcaaaatccccggccgtcgctttaatgtcccgtgctacaggggcgttacctatgggttgcttttgacgagcacgtattaacgtgcttttcctcgttaacatgcttgcatgcctgcaggtcgactctagaggatccctgtttattgcaatcattgcccgctttccagtcgggaaacctgtcgtgccagctgcattaatgaatcggccaacgcgcggggagaggcggtttgcgtattgggcgccagggtggtttttcttttcaccagtgagacgggcaacagctgattgcccttcaccgcctggccctgagagagttgcagcaagcggtccacgctggtttgccccagcaggcgaaaatcctgtttgatggtggttccgaaatcggcaaaatcccttataaatcaaaagaatagcccgagatagggttgagtgttgttccagtttggaacaagagtccactgcatgcctgcaggtcgactctagaggatccccgttcgctaactcagcatcgcgttttttagcgctctgctgaagcttctggctttctttacggaagaagttcgtgccgccgccgtagtacgctttgttaaataaagattcttcgccttggtatccgttttctgttcccgtgttggcttcgaatacaaggtatttatggcctttgtgtagtgacgggtctctcagcgtatggttgtcgccggatgtataattgccttcatcgataaactgctgaacgttctgatatgtttttccgtctccgtcaaaaatcgttttgtgatcttccactccgttgattttgagtgtgtcatcagattttgacacatttacctgcgctgttgtcaggctttgtttgccgtaatgtttaccggaatagtcagtgtagaataaacggatttttccgtcagatgtaaaggttgcagaaccggaccattcttgcgtctgatctttcaggatcggatcgttggcgtcgaacttatcgctgtctttaaagacacggcccgcgtttttccagctgtcgattgagttgtcgccgaccttttgataaaacatgtagattgatgtgtcatcagcgtctttcgggcttcccgcaagagcaaacacaacgtgatagccgttgtattcagctactgttccgtcagcgttttgcagcggccagctgtcccacacatcaagtccttttgcagactcaatatttttaatcgttgattgatcgaattgaggcacttggtatttttcgttttgctgctgtttagggatctgcagcatatcatggcgtgtaatatgagagacgccgtacgtttctttgtatgctttttggttattttctttcgcgaaggcttgagtcgctcctcctgaaatgttcagcagcattctgccacccttgtacccagaatcccctatccacacagagccagccaggggatgatttggacttccacatcctataccaccataaaagtgtgagtaacgtccctgtctgaagttttctagcacattggcttttagtaaaccacttcgtgctgaatgctgtctcgagtgcccgctttccagtcgggaaacctgtcgtgccagctgcattaatgaatcggccaacgcgcggggagaggcggtttgcgtattgggcgccagggtggtttttcttttcaccagtgagacgggcaacagctgattgcccttcaccgcctggccctgagagagttgcagcaagcggtccacgctggtttgccccagcaggcgaaaatcctgtttgatggtggttccgaaatcggcaaaatcccttgagaaagtcagcttccactcattctcttcctcctccttccctgagtaatttagtccaagaggcatttggtgaggctccataatgtacgcgactgtgttcaggtactctgaatatggtagcagctccctttgaggaagagtttgggaaatattttcaggtgactgctgtgttgagtcagagttttccncctccctcgcggaggtgtagtcattcaactcagcaggcgtgggaacaatcagcacatcagcagcacatacgacattaatcgtgccgatacccaggttaggcgcgctgtcaataactatgacatcatagtcatgagcaacagtttcaatggccagtcggagcatcaggtgtggatcggtgggcagtttaccttcatcaaatttgcccattaactcagtttcaatacggtgcagagccagacaggaaggaataatgtcaagccccggccagcaagtgggctttattgcataagtgacatcgtccttttccccaagatagaaaggcaggagagtgtcttctgcatgaatatgaagatctggtacccatccgtgatacattgaggctgttccctgggggtcgttaccttccacgagcaaaacacgtagccccttcagagccagatcgttgcctttggcttgcggcactgcgaagtgagagtaagtgaatgtcacatcgtttggatcaagacccatttgcagcacaagccctgttttgttcagcggcttgtaagggccggttaaagagtttgatacataaccaagcatgtaaatatcgtttgagttaataccatcgatcgtcatttttgaaccgcgtgaatcagtgaacaagtaccatttgccgttcattttgaaaacattcgcgcgctcgatttcatcagttaccgtgtttgaagtgatcagcggcttcattacttttttcaatgtgtaatcattatttaactctatgataccgagggcgccgttcgctaactcagcatcgcgttttttagcgctctgctgaagcttctggctttctttacggaagaagttcgtgccgccgccgtagtacgctttgttaaataaagattcttcgccttggtatccgttttctgttcccgtgttggcttcgaatacaaggtatttatggcctttgtctgacctgacaaagccttttacgctgtatgtttctgggcctcgttcaggagccaccgcagccaaaaagaaggggaggagccgggactggtcgagggtgacccggggctggaagctatcgaagctgcagtcagggaaggtggaggaagaagctgagaagctaaaggagctctgtntggcttctcttcgctgggaattttcttttgtggttttgggtttggttttcagctgggaacttttgtccccttcctcccgtttggtccgtttctttgcggtgttgtggctctgggggctgtgccgggggtggcttttgggtttcaggcctcgcctcgttccttttgcttggtcggtccgctctgcggtgctgttctggccgtgggccttccgtggttttttgtggtgtggggggttggcgcgctgggcctgcccgctttccagtcgggaaacctgtcgtgccagctgcattaatgaatcggccaacgcgcggggagaggcggtttgcgtattgggcgccagggtggtttttcttttcaccagtgagacgggcaacagctgattgcccttcaccgcctggccctgagagagttgcagcaagcggtccacgctggtttgccccagcaggcgaaaatcctgtttgatggtggttccgaaatcggcaaaatcctgcccgctttccagtcgggaaacctgtcgtgccagctgcattaatgaatcggccaacgcgcggggagaggcggtttgcgtattgggcgccagggtggtttttcttttcaccagtgagacgggcaacagctgattgcccttcaccgcctggccctgagagagttgcagcaagcggtccacgctggtttgccccagcaggcgaaaatcctgtttgatggtggttccgaaatcggcaaaatcctgcccgctttccagtcgggaaacctgtcgtgccagctgcattaatgaatcggccaacgcgcggggagaggcggtttgcgtattgggcgccagggtggtttttcttttcaccagtgagacgggcaacagctgattgcccttcaccgcctggccctgagagagttgcagcaagcggtccacgctggtttgccccagcaggcgaaaatcctgtttgatggtggttccgaaatcggcaaaatcctgcccgctttccagtcgggaaacctgtcgtgccagctgcattaatgaatcggccaacgcgcggggagaggcggtttgcgtattgggcgccagggtggtttttcttttcaccagtgagacgggcaacagctgattgcccttcaccgcctggccctgagagagttgcagcaagcggtccacgctggtttgccccagcaggcgaaaatcctgcgctgttgtcaggctttgtttgccgtaatgtttaccggaatagtcagtgtagaataaacggatttttccgtcagatgtaaaggttgcagaaccggaccattcttgcgtctgatctttcaggatcggatcgttggcgtcgaacttatcgctgtctttaaagacacggcccgcgtttttccagctgtcgattgagttgtcgccgaccttttgataaaacatgtagattgatgtgtcatcagcgtctttcgggcttcccgcaagagcaaacacaacgtgatagccgttgtattcagctactgttccgtcagcgttttgcagcggccagctgtcccacacatcaagtccttttgcagactcaatatttttaatcgttgattgatcgaattgaggcacttggtatttttcgttttgctgctgtttagggatctgcagcatatcatggcgtgtaatatgagagacgccgtacgtttctttgtatgctttttggttattttctttcgcgaaggcttgagtcgctcctcctgccagaagtgcagtcgtaaaagtcagaactgtggcttgttttacaatttttttgatgttcatgttcatgtctccttctgtatgtactgttttttgcgatctgccgtttcgatcctcccgaattgactggatctgacgctgcttcttcgcccttggtgttgctgaagcttttgtgggctcttctgtgtaatacttgtcaatttttcgtttttcttttttaagcttgtgaaaaacttttggatgcaacctagttttggtggcagaaagaaatggtttcagtgagacgggcaacagctgattgcccttcaccgcctggccctgagagagttgcagcaagcggtccacgctggtttgccccagcaggcgaaaatcctgtttgatggtggttccgaaatcggcaaaatcctgcccgctttccagtcgggaaacctgtcgtgccagctgcattaatgaatcggccaacgcgcggggagaggcggtttgcgtattgggcgccagggtggtttttcttttcaccagtgagacgggcaacagctgattgcccttcaccgcctggccctgagagagttgcagcaagcggtccacgctggtttgccccagcaggcgaaaatcctgtttgatggtggttccgaaatcggcaaaatcctgcccgctttccagtcgggaaacctgtcgtgccagctgcattaatgaatcggccaacgcgcggggagaggcggtttgcgtattgggcgccagggtggtttttcttttcaccagtgagacgggcaacagctgattgcccttcaccgcctggccctgagagagttgcagcaagcggtccacgctggtttgccccagcaggcgaaaatcctgtttgatggtggttccgaaatcggcaaaatcctgcccgctttccagtcgggaaacctgtcgtgccagctgcattaatgaatcggccaacgcgcggggagaggcggtttgcgtattgggcgccagggtggtttttcttttcaccagtgagacgggcaacagctgattgcccttcaccgcctggccctgagagagttgcagcaagcggtccacgctggtttgccccagcaggcgaaaatcctgtttgatggtggttccgaaatcggcaaaatccatcaggctcgaaccctttaagataacgttcttgagcagatcacgaagcatatcgaaaaactgcagtgcggaggtgtagtcaaacaactcagcaggcgtgggaacaatcagcacatcagcagcacatacgacattaatcgtgccgatacccaggttaggcgcgctgtcaataactatgacatcatagtcatgagcaacagtttcaatggccagtcggagcatcaggtgtggatcggtgggcagtttaccttcatcaaatttgcccattaactcagtttcaatacggtgcagagccagacaggaaggaataatgtcaagccccggccagcaagtgggctttattgcataagtgacatcgtccttttccccaagatagaaaggcaggagagtgtcttctgcatgaatatgaagatctggtacccatccgtgatacattgaggctgttccctgggggtcgttaccttccacgagcaaaacacgtagccccttcagagccagatcctgagcaagatgaacagaaactgaggttttgtaaacgccacctttatgggcagcaaccccgatcaccggtggaaatacgtcttcagcacgtcgcaatcgcgtaccaaacacatcacgcatatgattaatttgttcaattgtataaccaacacgttgctcaacccgtcctcgaatttccatatccgggtgcgggagtcgccctgctttctcggcatctctgatagccagtgagacgggcaacagctgattgcccttcaccgcctggccctgagagagttgcagcaagcggtccacgctggtttgccccagcaggcgaaaatcctgtttgatggtggttccgaaatcggcaaaatcctgcccgctttccagtcgggaaacctgtcgtgccagctgcattaatgaatcggccaacgcgcggggagaggcggtttgcgtattgggcgccagggtggtttttcttttcaccagtgagacgggcaacagctgattgcccttcaccgcctggccctgagagagttgcagcaagcggtccacgctggtttgccccagcaggcgaaaatcctgtttgatggtggttccgaaatcggcaaaatcctgcccgctttccagtcgggaaacctgtcgtgccagctgcattaatgaatcggccaacgcgcggggagaggcggtttgcgtattgggcgccagggtggtttttcttttcaccagtgagacgggcaacagctgattgcccttcaccgcctggccctgagagagttgcagcaagcggtccacgctggtttgccccagcaggcgaaaatcctgtttgatggtggttccgaaatcggcaaaatcctgcccgctttccagtcgggaaacctgtcgtgccagctgcattaatgaatcggccaacgcgcggggagaggcggtttgcgtattgggcgccagggtggtttttcttttcaccagtgagacgggcaacagctgattgcccttcaccgcctggccctgagagagttgcagcaagcggtccacgctggtttgccccagcaggcgaaaatcctgtttgatggtggttccgaaatcggcaaaatccattaattgcgttgcgctcactgcccgctttccagtcgggaaacctgtcgtgccagctgcattaatgaatcggccaacgcgcggggagaggcggtttgcgtattgggcgccagggtgggttttcttttcaccagtgagacgggcaacagctgattgcccttcaccgcctggccctggattggggaggcggttgccgccgctgctgctgacggtgtgacgttctctgttccggtcacaccacatacgttccgccattcctatgcgatgcacatgctgtatgccggtataccgctgaaagttctgcaaagccttttgaagcaggtggtgtgaaaaacctattctgactgtggaaagcaccccgtcctcctctattgcctgaaaacccaccacgggaagaaatcttctgtgatactttgagtggccgttttggtggaggtattccatcttgaggaaccacttctttactttcagcagcaacaaagtcatccacatgcatagatggtggtctacttgtgttctgttttctctgacgaaaaatatcatgaggtcgtataccctgtccaaatcctcccctgccccttcctcttggtggtggcacaacatgagctcttttggcaggttcaatgtattcagattttccacacgggaagaaatcttctgtgatactttgagtggccgttttggtggaggtattccatcttgaggaaccacttctttactttcagcagcaacaaagtcatccacatgcatagatggtggtctacttgtgttctgttttctcagtgagacgggcaacagctgattgcccttcaccgcctggccctgagagagttgcagcaagcggtccacgctggtttgccccagcaggcgaaaatcctgtttgatggtggttccgaaatcggcaaaatccgccccgccctgccactcatcgcagtactgttgtaattcattaagcattctgccgacatggaagccatcacaaacggcatgatgaacctgaatcgccagcggcatcagcaccttgtcgccttgcgtataatatttgcccatggtgaaaaccggggcgaagaagttgtccat

SEQ ID NO: 28401 - DNA, 17745 bp, Homo sapiens
  SIMILAR (17038)..(17583): 911254mologous to Cloning vector pZC320 SopA,accession number U26464,Smith-Waterman Score=880.
ttatctaatctcccagcgtggtttaatcagacgatcgaaaatttcattgcagacaggttcccaaatagaaagagcatttctccaggcaccagttgaagagcgttgatcaatggcctgttcaaaaacagttctcatccggatctgacctttaccaacttcatccgtttcacgtacaacattttttagaaccatgcttccccaggcatcccgaatttgctcctccatccacggggactgagagccattactattgctgtatttggtaagcaaaatacgtacatcaggctcgaaccctttaagatcaacgttcttgagcagatcacgaagcatatcgaaaaactgcagtgcggaggtgtagtcaaacaactcagcaggcgtgggaacaatcagcacatcagcagcacatacgacattaatcgtgccgatacccaggttaggcgcgctgtcaataactatgacatcatagtcatgagcaacagtttcaatggccagtcggagcatcaggtgtggatcggtgggcagtttaccttcatcaaatttgcccattaactcagtttcaatacggtgcagagccagacaggaaggaataatggcaagccccggccagcaagtgggctttattgcataagtgacatcgtccagtgagacgggcaacagctgattgcccttcaccgcctggccctgagagagttgcagcaagcggtccacgctggtttgccccagcaggcgaaaatcctgtttgatggtggttccgaaatcggcaaaatcctgcccgctttccagtcgggaaacctgtcgtgccagctgcattaatgaatcggccaacgcgcggggagaggcggtttgcgtattgggcgccagggtggtttttcttttcaccagtgagacgggcaacagctgattgcccttcaccgcctggccctgagagagttgcagcaagcggtccacgctggtttgccccagcaggcgaaaatcctgtttgatggtggttccgaaatcggcaaaatcctgcccgctttccagtcgggaaacctgtcgtgccagctgcattaatgaatcggccaacgcgcggggagaggcggtttgcgtattgggcgccagggtggtttttcttttcaccagtgagacgggcaacagctgattgcccttcaccgcctggccctgagagagttgcagcaagcggtccacgctggtttgccccagcaggcgaaaatcctgtttgatggtggttccgaaatcggcaaaatcctgcccgctttccagtcgggaaacctgtcgtgccagctgcattaatgaatcggccaacgcgcggggagaggcggtttgcgtattgggcgccagggtggtttttcttttcaccagtgagacgggcaacagctgattgcccttcaccgcctggccctgagagagttgcagcaagcggtccacgctggtttgccccagcaggcgaaaatcctgtttgatggtggttccgaaatcggcaaaatcctgcccgctttccagtcgggaaacctgtcgtgccagctgcattaatgaatcggccaacgcgcggggagaggcggtttgcgtattgggcgccagggtggtttttcttttcaccagtgagacgggcaacagctgattgcccttcaccgcctggccctgagagagttgcagcaagcggtccacgctggtttgccccagcaggcgaaaatcctgtttgatggtggttccgaaatcggcaaaatcctgcccgctttccagtcgggaaacctgtcgtgccagctgcattaatgaatcggccaacgcgcggggagaggcggtttgcgtattgggcgccagggtggtttttcttttcaccagtgagacgggcaacagctgattgcccttcaccgcctggccctgagagagttgcagcaagcggtccacgctggtttgccccagcaggcgaaaatcctgtttgatggtggttccgaaatcggcaaaatcctgcccgctttccagtcgggaaacctgtcgtgccagctgcattaatgaatcggccaacgcgcggggagaggcggtttgcgtattgggcgccagggtggtttttcttttcaccagtgagacgggcaacagctgattgcccttcaccgcctggccctgagagagttgcagcaagcggtccacgctggtttgccccagcaggcgaaaatcctgtttgatggtggttccgaaatcggcaaaatccctcagtttctgttcatcttgctcaggatctggctctgaaggggctacgtgttttgctcgtggaaggtaacgacccccagggaacagcctcaatgtatcacggatgggtaccagatcttcatattcatgcagaagacactctcctgcctttctatcttggggaaaaggacgatgtcacttatgcaataaagcccacttgctggccggggcttgacattattccttcctgtctggctctgcaccgtattgaaactgagttaatgggcaaatttgatgaaggtaaactgcccaccgatccacacctgatgctccgactggccattgaaactgttgctcatgactatgatgtcatagttattgacagcgcgcctaacctgggtatcggcacgattaatgtcgtatgtgctgctgatgtgctgattgttcccacgcctgctgagttgtttgactacacctccgcactgcagtttttcgatatgcttcgtgatctgctcaagaacgttgatcttaaagggttcgagcctgatgtacgtattttgcttaccaaatacagcaatagtaatggctctcagtccccgtggatggaggagcaaattcgggatgcctggggaagcatggttctaaaaaatgttgattttcgcctgctggggcaaaccagcgtggaccgcttgctgcaactctctcagggccaggcggtgaagggcaatcagctgttgcccgtctcactggtgaaaagaaaaaccaccctggcgcccaatacgcaaaccgcctctccccgcgcgttggccgattcattaatgcagctggcacgacaggtttcccgactggaaagcgggcaggattttgccgatttcggaaccaccatcaaacaggattttcgcctgctggggcaaaccagcgtggaccgcttgctgcaactctctcagggccaggcggtgaagggcaatcagctgttgcccgtctcactggtgaaaagaaaaaccaccctggcgcccaatacgcaaaccgcctctccccgcgcgttggccgattcattaatgcagctggcacgacaggtttcccgactggaaagcgggcaggattttgccgatttcggaaccaccatcaaacaggattttcgcctgctggggcaaaccagcgtggaccgcttgctgcaactctctcagggccaggcggtgaagggcaatcagctgttgcccgtctcactggtgaaaagaaaaaccaccctggcgcccaatacgcaaaccgcctctccccgcgcgttggccgattcattaatgcagctggcacgacaggtttcccgactggaaagcgggcaggattttgccgatttcggaaccaccatcaaacaggattttcgcctgctggggcaaaccagcgtggaccgcttgctgcaactctctcagggccaggcggtgaagggcaatcagctgttgcccgtctcactggacgatgtcacttatgcaataaagcccacttgctggccggggcttgacattattccttcctgtctggctctgcaccgtattgaaactgagttaatgggcaaatttgatgaaggtaaactgcccaccgatccacacctgatgctccgactggccattgaaactgttgctcatgactatgatgtcatagttattgacagcgcgcctaacctgggtatcggcacgattaatgtcgtatgtgctgctgatgtgctgattgttcccacgcctgctgagttgtttgactacacctccgcactgcagtttttcgatatgcttcgtgatctgctcaagaacgttgatcttaaaggggattttgccgatttcggaaccaccatcaaacaggattttcgcctgctggggcaaaccagcgtggaccgcttgctgcaactctctcagggccaggcggtgaagggcaatcagctgttgcccgtctcactggtgaaaagaaaaaccaccctggcgcccaatacgcaaaccgcctctccccgcgcgttggccgattcattaatgcagctggcacgacaggtttcccgactggaaagcgggcaggattttgccgatttcggaaccaccatcaaacaggattttcgcctgctggggcaaaccagcgtggaccgcttgctgcaactctctcagggccaggcggtgaagggcaatcagctgttgcccgtctcactggtgaaaagaaaaaccaccctggcgcccaatacgcaaaccgcctctccccgcgcgttggccgattcattaatgcagctggcacgacaggtttcccgactggaaagcgggcaggattttgccgatttcggaaccaccatcaaacaggattttcgcctgctggggcaaaccagcgtggaccgcttgctgcaactctctcagggccaggcggtgaagggcaatcagctgttgcccgtctcactggtgaaaagaaaaaccaccctggcgcccaatacgcaaaccgcctctccccgcgcgttggccgattcattaatgcagctggcacgacaggtttcccgactggaaagcgggcaggattttgccgatttcggaaccaccatcaaacaggattttcgcctgctggggcaaaccagcgtggaccgcttgctgcaactctctcagggccaggcggtgaagggcaatcagctgttgcccgtctcactgggattttgccgatttcggaaccaacccatcaaacaggattttcgcctgctggggcaaaccagcgtggaccgcttgctgcaactctctcagggccaggcggtgaagggcaatcagctgttgcccgtctcactggtgaaaagaaaaaccaccctggcgcccaatacgcaaaccgcctctccccgcgcgttggccgattcattaatgcagctggcacgacaggtttcccgactggaaagcgggcaggattttgccgatttcggaaccaccatcaaacaggattttcgcctgctggggcaaaccagcgtggaccgcttgctgcaactctctcagggccaggcggtgaagggcaatcagctgttgcccgtctcactggattttcgcctgctggggcaaaccagcgtggaccgcttgctgcaactctctcagggccaggcggtgaagggcaatcagctgttgcccgtctcactggtgaaaagaaaaaccacccctggcgcccaatacgcaaaccgcctctccccgcgcgttggccgattcattaatgcagctggcacgacaggtttcccgactggaaagcgggcagtgagcgcaacgcaattaatggattttgccgatttcggaaccaccatcaaacaggattttcgcctgctggggcaaaccagcgtggaccgcttgctgcaactctctcagggccaggcggtgaagggcaatcagctgttgcccgtctcactgggattttgccgatttcggaacccacccatcaaacaggattttcgcctgctggggcaaaccagcgtggaccgcttgctgcaactctctcagggccaggcggtgaagggcaatcagctgttgcccgtctcactggtgaaaagaaaactccaccctggcgcccaatacgcaaaccgcctctccccgcgcgttggccgattcattaatgcagctggcacgacaggtttcccgactggaaagcgggcagtgagcgcaacgcaattaatggattttgccgatttcggaaccaccatcaaacaggattttcgcctgctggggcaaaccagcgtggaccgcttgctgcaactctctcagggccaggcggtgaagggcaatcagctgttgcccgtctcactggtgaaaagaaaaaccaccctggcgcccaatacgcaaaccgcctctccccgcgcgttggccgattcattaatgcagctggcacgacaggtttcccgactggaaagcgggcaggattttgccgatttcggaaccaccatcaaacaggattttcgcctgctggggcaaaccagcgtggaccgcttgctgcaactctctcagggccaggcggtgaagggcaatcagctgttgcccgtctcactggtgaaaagaaaaaccaccctggcgcccaatacgcaaaccgcctctccccgcgcgttggccgattcattaatgcagctggcacgacaggtttcccgactggaaagcgggcaggattttgccgatttcggaaccaccatcaaacaggattttcgcctgctggggcaaaccagcgtggaccgcttgctgcaactctctcagggccaggcggtgaagggcaatcagctgttgcccgtctcactggtgaaaagaaaaaccaccctggcgcccaatacgcaaaccgcctctccccgcgcgttggccgattcattaatgcagctggcacgacaggtttcccgactggaaagcgggcaggattttgccgatttcggaaccaccatcaaacaggattttcgcctgctggggcaaaccagcgtggaccgcttgctgcaactctctcagggccaggcggtgaagggcaatcagctgttgcccgtctcactggtgaaaagaaaaaccaccctggcgcccaatacgcaaaccgcctctccccgcgcgttggccgattcattaatgcagctggcacgacaggtttcccgactggaaagcgggcaggattttgccgatttcggaaccaccatcaaacaggattttcgcctgctggggcaaaccagcgtggaccgcttgctgcaactctctcagggccaggcggtgaagggcaatcagctgttgcccgtctcactggtgaaaagaaaaaccaccctggcgcccaatacgcaaaccgcctctccccgcgcgttggccgattcattaatgcagctggcacgacaggtttcccgactggaaagcgggcaggattttgccgatttcggaaccaccatcaaacaggattttcgcctgctggggcaaaccagcgtggaccgcttgctgcaactctctcagggccaggcggtgaagggcaatcagctgttgcccgtctcactggtgaaaagaaaaaccaccctggcgcccaatacgcaaaccgcctctccccgcgcgttggccgattcattaatgcagctggcacgacaggtttcccgactggaaagcgggcaggattttgccgatttcggaaccaccatcaaacaggattttcgcctgctggggcaaaccagcgtggaccgcttgctgcaactctctcagggccaggcggtgaagggcaatcagctgttgcccgtctcactggtgaaaagaaaaaccaccctggcgcccaatacgcaaaccgcctctccccgcgcgttggccgattcattaatgcagctggcacgacaggtttcccgactggaaagcgggcaggattttgccgatttcggaaccaccatcaaacaggattttcgcctgctggggcaaaccagcgtggaccgcttgctgcaactctctcagggccaggcggtgaagggcaatcagctgttgcccgtctcactggtgaaaagaaaaaccaccctggcgcccaatacgcaaaccgcctctccccgcgcgttggccgattcattaatgcagctggcacgacaggtttcccgactggaaagcgggcaggattttgccgatttcggaaccaccatcaaacaggattttcgcctgctggggcaaatccagcgtggaccgcttgctgcaactcacacagggccaggcggtgaagggcaatcagctgttgcccgtctcactggtgaaaagaaaaaccaccctggcgcccaatacgcaaaccgcctctccccgcgcgttggccgattcattaatgcagctggcacgacaggtttcccgactggaaagcgggcacatgtccctgcatttaggcaatgaagtgtttgatgtgtacaaagccccgctgctgggcaattacatccacctgtttataagagaagacactggtctacagggacaagccgtctttaaatccaaacttacctttaggcttggcgtcatccaacagtgggatagaggtaagtttgccaaggctggcattccagttgtacgcccgaacggcccagaattcaaaaggagtacctgtggtgcaccaagcagacattatacttcaaagctacttcccctcaacgtgattctggatgtcgcttgggcccccaccaacctcatccacaccaagtacccacagctcttgtcggggatgagaccatgattggggtccacaagctacacaagatgatggccaatgggatcctgaaagtgcctgccatcaatgtcaacaactccgtcaccaagagcaagtttgacaacctctccggctgccaggagtccctcatagatagcatcaagtgggccacagacgtgatgattgccagcaaggattttcgcctgctggggcaaaccagcgtggaccgcttgctgcaactctctcagggccaggcggtgaagggcaatcagctgttgcccgtctcactggtgaaaagaaaaaccaccctggcgcccaatacgcaaaccgcctctccccgcgcgttggccgattcattaatgcagctggcacgacaggtttcccgactggaaagcgggcacagagcaaacaactggaaactgttttggatgatcttgaccccgagctcgccaaaggaccaagtttgagttcactttcgggattttgccgatttcggaaccaccatcaaacaggattttcgcctgctggggcaaaccagcgtggaccgcttgctgcaactctctcagggccaggcggtgaagggcaatcagctgttgcccgtctcactggtgaaaagaaaaaccaccctggcgcccaatacgcaaaccgcctctccccgcgcgttggccgattcattaatgcagctgggcacgacaggtttcccgactggaaagcgggcagctacctggtaaagggcaattaaggttgcaaacaggattttcgcctgctggggcaaaccagcgtggaccgcttgctgcaactctctcagggccaggcggtgaagggcaatcagctgttgcccgtctcactggtgaaaagaaaaaccaccctggcgcccaatacgcaaaccgcctctccccgcgcgttggccgattcattaatgcagctggcacgacaggtttcccgactggaaagcgggcaggattttgccgatttcggaaccaccatcaaacaggattttcgcctgctggggcaaaccagcgtggaccgcttgctgcaactctctcagggccaggcggtgaagggcaatcagctgttgcccgtctcactggtgaaaagaaaaaccaccctggcgcccaatacgcaaaccgcctctccccgcgcgttggccgattcattaatgcagctggcacgacaggtttcccgactggaaagcgggcagtgagcgcaacgcaattaatggattttgcccgatttcggaccccccctcaaacgggtttttcgcctgctggggcaaatccagcgtggaccgcttgctgcaactctctcaggctcgaaccctttaagggcaatcagctgttgcccgtctcactggtgaaaagaaaaaccaccctggcgcccaatacgcaaaccgcctctccccgcgcgttggccgattcattaatgcagctggcacgacaggtttcccgactggaaagcgggcagtgagcgcaacgcaattaatggattttgccgatttcggaaccaccatcaaacaggattttcgcctgctggggcaaaccagcgtggaccgcttgctgcaactctctcagggccaggcggtgaagggcaatcagctgttgcccgtctcactggtgaaaagaaaaaccaccctggcgcccaatacgcaaaccgcctctccccgcgcgttggccgattcattaatgcagctggcacgacaggtttcccgactggaaagcgggcaggattttgccgatttcggaaccaccatcaaacaggattttcgcctgctggggcaaaccagcgtggaccgcttgctgcaactctctcagggccaggcggtgaagggcaatcagctgttgtcccgtctcactggtgaaaagaaaaatcaccctggcgcccaatacgcaaaccgcctctccccgcgcgatacccgattcattaatgcagctgacacgacagatttcccgactggaaagcggacagtgagcgcaccgcaattaatggattttgccgatttcggaaccaccatcaaacaggattttcgcctgctggggcaaaccagcgtggaccgcttgctgcaactctctcagggccaggcggtgaagggcaatcagctgttgcccgtctcactggtgaaaagaaaaaccaccctggcgcccaatacgcaaaccgcctctccccgcgcgttggccgattcattaatgcagctggcacgacaggtttcccgactggaaagcgggcaggattttgccgatttcggaaccaccatcaaacaggattttcgcctgctggggcaaaccagcgtggaccgcttgctgcaactctctcagggccaggcggtgaagggcaatcagctgttgcccgtctcactggtgaaaagaaaaaccaccctggcgcccaatacgcaaaccgcctctccccgcgcgttggccgattcattaatgcagctggcacgacaggtttcccgactggaaagcgggcaggattttgccgatttcggaaccaccatcaaccaggattttcgcctgctggtgcaaaccagcatggaccgcttactgcaactctctcaggtccaggcgctgaagggcaatcagctgttgcccgtctcactgggagccttccctgatttcccacactctggcccctcacctggttttgagctcatgaggcaggaagagctgacccatctggccctcccttgtcacgtgtcaggcatgaagaagccactggttctaggcatttctgggaagccccagggactgcaagtggccattaccatctctaaggagagctctgattgcagggattttgccgatttcggaaccaccatcaaacaggatttacgcctgctggggcaaaccagcgtggaccgcttgctgcaactctctcagggccaggcggtgaagggcaatcagctgttgcccgtctcactggtgaaaagaaaaaccaccctggcgcccaatacgcaaaccgcctctccccgcgcgttggccgattcattaatgcagctggcacgacaggtttcccgactggaaagcgggcaggattttgccgatttcggaaccaccatcaaacaggattttcgcctgctggggcaaatccagcgtggaccgcttgctgcaactctctcagggccaggcggtgaagggcaatcagctgttgcccgtctcactggtgaaaagaaaaaccaccctggcgcccaatacgcaaaccgcctctccccgcgcgttggccgattcattaatgcagctggcacgacaggtttcccgactggaaagcgggcagtgagcgcaacgcaattaatggattttgccgatttcggaaccaccatcaaacaggattttcgcctgctggggcaaaccagcgtggaccgcttgctgcaactctctcagggccaggcggtgaagggcaatcagctgttgcccgtctcactggtgaaaagaaaaaccaccctggcgcccaatacgcaaaccgcctctccccgcgcgttggccgattcattaatgcagctggcacgacaggtttcccgactggaaagcgggcatggtctcccagctcttatatccgtgctcgtcaaagcaaccggattatgccgatttcggaaccaccatcatacaggattttcgccctgctggggcaaaccagcgtggaccgcacgctgcaactctctcagggccaggcggtgaagggcaatcagctgttgaccgtctcactggtgaaaagaaaaaccaccctggcgcccaatacgcaaaccgcctctcgccgcgcgttggccgattcattaatgcagctggcacgacaggtttcccgactggaaagcgggcaggattttgccgatttcggaaccaccatcaaacaggattttcgcctgctggggcaaaccagcgtggaccgcttgctgcaactctctcagggccaggcggtgaagggcaatcagctgttgcccgtctcactggtgaaaagaaaaaccaccctggcgcccaatacgcaaaccgcctctctccggcgcgttggccgattcattaatgcagctggcacgacaggtttcccgactgcaaagcgggcaaggactgcccgctaaagctggggtgcaccagaaggtggccgtgcagggccattcgcttcagctgctatcccagctgtgttgctcatggcatggaagcagctttaaaagcattttgggacaatctggtcatccaaggaaacaaaagccttcaaagtaaggattttgccgatttgggaacccaccatcaaacaggatttttcgcctgttggccaaaaccggcgtggaccggtctgctgcaactctttcagggccaggcggtgaagggccatcaagttgttgcccgtctccacgggtaaaaagaaaaaccaccctggcgcccaatacgcaaaccgcctctccccgcgcgttggccgattcattaatgcagctggcacgacaggtttcccgactggaaagcgggcagtgagcgcaacgcaattaatggattttgccgatttcggaaccaccatcaaacaggattttcgcctgctggggcaaaccagcgtggaccgcttgctgcaactctctcagggccaggcggtgaagggcaatcagctgttgcccgtctcactggtgaaaagaaaaaccaccctggcgcccaatacgcaaaccgccctctccccgcgcgttggccgattcattaatgcagctggcacgacaggtttcccgactggaaagcgggcagtgagcgcaacgcaattaatggattttgccgatttcggaaccaccatcaaacaggattttcgcctgctggggcaaaccagcgtggaccgcttgctgcaactctctcagggccaggcggtgaagggcaatcagctgttgcccgtctcactggtgaaaagaaaaaccacccctggcgcccaatacgcaaaccgcctctccccgcgcgttggccgattcattaatgcagctggcacgacaggtttcccgactggaaagcgggcaggattttgccgatttcggaaccaccatcaaacaggattttcgcctgctggggcaaaccagcgtggaccgcttgctgcaactctctcagggccaggcggtgaagggcaatcagctgttgcccgtctcactggtgaaaagaaaaaccaccctggcgcccaatacgcaaaccgcctctccccgcgcgttggccgattcattaatgcagctggcacgacaggtttcccgactggaaagcgggcaggattttgccgatttcggaaccaccatcaaacaggattttcgcctgctggggcaaaccagcgtggaccgcttgctgcaactctctcagggccaggcggtgaagggcaatcagctgttgcccgtctcactggtgaaaagaaaaaccaccctggcgcccaatacgcaaaccgcctctccccgcgcgttggccgattcattaatgcagctggcacgacaggtttcccgactggaaagcgggcaggattttgccgatttcggaaccacctatcaaacaggattttcgcctgctggggcaaaccagcgtggaccgcttgctgcaactctctcagggccaggcggtgaagggcaatcagctgttgcccgtctcactggtgaaaagaaaaaccaccctggcgcccaatacgcaaaccgcctctccccgcgcgttggccgattcattaatgcagctggcacgacaggtttcccgactggaaagcgggcaggattttgccgatttcggaaccaccatcaaacaggattttcgcctgctggggcaaaccagcgtggaccgcttgctgcaactctctcagggccaggcggtgaagggcaatcagctgttgcccgtctcactggtgaaaagaaaaaccaccctggcgcccaatacgcaaaccgcctctccccgcgcgttggccgattcattaatgcagctggcacgacaggtttcccgactggaaagcgggcaggatttgcccgatttcggaaccaccatcaaacaggattttcgcctgctggggcaaaccagcgtggaccgcttgctgcaactctctcagggccaggcggtgaagggcaatcagctgttgcccgtctcactggtgaaaagaaaaaccacctgggcgcccaatacgcaaaccgcctctccccgcgcgttggccgattcattaatgcagctggcacgacaggtttcccgactggaaagcgggcaggattttgccgatttcggaaccaccatcaaacaggattttcgcctgctggggcaaaccagcgtggaccgcttgctgcaactctctcagggccaggcggtgaagggcaatcagctgttgcccgtctcactggtgaaaagaaaaaccaccctggcgcccaatacgcaaaccgcctctccccgcgcgttggccgattcattaatgcagctggcacgacaggcctcccgactgaaaagcgggcaggattttgccgatttcggaaccaccatcaaacaggattttcgcctgctggggcaaaccagcgtggaccgcttgctgcaactctctcagggccaggcggtgaagggcaatcagctgttgcccgtctcactggtgaaaagaaaaaccaccctggcgcccaatacgcaaaccgcctctccccgcgcgttggccgattcattaatgcagctggcacgacaggtttcccgactggaaagcgggcaggattttgccgatttcggaaccaccatcaaacaggattttcgcctgctggggcaaaccagcgtggaccgcttgctgcaactctctcagggccaggcggtgaagggcaatcagctgttgcccgtctcactggtgaaaagaaaaaccaccctggcgcccaatacgcaaaccgcctctccccgcggcggcggccgattcattaatgcagctggcacgacaggtttcccgactggaaagcgggcagtgagcgcaacgcaattaatggattttgccgatttcggaaccaccatcaaacaggattttcgcctgctggggcaaaccagcgtggaccgcttgctgcaactctctcagggccaggcggtgaagggcaatgcagctgttgcccgtctcactggtgaaaagaaaaaccaccctggcgcccaatacgcaaaccgcctctccccgcgcgttggccgattcattaatgcagctggcacgacaggtttcccgactggaaagcgggcaggattttgccgatttcggaaccaccatcaaacaggattttcgcctgctggggcaaaccagcgtggaccgcttgctgcaactctctcagggccaggcggtgaagggcaatcagctgttgcccgtctcactggtgaaaagaaaaaccaccctggcgcccaatacgcaaaccgcctctccccgcgcgttggccgattcattaatgcagctggcacgacaggtttcccgactggaaagcgggcaggattttgccgatttcggaaccaccatcaaacaggattttcgcctgctggggcaaaccagcgtggaccgcttgctgcaactctctcagggccaggcggtgaagggcaatcagctgttgcccgtctcactggtgaaaagaaaaaccaccctggcgcccaatacgcaaaccgcctctccccgcgcgttggccgattcattaatgcagctggcacgacaggtttcccgactggaaagcgggcagtgagcgcaacgcaattaatggattttgccgatttcggaaccaccatcaaacaggattttcgcctgctggggcaaaccagcgtggaccgcttgctgcaactctctcagggccaggcggtgaagggcaatcagctgttgcccgtctcactggtgaaaagaaaaaccaccctggcgcccaatacgcaaaccgcctctccccgcgcgttggccgattcattaatgcagctggcacgacaggtttcccgactggaaagcgggcaggattttgccgatttcggaaccaccatcaaacaggattttcgcctgctggggcaaaccagcgtggaccgcttgctgcaactctctcagggccaggcggtgaagggcaatcagctgttgcccgtctcactggtgaaaagaaaaaccaccctggcgcccaatacgcaaaccgcctctccccgcgcgttggccgattcattaatgcagctggcacgacaggtttcccgactggaaagcgggcaggattttgccgatttcggaaccaccatcaaacaggattttcgcctgctggggcaaaccagcgtggaccgcttgctgcaactctctcagggccaggcggtgaagggcaatcagctgttgcccgtctcactggtgaaaagaaaaaccaccctggcgcccaatacgcaaaccgcctctccccgcgcgttggccgattcattaatgcagctggcacgacaggtttcccgactggaaagcgggcaggattttgccgatttcggaaccaccatcaaacaggattttcgcctgctggggcaaaccagcgtggaccgcttgctgcaactctctcagggccaggcggtgaagggcaatcagctgttgcccgtctcactggtgaaaagaaaaaccaccctggcgcccaatacgcaaaccgcctctccccgcgcgttggccgattcattaatgcagctggcacgacaggtttcccgactggaaagcgggcaggattttgccgatttcggaaccaccatcaaacaggattttcgcctgctggggcaaaccagcgtggaccgcttgctgcaactctctcagggccaggcggtgaagggcaatcagctgttgcccgtctcactggatctggttctgaaggggctacgtgttttgctcgtggaaggtaacgacccccagggaacagcctcaatgtatcacggatgggtaccagatcttcatattcatgcagaagacactctcctgcctttctatcttggggaaaaggacgatgtcacttatgcaataaagcccacttgctggccggggcttgacattattccttcctgtctggctctgcaccgtattgaaactgagttaatgggcaaatttgatgaaggtaaactgcccaccgatccacacctgatgctccgactggccactgaaactgttgctcatgactatgatgtcatagttattgacagcgcgcctaacctgggtatcggcacgattaatgtcgtatgtgctgctgatgtgctgattgttcccacgcctgctgagttgtttgactacacctccgcactgcagtttttcgatatgcttcgtgatctgctcaagaacgttgatcttaaagggttcgagcctgatcacagcagcagcatcccatgcctcttcgttgtgtcatgctcactggtggtcaatgccgtgctctcagcagtcctgctgtggctgcagctcacagccaccttcttcctggccatgctgctcatcattagcctggccgtgtgcccgtgctatggcagacgctag

SEQ ID NO: 28402 - DNA, 1060 bp, Homo sapiens
  SIMILAR (1)..(342): 961254mologous to Escherichia coli no known function,accession number X61919,Smith-Waterman Score=557.
atgcaagcgcgagtgaagtgggtcgaagggttaacttttctgggcgaatccgcctctggtcatcagattttaatggacggcaactcaggcgataaagcaccaagtccgatggaaatggtgttgatggcggcgggtggttgcagtgccatcgatgtggtttcgatcctgcaaaaagggcgtcaggatgtggtcgattgtgaagtaaaattgacctctgaacgccgcgaagaggcaccacgcctgtttacgcacattaatctgcattttatcgtcaccggtcgcgacctgaaagacgcagcggttgcgcgtgcggttgatctctctgccgagaaatattgcaatcgtttctatttcattgctgctaagttttctctcatccctgaactagtggcttcccactatggtccatctaccctgggcccaagccccaagcacttacaccagcatagagttaatattgcaatgaatgtggtagttggaacgcaaatgttattcccaagggagaaagagaaaactagaaacaatcacaggagcaattgttgggaagctggagaggcagatccaaattcccttcctttccctgtttggataaaacctcataagcacgaacaacaaaagctaaaattgacaaatggaattacaccaagcaaaaaacctctagacgtcatcgaacaatacaagggtctcactctcattgccagcgatagaagtgcagtgtgcacaatcttggctcactgcagcattgacttcgtgggctcagcctgggtgacagaccgagactctgaaaaaaaaaaagaaagagaaagaaagaaagagaagaaagaaagaaagaaagaaagaaagaaagagaagaaagaaacgttaatgatggatataagtgaaaaacgcattgaaaatagaatagctaagaaaggtgaggaatttgtagacgaaaagctggaagccagcagagattgggtcatgagatttaaggaaagaagctatctctataacataaaagtgcaaggcgaagcagccaatgttgatgtagaagcatcagcaagttatccaaaaggtctag

SEQ ID NO: 28403 - DNA, 3588 bp, Homo sapiens; identical to SEQ ID NO: 6707
  SIMILAR (2821)..(3429): 791254mologous to Homo sapiens reverse transcriptase homolog= pol {retroviral element},accession number S61070,Smith-Waterman Score=807.

SEQ ID NO: 28404 - DNA, 2250 bp, Homo sapiens; identical to SEQ ID NO: 6809
  SIMILAR (862)..(1521): 851254mologous to Homo sapiens reverse transcriptase homolog= pol {retroviral element},accession number S61070,Smith-Waterman Score=935.

SEQ ID NO: 28405 - DNA, 786 bp, Homo sapiens; identical to SEQ ID NO: 6815
  SIMILAR (52)..(702): 421254mologous to Phascolarctos cinereus pol protein,accession number AF151794,Smith-Waterman Score=391.

SEQ ID NO: 28406 - DNA, 1503 bp, Homo sapiens; identical to SEQ ID NO: 26765
  SIMILAR (637)..(834): 501254mologous to Homo sapiens calbindin D28K,accession number S46006,Smith-Waterman Score=152.

SEQ ID NO: 28407 - DNA, 651 bp, Homo sapiens
  SIMILAR (78)..(212): 421254mologous to Bos taurus immunoglobulin lambda light chain variable region,accession number U31888,Smith-Waterman Score= 79.
atgaagccgcagaccctcacgggcagtgttaaagttcttaaagatgtctatgcaacaaggtccaaccagatgaagcctgtagccagagctggccacagctggttgaaagcagccccaggacaactcttcctggggggcagtgcacaggccaaggtgtcagggccggatgctctgggactggagagtgcgggggtgtcggccgcccaggggtccaggacaaagagaatgctaatgtgccagagaaggccatcagctgaatgttccccggggaactccatctcacaaccaggctccaagtctctttggtcaggcctggtgtcccctgggaaggcaggaggcagcagtggaaaggaagtgggagcttacatacctctggtgatgaggagctcactacagatgttccttaagttacttcctgataaactcatcgtcaatggaaaatatttcccacgtagcagtccggggccactcactgggcaaacacgcgtatcgcagatcaacgtggccgctacaagaggaccccggaagtctcggccctacattaggcgcacacacggaaatgcttctttccgagccctcattggctctgacggcattcattcaacgcagagctttctgagtaatgtagttgaccaggtttcaaggctgtaa

SEQ ID NO: 28408 - DNA, 3858 bp, Homo sapiens; identical to SEQ ID NO: 24869
  SIMILAR (3858)..(3334): 981254mologous to Escherichia coli coenzyme A ligase,accession number X97452,Smith-Waterman Score=914.

SEQ ID NO: 28409 - DNA, 1515 bp, Homo sapiens; identical to SEQ ID NO: 21834
  SIMILAR (514)..(1308): 931254mologous to Cloning vector pSacBII SacB,accession number U09128,Smith-Waterman Score=1314.

SEQ ID NO: 28410 - DNA, 966 bp, Homo sapiens
  SIMILAR (511)..(323): 981254mologous to Escherichia coli ATP-dependent RNA helicase,accession number L02123,Smith-Waterman Score=327.
tcagtggccagcccctcccatgggagtaactctcttgacactgagcaccagcaaaatccagagacagacccggactggaccgcagcagacacagcccgtaccaggctgggcccctgtggacccctttactccatcaggttgggggaccaaagtaggatctagggcgcctctgaccatcttcatgggcggcgtgagcaccaccccgtagaggcggatgaggtttcggtggtcgagcgagtgcatggcattgacctcccggatgaagtcgtccatggcttctggctggctcaggacatcgggcttcaggcacttcacagccacactcacgcggacggcggcgacgttgttgttcgcctgccggtttggcatcgccgaggcggcgagacggtttttctgcaggtttcgcgcttgcagattttgcgccaccttccccacggcgtggttgctgttgaccgcgaccaccaccttgcccacgaccgccgccgccacgttgctggcgaccgttctggatttatattttgacgcttgtgctgtgcgagggttatcataaccgacattcgtgcaatctatcccctgtgtacggcatttgggctccttcgccatcgccgactctttgtccggggcctgatgcacggcaccgtcgcttttctcgtcgagatattggcggtttgccaactggataaccacgccctgagactcaagggcgtgaatcagcggtaacagacgtttatcttcacggccttttaaaataaagacttcctgaaaacgttcaggggcgcgctccagcagggcctgcacgcggaaggcgctgtctggctcaaagtttacctttttaccgacctgacgacgcttgccgccttttttacctgcatcgccttttttcgctttctcgcgcgccgttttaccgacgttgcgcggtgcgcgttcgctggagatcaggctaaagtcgattttgcgctcgtccat

SEQ ID NO: 28411 - DNA, 587 bp, Homo sapiens
  SIMILAR (141)..(109): 811254mologous to Escherichia coli thiamine-monophosphate kinase,accession number D17333,Smith-Waterman Score=43.
ctggtttgctggaattggtggtcagtggcgacaccaaaaaagccgttgagcgcattcgtgaggtggaatacggcatcatctgcgatatgtgccgcagcgacttagacctgcgccgcagtcgctggctttcaccgatatgcccgagatcggaaatcaaaccgtcagagagatcgatggctgaatttgccagatcgcgcagtgcctgcccctgtaaaatacgcggcgatggacggagatgacgtttgatcaagtagtccgcatctttagcatcggcaacctgcaaacggttttgcaaaatcgccagcccggcggcgctatcgcccggtgtaccggtcacatagatccagtcacccggtttcgccccagagcgcgttaaggctcgtcccatcggaacaaagccgtggatacccaacgtcattgataatggcccacgcgtggtatcgccgccaatgagttgcatatcgtaataattgagaagatcaaacaaactgtcgctgaaggactcaagccacgcttcgtctacgtccggtaagggtaatgccaacgtcagccaagcccggatcggcccccatcgctggcagaatcgt

SEQ ID NO: 28412 - DNA, 1053 bp, Homo sapiens
  SIMILAR (555)..(4): 991254mologous to Escherichia coli gyrase B (AA 1- 804),accession number X04341,Smith-Waterman Score=951.
ttaaatatcgatattcgccgctttcagggcgttctcttcaataaacgcacggcgcggttcaacggcgtcgcccatcagcgtggtgaacaactggtcggcagcaatcgcatctttaacggtaacgcgcagcatacgacgactttccgggtccatagtggtttcccacagctgttccgggttcatctcgcccagacctttataacgctggatggagaggccgcgacgggactctttcaccagccagtccagcgcctgctcgaagctggctaccggctgacgacgctcgccacgttcgataaacgcatcttcttccagcaagccacgcagtttctcacccagcgtgcagatacgacgatattcgccaccggtgataaactcgtgatccagcggatagtcagtatccacaccgtgggtacgcacgcgaacaatcggctcgaacaggttttgctcagcattggtgtgaacatcaaacttccactggctgccgtgctgttctttgtcgttcagttcgctgaccagcgcgttcacccagcgggtaacggtctgctcaggggatcctctagagtcacctgaagatgacggctgctctgtagaatccacctttctaaagtctgcagctttgaggaacacaaactgctgcgtgatatcgaaaaactgcgatccagaacggtcgccagcaacgtggcggcggcggtcgtgggcaaggtggtggtcgcggtcaacagcaaccacgccgtggggaaggtggcgcaaaatctgcaagcgcgaaacctgcagaaaaaccgtctcgccgcctcggcgatgccaaaccggcaggcgaacaacaacgtcgccgccgtccgcgtaaaccatgaccaccgtctccccagtaagcatcgttttccgtatgctcaaccagttttgcgggcgcggttgccagcaagagcgcacgcagttctgcatgctgttcgaatttacacaataggccatccggttagggggttccacggtttttttgcctcggttgttccggttttctggtgtattgtgaattttcttccggtccaggtacat

SEQ ID NO: 28413 - DNA, 1577 bp, Homo sapiens
  SIMILAR (705)..(70): 961254mologous to Escherichia coli DNA polymerase III alpha chain,accession number U70214,Smith-Waterman Score=1067.
tcatggtgcccaagttcctgtaacaatattcaggaaagattgaccacggggacttctagagtcgactgcagcatgcatgactgctatccccggatcgggcgggatcagtttcgagatacgatcgacaaagccgtacggatgccccagcacgcggcatacgtggcgaatcaccgctttcgccgccattgtaccgaaggtgatgatctgcgataccgcatcacgaccgtacatgtccgctacgtgctcgataacctgatcgcgtttctccatacagaagtcaacgtcgaagtcaggcatggagacacgttccgggttaaggaaacgttcgaacagcaggtcaaattccagcggatcgaggtcggtgattttcagcgcgtaggccaccagtgaacccgcaccggagccacggcctggccctaccggtacgccgttatctttcgaccactggataaattccataacgatgaggaagtagcccgggaagcccatctggttgataacctgaagttcagtctccagacgttcgtcatattccgggcggcgcttaagacgttcttcctcatcagggaataaaaaggccagacgctcttccaggccctcttttgcacgcttgaccagataatcttcggtgctcatgtccccggtcgggaactgcggcaggaagtattcaccaagacgcacggttacgttacagcgtttggcgatggggtcttctagatcggcttgcagcagtaatttgccgacagtcaacgcattctcgatgccgcagaaagcaaagaagggcgctttatcgacgcgatgctggctatttgcgcagaaattgaccaggtgaaagccggggtctggccgctggaagataacccgctggtgaacgcgccgcacattcagagcgaactggtcgccgagtgggcgcatccgtacagccgtgaagttgcggtattcccggcaggtgtggcagacaaatactggccgacagtgaaacgtctggatgatgtttacggcgaccgtaacctgttctgctcctgcgtaccgattagcgaataccagtaattcactgattcgactattttctaaaggcgcttcggcgcctttttagtcagatgacaaagtacaaaagtgctcagacagtcccctcgcccttttggggagagggttagggtgaggggaacaggccggcactggcgcgaatatttaccctcaccccggccctctccctgaaagggcgagggggaaaagcgtgccaacattgaagattgagccagtttgttagcaatctcaaagatacgtcaacgaattaatttttctcggaaaaacaaatggctatagcacttgtgactggtggcagtcgcggcatcgggcgggcaactgcattactgttggcgcaagaagggtatacggtggcggttaattatcagcaaaacctccacgcggcgcaggaagtgatgaacttaataacgcaagccggtggcaaagcattcgtgctccaggcggatatcagcgacgaaaaccaggtcgttgcgatgtttacagcaatcgatcagcacgatgaaccgctagcagcgctggtcaataacgcc

SEQ ID NO: 28414 - DNA, 3094 bp, Homo sapiens
  SIMILAR (338)..(901): 961254mologous to Escherichia coli probable riboflavin synthase beta chain,accession number U82664,Smith-Waterman Score= 887.
gggaaccccagggtttttccagtcaaggcgttgtaaacggccggccagtccaaacttgcatgcctccaggtcgcctaaaaagattcggttgtctgaataatcaactgggtaacagcaaattacagccatcgggtggaagcggggccaacgctcgttggcgcattgctgcaggcggttttagtcaatgacctgatggtctatatcgcacctaaactattaggcagcgacgcccgcggattatgcacgctgccagggcttgagaaattagccgacgccccccaatttaaattcaaagagatacgtcatgtaggcccggatgtttgcctgcatttagtgggtgcatgatctcccggctcgaaagggaagcagcgcacgaaatattatgctaaaatccgcccccctgcggggccatactcgaacccgaaggaagaaaatgaacattattgaagctaacgttgctaccccggacgctcgcgtcgccatcaccatcgcgcgtttcaacaactttatcaatgacagcctgctggaaggtgcaattgacgcactgaaacgtatcggtcaggtaaaagatgaaaacattaccgttgtttgggtgcctggtgcctatgagctgccgctggcggcgggtgcactggctaaaaccggtaaatacgacgcggggattgcgctgggtacgggtattcggggtggcactgcccactttgaatatgtcgctggtggggcaagcaacgggctggcgcatgttggccaggacagcgaaaattccggtgcttttggggttctgaccactgaaagcattgaacaagcgatcgaacgtgctggcaccaaagctggcaacaaaggtgcagaagctgcactgaccgcgcttgaaatgattaatgtattgaaagccatcaaggcctgaaattagtaaggggaaatccgtgaaacctgctgctagtcgccgcgctcgtgagtgtgccgtccaggcgctctactcctggcagttgtcccagaacgacatcgctgatgttgaataccagttcctggctgaacaggatgtaaaagacgttgacgtcctgtacttccgtgagctgctggccggggtggcgactaataccgcatgacctcgacggactgatgaagccatacctgtcccgcctgctggaagaactggggcaggtagaaaaagcagtactgcgcattgcgctgtacgaactgtctaaacgtagcgatgtgccatacaaagtggccattaaggaagcgatcgaactggcgaaatcgttcggcgcagaagacagccataagttcgtcaacggcgtactcgataaagcagcacctgtgattcgccctaacaaaaattctcgtcttgatgtcgaactgggcatcggcgacgattgcgcacttctcaatatccccgagaaacagaccctggcgatcagcactgatacgctggtggcgggtaaccatttcctccctgatatcgatcctgctgatctggcttataaagcactggcggtgaacctaagcgatctggcagcgatgggggccgatccggcctggctgacgctggcattaaccttaccggacgtagacgaagcgtggcttgagtccttcagcgacagtttgtttgatcttctcaattattacgatatgcaactcattggcggcgataccacgcgtgggccattatcaatgacgttgggtatccacggctttgttccgatgggacgagcctgctttaagatctcccgcgccgaagcgcctttagaaaatagtcgaatcagtgaattactggtattcgctaatcggtacgcaggagcagaacaggttacggtcgccgtaaacatcatccagacgtttcactgtcggccagtatttgtctgccacacctgccgggaataccgcaacttcacggctgtacggatgcgcccactcggcgaccagttcgctctgaatgtgcggcgcgttcaccagcgggttatcttccagcggccagacaccggctttcacctgctcaatttatatgcatccgtacttcgccaatccacgtccataaatcgcaaggtgcgtcttactcgtgcgctgtctgattttaaatcgggcgatattcgtgtactggtggcaactgacatcgctgcgcgcggcctggatattgaagagctgccgcacgtcgtcaactatgaactgccatacgtacctgaagattatgtccaccgtatcgggcgtaccggtcgtgcggctgctaccggtgaagcgttgtcgctgagatcccgcgcattgcgattccgggctatgagccggacccgtcaatcaaagccgaaccgatccagaacggtcgccagcaacgtggcggcggcggtcgtgggcaaggtggtggtcgcggtcaacagcaaccacgccgtggggaaggtggcgcaaaatctgcaagcgcgaaacctgcagaaaaaccgtctcgccgcctcggcgatgccaaaccggcaggcgaacaacaacgtcgccgccgtccgcgtaaacctgccgctgcgcagtaatcttttatgccgggctatgcccggcatcaggctgatgaacaaacgcaaaactgcctgatgcgctacgcttatcaggcctacgtgaactctgcaatatattgaatttgcatgcttttgtaggccggataaggcgtttacgccgcatccggcatttcacaacaagcacttgtcagcaatttgagaacacgggaaaaaatttatctgttttaccgcccataagccaccgagacgttacttctctatagccaattgttcgcgcaactccattaaaaggtagcccagtcgattcttgcccttaccatgaccaccgtctccccagtaagcatcgttttccgtatgctcaaccagttttgcgggcgcggttgccagcaagagcgcacgcagttctgcatgctgttcgaatttagcgcgaagtgcttttcgcatcacctgttctttgaccgactcccagtttttacgcagaggcttagaacgatcgcgccccatgcgtgcggcgaccataggggaagaaacccgacggatctcttcgcggtatttttcatcaaggaatcctgcgcctaaaatagtgttctaggtagaaa

SEQ ID NO: 28415 - DNA, 783 bp, Homo sapiens
  SIMILAR (425)..(703): 281254mologous to Homo sapiens Amino acid sequence of salivary protein CON-1,accession number W50192,Smith-Waterman Score =94.
atggctgaagaactaaaaggtaaaacaagccaacaaaaagccaccaacaccaccgcaacaaacgccaagctttactacactgacgactggctgttgagggtaaaagatccaaaggaactacatgagcattggtttcaggctcagttggatcatcaagttgctctgctgcacacggagctcaggaactctaattctagtcttaagactgaaaatctttctccatctgttgtctctgcattgggggggtatagctcatgccctgaggatttctattccaccacagagtttcacgtccagctccccggaatccgaggttccctaggcacgcctcctaatatcgctgccaaggaccaagagcctgtgcccttcaacctcactgttcttaaagcttctcggctcctgagttttacagcgccaaccccttcctccgagtgtgggcacgtcgttcccgtgcggtccggcggagatgcggcaacttcgacaagaccccagccccccgggaggcgccgacctccgcccagcagccccagcccggccgccagctcccgcagcccggggaaacggcgagagatgccgctcacaaccaacgacagcagccggaccaaacagacgcggaaactcacgctctctacgacccgcctgcgtccccacgtcttcgcgcgcacgtggtacatcacgcacgttccccgatccggggcgccccggattcctggggccggccactggccgctgactacgcgtaaggcaaacaagcgacctgcgttcaagggacccgaagactag

SEQ ID NO: 28416 - DNA, 4823 bp, Homo sapiens
  SIMILAR (2190)..(4487): 991254mologous to Homo sapiens protein tyrosine phosphatase,accession number L77886,Smith-Waterman Score=4093.
tttcgagacctatcgcaccactatgcagtgtggtggaattccccggctcgctcctccgtcgtggatttcgcggcgatccccccggcagctctttgcaaagctgcttgaaacttctcccaaactcggcatggatacgactgcggcggcggcgctgcctgcttttgtggcgctcttgctcctctctccttggcctctcctgggatcggcccaaggccagttctccgcagaaaaggcctgcagttactgaaatgacaagtgaaaaggaggtggctgtacttttgatgatggtccaggggcctgtgattaccaccaggatctgtatgatgactttgaatgggtgcatgttagtgctcaagagcctcattatctaccacccgagatgccccaaggttcctatatgatagaggactcttcagatcacgaccctggagaaaaagccagacttcagctgcctacaatgaaggagaacgacactcactgcattgatttcagttacctattatatagccagaaaggactgaatcctggcactttgaacatattagttagggtgaataaaggacctcttgccaatccaatttggaatgtgactggattcacgggtagagattggcttcgggctgagctagcagtgagctccttttggcccaatgaatatcaggtaatatttgaagctgaagtctcaggagggagaagtggttatattgccattgatgacatccaagtactgagttatccttgtgataaatctcctcatttcctccgtctaggggatgtagaggtgaatgcagggcaaaacgctacatttcagtgcattgccacagggagagatgctgtgcataacaagttatggctccagagacgaaatggagaagatataccagtagcccagactaagaacatcaatcatagaaggtttgccgcttccttcagattgcaagaagtgacaaaaactgaccaggatttgtatcgctgtgtaactcagtcagaacgaggttccggtgtgtccaattttgctcaacttattgtgagagaaccgccaagacccattgctcctcctcagcttcttggtgttgggcctacatatttgctgatccaactaaatgccaactcgatcattggcgatggtcctatcatcctgaaagaagtagagtaccgaatgacatcaggatcctggacagaaacccatgcagtcaatgctccaacttacaaattatggcatttagatccagataccgaatatgagatccgagttctacttacaagacctggtgaaggtggaacggggctcccaggacctccactaatcaccagaacaaaatgtgcagaacctatgagaaccccaaagacattaaagattgctgaaatacaggcaagacggattgctgtggactgggaatccttgggttacaacattacgcgttgccacacttttaatgtcactatctgctaccattacttccgtggtcacaacgagagcaaggcagactgtttggacatggaccccaaagcccctcagcatgttgtgaaccatctgccaccttatacaaatgtcagcctcaagatgatcctaaccaatccagagggaaggaaggagagtgaagagacaattattcaaactgatgaagatgtgcctggtcccgtaccagtaaaatctcttcaaggaacatcctttgaaaataagatcttcttgaactggaaagaacctttggatccaaatggaatcatcactcaatatgagatcagctatagcagtataagatcatttgatcctgcagtcccagtggctggacctccccagactgtatcaaatttatggaacagtacacaccatgtctttatgcatctccaccctggaaccacgtaccagtttttcataagagccagcacggtcaaaggctttggtccagccacagccatcaatgtcaccaccaatatctcagctccaactttacctgactatgaaggagttgatgcctctctcaatgaaactgccaccacaataactgtattgttgagaccagcacaagccaaaggtgctcctatcagtgcttatcagattgttgtggaagaactgcacccacaccgaaccaagagagaagccggagccatggaatgctaccaggttcctgtcacataccaaaatgccatgagtgggggtgcaccgtattactttgcctgcagaactacccccgggaaacctacctgagcctgccccgttcactgtgggtgacaatcggacctaccaaggcttttggaaccctcctttggctccgcgcaaaggatacaacatctatttccaggcgatgagcagtgtggagaaggaaactaaaacccagtgcgtacgcattgctacaaaagcagcagcaacagaagaaccagaagtgatcccagatcccgccaagcagacagacagagtggtgaaaatagcaggaattagtgctggaattttggtgttcatcctccttctcctagttgtcatattaattgtaaaaaagagcaaacttgctaaaaaacgcaaagatgccatggggaatacccggcaggagatgactcacatggtgaatgcaatggatcgaagttatgctgatcagagcactctgcatgcagaagatcctctttccatcaccttcatggaccaacataactttagtccaagatatgagaaccacagtgctacagcagagtccagtcgccttctagacgtacctcgctacctctgtgaggggacggaatccccttaccagacaggacagctgcatccagccatcagggtagctgatttactgcagcacattaatctcatgaagacatcagacagctatgggttcaaagaggaatatgagagcttttttgaaggacagtcagcatcttgggatgtagctaaaaaagatcaaaatagagcaaaaaaccgatatggaaacattatagcatatgatcactccagagtgattttgcaacccgtagaggatgatccttcctcagattatattaatgccaactatattgatggctaccagagaccaagtcattacattgcaacccaaggtcccgttcatgaaacagtgtatgatttctggaggatgatttggcaagaacaatctgcttgcattgtgatggttacaaatttagttgaggttggccgggttaaatgctataaatattggcctgatgatactgaagtttatggtgacttcaaagtaacgtgtgtagaaatggaaccacttgctgaatatgtagttaggacattcaccctggaaaggagggggtacaatgaaatccgtgaagttaaacagttccatttcacgggctggcctgaccatggagtgccctaccatgctacagggctgctttcctttatccggcgagtcaagttatcaaaccctcccagtgctggccccatcgttgtacattgcagtgctggtgctggacgaactggctgctacattgtgattgacatcatgctagacatggctgaaagagagggtgttgttgatatttacaattgtgtcaaagccttaagatctcggcgtattaatatggtccagacagaggaacagtacatttttattcatgatgccattttagaagcctgcttatgtggagaaactgccatacctgtctgtgaatttaaagctgcatattttgatatgattagaatagactcccagactaactcttcacatctcaaggatgaatttcagactctgaattcagtcacccctcgactacaagctgaagactgcagtatagcgtgcctgccaaggaaccatgacaagaaccgtttcatggacatgctgccacctgacagatgtctgccttttttaattacaattgatggggagagcagtaactacatcaatgctgctcttatggacagctacaggcaaccagctgctttcatcgtcacacaataccctctgccaaacactgtaaaagacttctggagattagtgtatgattatggctgtacctccattgtgatgttaaacgaagtcgacttgtcccagggctgccctcagtactggccagaggaagggatgctacgatatggccccatccaagtggaatgtatgtcttgttcaatggactgtgatgtgatcaaccggatttttaggatatgcaatctaacaagaccacaggaaggttatctgatggtgcaacagtttcagtacctaggatgggcttctcatcgagaagtgcctggatccaaaaggtcattcttgaaactgatacttcaggtggaaaagtggcaggaggaatgcaaggagggggaaggccggacgattatccactgcctaaatggtggcgggcgaagtggcatgttctgtgctataggcatcgttgttgaaatggtgaaacggcaaaatgttgtcgatgttttccatgcagtaaagacactgaggaacagcaagccaaacatggtggaagccccggagcaataccgtttctgctatgatgtagctttggagtacctggaatcatcttagttgggtgagactctttaaagtgcatccatgaagaaacctgtccatctattgagccagcagctgttgtacctgttacacttgtgcagaaagattttaatgtggggggtgggagacttttacatttgagaggtaaaagtattttttttatgaagttgtgtatcttaataaaaaggactgaattagtttttattactatattaaagcatcaacatttcatgccacataaaattatatttaataagaaccagattgaaatgagaacgtattggtgtttgtacagtgaacatgccaccttttttctcatggtttcaggtagtgcagctaccacatgtt

SEQ ID NO: 28417 - DNA, 1656 bp, Homo sapiens
  SIMILAR (706)..(804): 1001254mologous to Homo sapiens dJ86D1.1 (protein tyrosine phosphatase, receptor type, K (EC 3.1.3.48)),accession number AL034349,Smith-Waterman Score=163.
tacaagaataaggaacggggagttttcaaggcaggcgggtgtttcctcagggcgcttccacactcccctttcaatcagcaaccgctcggggggacctccaccttgggacggaaccccaggacgcctctcctcggacggcgggggtttctctgcgcgcgtcctcggtcgtctggtcgcacggcttaccgaactctcgcctctcaaattctgagttctggaacagggcagcgagctgcgccggctcccctttctcgctcgctccctccgagcagcggctggcggcggggcccaggctgcgaacaaaggcggcgcggggcgcgcggccggggctggcgcgcgtctctccggcaggaggcggtggcggcgccgcgcccgagcccgcattcctcagaagcgcccggagcccgcggggcgacgtcacccccggctccgcccccgtccctccccgagcaaagtaactcttgactaacaggagcagcctccgccgagcatggagagctgccgccgcggccggccggcgacgctggcgacgctttcgcccctgaggtagtttggcgaccgcgaagaaggaaaaagggcgggcgggcggctgtcctctcaccgtcctcaccccgcgaggcccggcccgctcctccgtcgtggatttcgcggcgatccccccggcagctctttgcaaagctgcttgaaacttctcccaaactcggcatggatacgactgcggcggcggcgctgcctgcttttgtggcgctcttgctcctctctccttggcctctcctgggatcggcccaaggccagttctccgcaggtgagtggccggggggcgtccccgacgaacgcctggagtcctgggctcacgaggggtgagccaggtccccgctagggctggggacaaggatcgtggggagctctctctgtccgggggtggggaacacagggtagagggagggctgtccccagagttcgtgccaggtgggacgcggggcacccattgttcctctccgaagcttgctcggggctctggagcatgttctgtgtgtgtgttggcggagccctgtaagatgtgttgaaatgcggttctaaggacccactctgagcgttcatgggcatcgaggtctgggcgcctggtggaggaagcctgactcgcgcgtgggagcccgctcctcgggcaaaaccaccgccaggctggccccgcgctccccggatccggcctggggctctggccccgcgctccccggatccggcctggggctggaagcggactgtaaatgtctgccttctgccggagaacccaaaaggagacaagtggagcgtctcgctgtagccctgggggttctcggtcaagccgctcagagaagtccgtgaaccctggctctcccggtcccgccctctgttcccctccagttttgttatccttcgtgtaggttggttgcttctttcgttctctcctctgggggctctgaagtttcaccaggtggacgctggggagcgggctcccgagcacttgtctacctcccgccagtcctgacaacttttctggccaacctacccagcttcgcttggctggcgagcgcatctgctgctggggttcgcggaaattcatgttgagaatttaaaaatatctgaagtatgtctttcaaatcatactcattaagatca

SEQ ID NO: 28418 - DNA, 928 bp, Homo sapiens
  SIMILAR (405)..(671): 411254mologous to Homo sapiens Human secreted protein fragment encoded from gene 42,accession number Y07785,Smith- Waterman Score=125.
gggtggaattccctcacaatgccaatataaatgaagcacgaagattcaggtcaacatctgacaccctcatttacaagcaaagatcagagaatatatagtaactagccacagtttcctatgatcttttctctttaatgtgaccttgttaaacactgatttttcattcagtgaaatataccacaacagtgatggcagcagcagcctgcctggagtgggcactgtgaagatgccagctgcagtgggaaaggcacagctggggctgtacgctccacggagccggcaggtgtcagctggagccaggaacaggacaagaacttgggacccgccgaatggcaggacagaaacagctataacacaaacggctgaaacacgtccctcactcaccatgttgtgggcaacaagaaaagagagaagagctgcagcccttcagggagcccagactgaggtgctcccaagccagggctgtgacaccctctttggggctatgcagttcctggcatctccaagcttccagtcactaccacgttccccagtgccagcagtggaagccacttgcagtagtcctggtccagccacagcctcacaggagccagtgcccatgccagcacctggagctccccacccagccacagcaaggcacagcagctggaccccatgctcccttgctcacacacccctcccctctgcacctggctcgcctttagcaggccatggactggtaccagtccgcagcccaggggttggggaccccgatctatatgacgtggatctgcctacctcttcatcttcataccacttcatgccctgcctattttacattccatcaacaactatgattcttgccctaaaccatgctatttctgcctctatgcctctgcctgaaatgccctcactttccacacttaactctccaccagccgcttcatag

SEQ ID NO: 28419 - DNA, 734 bp, Homo sapiens
  SIMILAR (231)..(392): 351254mologous to Lycopersicon esculentum homologue,accession number L77966,Smith-Waterman Score=69.
ggcgtcgcagtggcaagaacattagggatagcggacgggcagggcaccgtcggggcagaattcgctctgtgctcatcaaggctccatctgcaatgatggtcagcagtgagagagggtcagactgcactctcgcgctgcagtggcagggtaaggtgcacacatactggtgagatggcagggcaaggaaagcaaaacctgtctgcaaagatatgcaccagcgaagcaatgttgggaattgctgtgggtctcagggaagctgcaatgtggggagggagtatgtgggctgtgagggccacccagctagagctttccagtcaggcacagtccgccagcacagaaactatgatgtgggcccccacgcgcctgagattgccctgcaagcaggtgtttctgggccttcccgggttttccgcctattgccactctgcgcggagagaagcagatatcgaggaacttgtcagcatgagaaagttcatggggagacggggaagaagagccatcatgacatgaaggagcagtcagctcagcccctatttggcttatactatgaaaactggcaaaaagaaaaagcccttttccccacctctggtggaggaacccagcacaggaggctttctcaacttcagaatctaagccctcctctgtgcaaggtgctgtgctgggactgtgaggcacacaaaggctcagatcacactctccttgtgttgaaggaatttgcaagccagttagggtaa

SEQ ID NO: 28420 - DNA, 777 bp, Homo sapiens
  SIMILAR (517)..(753): 841254mologous to Escherichia coli deformylase,accession number X77800,Smith-Waterman Score=333.
atgcattccaacggctccgaaggcttaagtgaaccaccgcaatccagggcaaaagtagaagaacccacccgtgaccagcgcacagacccgtggacaacggtccacgtctgcagacgcaccccgcccgaagcgctccaaccatttcgcaaaccagggagagcaagagggcctcagcaggaatttttttacctgtcagggtttggacaacaaagccctcagcaggtgctgacgggtacaacttcctggagaagcagaaaggcactggtgcttgtagacatggaagaaggcctcacgttctccatggctgacaaccgagaaggctggtctgacttggaagaagctgtgtggccaacagccaattggctgtatcacatggtcagagtccgctcagattgtctcctgatgtcattccaagtgtctgatggccgtctatggcaactgggttgggcaaaagcctgctgggaaggggtagcccacagaatgcctaatggagcgttctgttcaagaggacctagaaagcttttagaaaaaagcggcgaaacaggcattgaagaaggttgcctgtcgatccctgaacaacgtgctttagtgccgcgcgcagagaaagttaaaattcgcgcccttgaccgcgacggtaaaccatttgaactggaagcagacggtctgttagccatctgtattcagcatgagatggatcacctcgttgggcatcccggttattgttaccgatcaccatttgccaggcgacacattacccgcagcggaagcgatcattaa

SEQ ID NO: 28421 - DNA, 1578 bp, Homo sapiens
  SIMILAR (1288)..(1575): 871254mologous to Homo sapiens p40,accession number U93564,Smith-Waterman Score=428.
atgtcccctttcccccggcggcggcgtcccggagcccaggcacctctcggagttctgcacgtagcaggatactccctctccaaaatgcctggcgtctccctggagaaagccagcagcactgaactctctactcacccgattgctacaagagacggtgttgttgaactcggtacttttggtctggaagaaagaaaaataggacaaagagggtcccctctctctctctttcccttccgctcccccgtccatcgcacccctcacccccgccccccgccctcgcgtgtcggagcctgcatcgctctggtccttgggaagttcctaggagtcatcgctcggagaaaggaggttggacgccgtgtctctttgctgctgtcttcctggaatctgcttatgtctcacctggggcaacaattcagaccagggccatctgtgaaaattcagggactgctttgtggcaatagaaagaaggttgaaaagtttaagcacacagttattgacagcctagcaattttgaactctaccaagatagcagagttcataagacagagtacctcaggtttcttcctagaaccaagtgggaacatagccaggctctttgatacacttccaaaacgaacaggtctagaaggcaattggatgcgaatttttcacagtcttttctatgaaggaccagagctgagaggagctgggatcgcggcggcaatggaacgggcctcagaaaggcgcacggccagcgcgctttttgcggggttccgggccttgggacttttcagcaacgacattccacacgtggtgcggttcagcgcgctcaagcgccggttctatgtaacaacctgcgtgggcaagagtttccacacctatgacgttcagaaacttagtctggttgcagtaacttattgttccaaatgtcctaccattagttgtcctggtggtacaaaaagtcgttctactccttctcgttctgactcaaaagacggattctccctgaactgccacggctgcgttcgtactactggcactcttcacaatagcaaagacatggagtcaacccaaatgaccatcaatgatagactggataaagaaaatgtggtacatatacaccatggaatactatgcagctgtaaaagagaaagagatcgtgtcttttgcagggacatgaatggaacccataatcctcagcaaactaacacaggaagagaaaaccaaacaccgcctattctaagtgggagaaactcttgtgagattccccctcattcaatgctcaaaagtgtatatatcccgaacgatggggaaaacccagtcagaaaaactggcaactctaaaaagcagagtgcctttcttcctccaaaggaacgcagcttctcaccagcaactgatcaaagctggacggagaatgactttgatgagttgagagaagaaggcttcagacgatcaaattactatgagctacgggaggacattcaaaccaaaggcaaagaagttgaaaactttgaaaaaaatttagaagaatgtataactagaataaccaatacagagaagtgcttaaaggagctgatggagctgaaaaccaaggcttga

SEQ ID NO: 28422 - DNA, 607 bp, Homo sapiens
  SIMILAR (35)..(514): 1001254mologous to Homo sapiens 21-SEP-1998 Supplemental human interleukin-B50 nucleotide sequence,accession number A15634_cd1,Smith-Waterman Score=824.
agtgtgaaactggggtggaatggggtgtccacgtatgttcccttttgccttactatatgttctgtcagtttctttcaggaaaatcttcatcttacaacttgtagggctggtgttaacttacgacttcactaactgtgactttgagaagattaaagcagcctatctcagtactatttctaaagacctgattacatatatgagtgggaccaaaagtaccgagttcaacaacaccgtctcttgtagcaatcggccacattgccttactgaaatccagagcctaaccttcaatcccaccgccggctgcgcgtcgctcgccaaagaaatgttcgccatgaaaactaaggctgccttagctatctggtgcccaggctattcggaaactcagataaatgctactcaggcaatgaagaagaggagaaaaaggaaagtcacaaccaataaatgtctggaacaagtgtcacaattacaaggattgtggcgtcgcttcaatcgacctttactgaaacaacagtaaaccatctttattatggtcatatttcacagcaccaaaaataaatcatctttattaagtagatgaaacattaactctaactgtgacaaagaagag

SEQ ID NO: 28423 - DNA, 1089 bp, Homo sapiens
  SIMILAR (795)..(622): 1001254mologous to Homo sapiens 21-SEP-1998 Supplemental human interleukin-B50 nucleotide sequence,accession number A15634_cd1,Smith-Waterman Score=295.
ttactgttgtttcagtaaaggtcgattgaagcgacgccacaatccttgtaattgtgacacttgttccagacatttattggttgtgactttcctttttctcctcttcttcattgcctgagtagcatttatatgctgtccaagaacttgatctagctttttgtttgtgctcttatttaaatgaattttattgtagccatctgcagatttgccagggtctccttcataagaaggcatgaagccaaataggtttcccatatggctgtctggtattgagtttgctcgctcctcccaagtctccagggggcggaggctgccaaaattccgagcccgagcgcggaggcgccggaccccagcaggtggtgcccctaacaacgttccctcgtcccagttcccaatttgcctttcctccggatagagacttcctctccctaaattggaacagaagtgttgtcccaagctaggcgcagccccgctctgacagcccagatgtcccctttcccccggcggcggcgtcccggagcccaggcacctctcggagttctgcacgtagcaggatactccctctccaaaatgcctggcgtctccctggagaaagccagcagcactgaactctctactcacccgattgctacaagagacggtgttgttgaactcggtacttttggtcccactcatatatgtaatcaggtctttagaaatagtactgagataggctgctttaatcttctcaaagtcacagttagtgaagtcgtaagttaacaccagccctacaagttgtaagatgaagattttccttcctcctttttgctttgccctaaacacttcataagtgtgaatgtcctttaagaaacggataccagtgtctttctcctgacatgccttcccctctagtggcttgctgtagggccagagagtgtgagtgcccactagaaccttcggcttcatctcttgattgccagtttgagcatgctccttgtttcctgtgggtccctgactgatgcagtcattcacaggagtcagtaggatgtcatcacatgcagccatcaggtaacattcctttcctaatcttttatgtctgccttgtggcat

SEQ ID NO: 28424 - DNA, 1344 bp, Homo sapiens
  SIMILAR (394)..(1341): 891254mologous to Homo sapiens ribosomal protein L3,accession number X73460,Smith-Waterman Score=1465.
atgaaagcagctgggagaggggatgtaccctgcaaagccagagatgcagagatacccaaggccatgggagcccacctcttgcatcagcatgacctggatgtgagacatggagtcaaagagcccttttgggtgacaccatttctcctccaggtctgtccaggtttctgtcatctcttgccttaccatagatattttcagtccttaatggtcacctacaaaatattcattgatgtggccagaaagttttctgctcccagacatgggtccctcggcttcctgcctcagaagcgcagcagcaggcatcgtgggaaggtgaagagcttccctaaggatgatccgtccaagccggtccacctcacagccttcctgggatacaaagctggcatgacccacatcatgagggaagtcgacagcccagcatccaaggtgaacaagaagcagactgtcttcgctgagcacatcagtaatgaatgcaagaggcgtttctataagaactggcataaatctaaaaagaaggcctttacgaagtactgcaagaaatggcaggatgaggatgtcaagaagcagctggagaaggacttcagcagcatgaagaaatactgccacgtcatccgcgtcattgcccacacccagatgcgcctgcttcctctgcgccagaagaaggcccacctgatggagatccaggtgaacggaggcaccgtggctgagaagctggactgggtctgcgagaggctcgagcagcaggtaaatgtgaaccaagtgtttgggcaggatgagatgatcgacgtcattggggtgaccaagggcaaaggctacaaaggggtcaccagtcgttggcacaccaagaagctgccctgcaagacccaccgaggcctgtgcaaggtggcctgtattggggcatggcatcctgctcgtgtggccttctctgtggcacgtgctggggagaaaggctaccgtcaccgcactgagatcaacaagaagatctataagattggccagggctaccttatcaaggatggcaagctgatcaagaacaatgcctccactgactctgacctgtctgacaagagcaccaatcctctgggtggctttgtccactatggtgaagtgaccaatgaccttgtcatgctgaaaggctgtgtggtgggaaccaagaagcgggtgctcaccctccacgagtccttgctggtgcagatgaaacggcaggctctggagaagattgaccttaagttcattgacaccacctccaagtttggccatggctgcttccagaccatggagcagaagaaagcattcatgggaccactcaagaaagacggaattgcaaaggaagaaggagcttaa

SEQ ID NO: 28425 - DNA, 795 bp, Homo sapiens
  SIMILAR (656)..(718): 381254mologous to Homo sapiens Human secreted protein, SEQ ID NO: 7755,accession number G03674,Smith-Waterman Score=41.
atgggatcacatgtggaacaaggagagaacaggacccaagagggacacgaacaagagacgggcaaaagaagaggagccaaggtggacaaaaattggcaagagaatctgaaaagacaagccacaggtgatcaaagtaattgcaactgcaatatgcgaagacttttgacaaatcaacactgcctcttggaacccaacagccatgatgtgaaaagcccaactcacatgcaagaccacatctcttaccaagaagctccggcctggcagtctgttcttggacagagaaggctcatgccaaggcagctgcccggcagtgtcacacgaatgctggaacaaggggggctggatgcagagaaagcatttgacaaaatccagcatcactttatgtttaaaactctcagcaaaatcagcatacaagggtcatacctcaatgtaataaatgccgtctatgacaaacccacagccaatataatactgaatgggaaaaggatatgcaggaaccatctctgggaagacatccaagggactcgagaagtcactccatccaaaagaaattgtggatttgaaggtagcaagcctcatgttttctcccgcaaagcagcagtgacagtgacaaatatctgcagtgtggctgtgaagaggcagtgtttgatgaggaaaccagccaagtgcaaagagtttacccacacaaatggggagaagatcccagtgccatctttcctttttgtcgtcatcatcatcatcgttatcatcatcatcatcatcatcatcatcacatttcatcgaaatgatttatag

SEQ ID NO: 28426 - DNA, 546 bp, Homo sapiens
  SIMILAR (387)..(545): 961254mologous to Homo sapiens ribosomal protein L3,accession number X73460,Smith-Waterman Score=258.
  misc_feature (1)...(546): n = a,t,c or g
atggggntgnnnnnncaactgaatggccgttcaattcggcacgaggtgatgtctcacagaaagttctccgctcccagacatgggtccctcggcttcctgcctcggaagcgcagcagcaggcatcgtgggaaggtgaagagcttccctaaggatgacccatccaagccggtccacctcacagccttcctgggatacaaggctggcatgactcacatcgtgcgggaagtcgacaggccgggatccaaggtgaacaagaaggaggtggtggaggctgtgaccattgtagagacaccacccatggtggttgtgggcattgtgggctacgtggaaacccctcgaggcctccggaccttcaagactgtctttgctgagcacatcagtgatgaatgcgcctgcttcctctgcgccagaagaaggcccacctgatggagatccacgtgaacggaggcactgtggccgagaagctggactgggcccgcgagaggcttgagcagcaagtacctgtgaacccagtgtttgggcaggatgagatgatcgacgtcatcc

SEQ ID NO: 28427 - DNA, 1254 bp, Homo sapiens
  SIMILAR (616)..(1122): 831254mologous to Homo sapiens ribosomal protein L3,accession number X73460,Smith-Waterman Score=741.
atggcctccaaattgcgactgtctgacatgactggagagaaagggctcaaccttgcaccaattaagatcattctgaactcactttttgaggatggcagttctattggactccagggagctcagggggctgtggacaagccctgtgggcttgagcagccagtggtagtgcccacaaaatgtgactgttacacagccagcccaaagtgcagcagtgggcattgtgggaaggtgaagagcctccctaaggatgacccttccaagccagtctgcctcacaggcttcctgggatacaaggctggcatgactcacatcgtgcaggaagttgacaggccaggatccaaggtgaataagaaggaggtggtagaggctgtgaccattgtagagacactgcccatgatggttgtgggcattgtgggctatgtggaaacccctcaaggcctccggaccttcaagactgtcttcgctgagcacatcagtgatgagtgcaagaggcgcttctataagaactggcataaatctaagaagaaggcctttaccaagtaccgcaagaaatggcaggatgagaatggcaagaagcagctggagaaggacttcagcagcatgaagaagtactgccaaaagaaggcccacctgatggagatccaggtgaatggagacaccatggccaagaagctggactgggcccgcgagaggtttgagcagcagttacctgtgaaccatgtgtttgggcaggatgagatgattgacatcatcagaatgacaaagggcaaaggctacaaaggggtcaccagtcattggcacgccaagaagctgccccgcaagacccaccaaggcccacgcaaggtgtcctgtattggggcatggcatcttgtccatgtggccttctctgtggcacgcacttggcagaaaggctactgtcaccacactgagatcaataagaagatccataagattggccagggctaccttatcaaggatgacaaactgatcaagaacaatgcctccactgactatgacctgtctgacaagagcatcaaccctctgggtgtctttggccactatggtgaagtgaccaatgactttgtcatgctgaagggctgtgtgaccaaacagcgggctctgcagaagactgaccttaagttcactgacaccacctccaagtttggccatggccgcttgcagaccatggaggagaagaaagcatccatgggacgactcaagaaagaccaaattgcaaaggaagaaagagcttaa

SEQ ID NO: 28428 - DNA, 1362 bp, Homo sapiens
  SIMILAR (258)..(1304): 601254mologous to Homo sapiens ribosomal protein L3,accession number X73460,Smith-Waterman Score=905.
  misc_feature (1)...(1362): n = a,t,c or g
ccgccccttggatcgatgaccattggcagngcggnggaattcggatttgatggcgtgatgtctcacagaaagttctccgctcccagacatgggtccctcggcttctctgcctcggaagcgcagcagcaggcatcgtgggaaggtgaagagcttccctaaggatgacccatccaagccggtccacctcacagccttcctgggatacaaggctggcatgactcacatcgtgcgggaagtcgacaggctctgggatccataggtgtaacaagaaggaaaggtggtggagggctgtgactcattgtataagaccaccacccatggtggttggtgggcatctggtgggcttacgtggaaaccacctcgagggcctccggaccttcaagacttgtctttgctgagcacatcagtgatgaatgcaagaggcgtttctataagaattggcataaagcttaagaagaaggcctttaccaagtactgcaagaaaaggcaggatgaggatggcaagaagcagctggagaaggacttcagcagcatgaagaaagtactgccaagtcatcccgtgtcatttgcccacacccagattgcgcctgcttcctcttgcgccagaaagaaggcccacctgatggagatccaggttgaacggaggcactgtggcccgagaagctgggactgggcccgcgagaagcttgaagcagcagggtacctgtgaacccaagtgtttgggcaggatgagatgattcgacgtcatcgggggtgaccaaagggcaaaaggcttcaaaggggttaccaggtcgtgtgccaaccaattagcttccctttaaggcccaacctaggctctgtccagggttgcctgttttggggcatggcatcctgctcgtgtagccttctctgtggcacgcgctgggcagaaaggctaccatcaccgcactgagatcaacaagaagatttataagattggccagggctaccttatcaaggacggcaagctgatcaagaacaatgcctccactgactatgacctatctgacaagagcatcaaccctctgggtggctttgtccactatggtgaagtgaccaatgactttgtcatgctgaaaggctgtgtggtgggaaccaagaagcgggtgctcaccctccgcaagtccttgctggtgcagacgaagcggcgggctctggagaagattgaccttaagttcattgacaccacctccaagtttggccatggccgcttccagaccatggaggagaagaaagcattcatgggaccactgaagaaagaccgaattgcaaaggaagaaggagcttaatgccaggaacagattttgcagttggtggggtctcaataaaagttattttccactg

SEQ ID NO: 28429 - DNA, 2136 bp, Homo sapiens; identical to SEQ ID NO: 14816
  SIMILAR (85)..(687): 301254mologous to Homo sapiens dJ576H24.3 (novel member of the PTPNS (protein tyrosine phosphatase, non-receptor type substrate) family),accession number AL049634,Smith-Waterman Score= 157.

SEQ ID NO: 28430 - DNA, 245 bp, Homo sapiens
  SIMILAR (72)..(4): 781254mologous to Homo sapiens Human secreted protein, SEQ ID NO: 4473,accession number G00392,Smith-Waterman Score=80.
gcaggtgcccctctgggacaaagctaccggaggaaggatcaggcagcaatatttgctgttctgcaatatttcctgttctgcagcctccgctggtgatacctaggcaaacaaggtctggagtggacctccagcaaactccaacagacctgcagctgagggacctgactgatcgcagctccttgccagcaatggaacaaagctggatagagaatgactttgatgagatgacagataggcttcagaag

SEQ ID NO: 28431 - DNA, 1827 bp, Homo sapiens; identical to SEQ ID NO: 13781
  SIMILAR (1108)..(1185): 881254mologous to Homo sapiens PRO1546,accession number AF116638,Smith-Waterman Score=136.

SEQ ID NO: 28432 - DNA, 1038 bp, Homo sapiens
  SIMILAR (160)..(228): 781254mologous to Homo sapiens Human secreted protein, SEQ ID NO: 4473,accession number G00392,Smith-Waterman Score=86.
ttcgacatcagcgaggatgacattgatgatggattcaggagactgtttgcccagttggcaggagagtcaggtccctcagctgcaggtctgttggagtttgctggagttccactgcagacgctgtttgcctggtcatcaccagcggaggctgcagaacagcaaatattgcagaatagcaaatattgctgcctgatccttcctccagaagcttcatcccagaggggcagccacctatatgagggagtctccttcttgctgggcgttttattcgtggccggtggttcctcccgcgtcctgctgcgttttggtgatgttggcgggggttttgcgcgactaaccaaaaaaaagaagacccaaatacccaaaatcagaaatgaaaaaggagacattacaactcataccacagaaatacaaaatatcatcagagacttttatgaacaacgatacactaacaaattggaaagcctagaggaaatgaataaacgcctggtccctcttctgtacggctgctgttgtttgctgggggttcacttcaggccctattggtctggttcatttccacacctagagatgtcactcaagaggctggagaacagcaaagatgcatgtctgctccttctgctggcatctctgaccttgaagggcactgacctgatgccaataggatcgctcctgtatagggtgtctgacatcccttttttagaatgtcaccagttgggttgcatggggaacaagacccatttaatgaagcactttgactatcccttggtggaaggggtgtgcttcgctggggggaaacccattcatctgggctgcctggatccttcagaactaccaggaggaaaggctaagtctgctggtccacagagactgcagccaccccttccgctaggggctcaggcccagggagatctaggttctgtccctgagtctttggctggagttattggagttcctgcagggaacccccacccagtgaggaaggatgagtcatggtcaggcctgaagaaacctctggccacagtctgccacagctga

SEQ ID NO: 28433 - DNA, 883 bp, Homo sapiens
  SIMILAR (371)..(811): 531254mologous to Homo sapiens p40,accession number U93567,Smith-Waterman Score=382.
atggcgccagtatctgcttctgaggacttctggcaatgtccagagacatctttgatttcgcaactagaaagtgcccctggaattcagttgatggaggccagggatgctgataaaagtcttataatgcacgaaatagcccccacctccaacagggaattaccagtccataaaatcagtattgccaaaccttgctctatgctaatgatctcatggttttttgttaataccggacaaagcttccagaggaaggatcaggcagcaatatttgctgttctgcagcctctgctggtgatacacaggcaaacagggtctggagtggacctccagcaaactccaacagacctacagctgagggacctgactgtcagaaggaaaaataacaaacagaaaggaatagcatcaacatcaacagaaatggacatcaacaccaaaaccccatctgcaggatcacagctcctcaccagcaatggaacaaagctggatgcagaaagactttgacaagttggcagaagtaggcttcagaaggtcggtaataacaaacttctccgagctaaaggaggatgttcaaacccatcacaaggaagctaaaaaccttgaaaaaagattagatgaatggctaactagaataaacagtgtagagaataccttaaatgacttgatggagctgaaaaccatggcacaagaactacatgatgcatgcacaagcttcagtagacaatttgatcaagtggaagaaagggtatcagtgattgaagataaaattagtgaaataaagcaagaagagaagtttagagaaaaaagagttaaaaagaaacgaacaaagtctccaaacaatatgggactatgtgaaaagaccaaatctacatttgattggtgtatctga

SEQ ID NO: 28434 - DNA, 3223 bp, Homo sapiens
  SIMILAR (1502)..(984): 871254mologous to Macaca fascicularis calpain 2,accession number AF284441,Smith-Waterman Score=746.
cgatggggtaaccctttatttttatttaacagtacatttggaagaagataaggcaacaaggcaaaatttctataatgttgctagcattttcccaaggtaaagccaggaaacaaacttgtgtcctttctataagaacttctaagtgatgtcccctctaactccatggacagacactagtggtggtgaagttcataaagttttgaggtggcaaacagcttattttgtcctttatcataattggtttacaaattggatgcctggttttggcatactggttcagttgatcaagcgcaggatccctttggtctttgtaagaccagatgtataaggccgaatagggtcaagaacttgattgtaaggagaacgatttactattaccaatcaatattctacaaaacctgtctcttgtttaacccaagcgacagaggtgagtctcctctcctggactctccagatgccttgacaagattacttcatgatataccatgtttcccagttggctcatgggaaatggtaatcttggactgttgtttggtagaatcaacagctgcattttaaacttgaagttgctttaaatattccctgccaagggcctcgtgtcctttgagagcgactcaatgtttttgctcagctgttaaatacctccctgcatttttttttcctgatttaatattgctatgaacaggaaagtgtgtaaaagtaaaaagtgtatactatttacagatttaaagctttctttgaccttgtcaagggttaagcgactcatttgcatttagtataatgatatgcaaatcttttactttgatgtgtgaaacttctgctatctcaaattgacagtatcattattttcagctatgatcatccgtttaagtaaatgttcccataattttgaggtccagatacaaagtgtatttctatggaagcttagtccttggctgattttccatcatgagaagtcttcaggcagattagttataacttcaaagtactgagaaacagagccaagagataaggtcgagctctattgttccagtattctcgggatccagctgcttaaatatcttgaatagcgtttccagccgaaccaaacaccgaacaaaattatcaaaatcgatgatgagctggtcatctgcaaaccgagcaacgatgacttggtggagttgacagggcatcttgaaacctgcttcttctaatgccttccgcatttcataggaattcatggtaccagacctgtcaacgtcgatttctcggtaaattttttggtatttttgaatcttcgtccagagaatgtagaactccttcagcccccaagcttgcaactccccgtccgaatctaagcatgtcaaccataaatttgcatgtctcgatgctgaaacccatctgacttgaatatcttggcgctttgctagaacccttctcaggatggtctgcagctcaaaggcagagatctccgcatcctctcctgccaactgggcaaacagtctcctgaatccatcatccaatgtcatcctcgctgatgtcgaactcttcaagattggcctcgatttcatcatcgacagcttggtagtcagctttcttttcagaaaagacccggatgcagaaatccccatccttgttgggttcgaaggtggaaggcacgagaatgtactctcctggcggcagcttgaagcggttgagcacctacacggaggttgatgaaggggttctgagccgccccctggcgcgattcgtcaggaagaagtttttgctgaggtggatgttggtctgcccacttaactcctctggaacctcatagatgccaaagccgatggtgtgcatgtcctcgcccatcttcctctgccgccgtcggtgcttctgaatgagccccaccaggaaggtgcagccgctctccccatcctcctcgtcctcatcctcctcctccagcttgatcaggtactgagggttcatccagaatgtgttcgggtagttcctgcaacctcccgcggtggagccccgcctccagttcccatccattttggtgagtttccacttcttgtaggtatcgctggtgagagtgtctggggtcaggttacagatctccaggcgggaatagtgcctcaggaagtcactgaaagacatccagaattctccatcttcatgccgtctggtcagcctttccctctcctctgggtctatagtgttccagcttgggcagttgtcattccaccgccctgtccactccacttctccccagggatttcggatgcggatcagtttctgtaggcttccgttactttcaacctcctcggctccggtgaccgagtacgcgtgccccttcaccagcttctgaaacgtgatggcctccgagtccgcggcgctggtgatgtcgatggagcagccaaggagagagcctttttgcagagctttctggatgatcttgaacaggttgggagggggcttcttcaactcataccactcagcaatgcctccggtgaagtcttcgaagccctcagtggtggcaccccctgatagagcttcatagcatccgttgatcttggcgtatgccttctccagcagggcgctccagaactcgctcccttcggctgaatgcacaaagagcagctccccgtccttggtgggcagcctgtcatccaccaccacctccacccactcgccgtattgccagaactggaagtgaaagatccctgcatagttttcctggaagctctggtttagggggacgactcgagccaggatttcttcattcaaggtgagggaggcaatggctgccagcagccagcagtcacctagggctccttggcagatgtctgtgcgggtggctcctccaatgataaactgggggtcagcgcagatctccgtggggcgcttccatctcatgccccgggttttgctggagtagggccccaactccttgaagcccagggccgaggggatggccgggaaggacgggtcctggaagagcgtcccggcctccaggcactcgttccgcagcgcctcgtagtcctggttgaggtacttgatggccctctcgtgggagcccagcccctcggccgcctcccggtccttcgccagcttggccgcgatgcccgccatgctgcggtcccggcggccgtactgcgcagagaaaggtcggggcgactccgcgctgcgctcggctggggcgcggccagggcccggcgcgctgctgcggccactgcgggcgccgccgctgcgagcgatgatt

SEQ ID NO: 28435 - DNA, 1395 bp, Homo sapiens
  SIMILAR (139)..(1392): 1001254mologous to Homo sapiens inwardly-rectifying potassium channel Kir5.1,accession number AF153815,Smith-Waterman Score= 2204.
agctgggaaatcctttggcctattataccatggttgctaaaaatggttctaactgaaaacccaaaccaagaaatagcaacaagtctagaattcttactactacaaaactcacctggatccctaagggcacagcaaagaatgagctattacggcagcagctatcatattatcaatgcggacgcaaaatacccaggctacccgccagagcacattatagctgagaagagaagagcaagaagacgattacttcacaaagatggcagctgtaatgtctacttcaagcacatttttggagaatggggaagctatgtggttgacatcttcaccactcttgtggacaccaagtggcgccatatgtttgtgatattttctttatcttatattctctcgtggttgatatttggctctgtcttttggctcatagcctttcatcatggcgatctattaaatgatccagacatcacaccttgtgttgacaacgtccattctttcacaggggcctttttgttctccctagagacccaaaccaccataggatatggttatcgctgtgttactgaagaatgttctgtggccgtgctcatggtgatcctccagtccatcttaagttgcatcataaatacctttatcattggagctgccttggccaaaatggcaactgctcgaaagagagcccaaaccattcgtttcagctactttgcacttataggtatgagagatgggaagctttgcctcatgtggcgcattggtgattttcggccaaaccacgtggtagaaggaacagttagagcccaacttctccgctatacagaagacagtgaagggaggatgacgatggcatttaaagacctcaaattagtcaacgaccaaatcatcctggtcaccccggtaactattgtccatgaaattgaccatgagagccctctgtatgcccttgaccgcaaagcagtagccaaagataactttgagattttggtgacatttatctatactggtgattccactggaacatctcaccaatctagaagctcctatgttccccgagaaattctctggggccataggtttaatgatgtcttggaagttaagaggaagtattacaaagtgaactgcttacagtttgaaggaagtgtggaagtatatgcccccttttgcagtgccaagcaattggactggaaagaccagcagctccacatagaaaaagcaccaccagttcgagaatcctgcacgtcggacaccaaggcgagacgaaggtcatttagtgcagttgccattgtcagcagctgtgaaaaccctgaggagaccaccacttccgccacacatgaatatagggaaacaccttatcagaaagctctcctgactttaaacagaatctctgtagaatcccaaatgtag

SEQ ID NO: 28436 - DNA, 1392 bp, Homo sapiens
  SIMILAR (676)..(879): 341254mologous to human herpesvirus 5 DNA polymerase,accession number AF099611,Smith-Waterman Score=78.
atgctcactggagcatttcagattttggagttttggattagggatggtcaacttgtaccttcatctgggaatgccgataccatgaaagctgaaaatcaggatgtgggaggtgaaggaggagagttagttggcttcatggcaggaagggaaagaaagatctatggggccatactgtgcactttccattcttatttaggatttgagcagcagtttttctgttccatagcatcgtctgtggaaggtgaaagggatctgagacctaaggaactgctcggcagaagctcgaatggagaaaggtcgagcaccatattgcaaagttggctgcctggaaggttcatgagcccagctcagtccgcaccggtggccgtccaattaaggtgcttgcatcagctgctttgtgcacgtgctttcggcttgatgctaaactgcgtggagaacggtacaaacgacagtgaaaacagagagctccttgagcctgtaggacaagatttactgattgcattgtttggaaggctcatgttagtaagactttgggctgtttatttgtacatcgtgtacgttctgaggacatccaagccattcttgttgtcatcatcagatttgaaaagttgtataactgaaggtattagatacgaggagctcaatgcttccatagatctgagttttagaatttaccagctagaagaaccacttgcgagccaattccacttcggtctgcccagcattcgacacagtgctgctgctgacgcaatccgtcctcataacgaccggcgggctctccaccgccactcccgcgtggcccgcgactcagactcccggcgactggaaaggacggacgcggcactcccgccggggtcccgggacccaatgcgggcgcgacatgggtcgtgccagaatatagtggtacttaaattccagtatataacagaatataccttgtgtgacttcaggctctttgaggaacctgagaaagaaaagtggattctgaaatggatgtctctagtggataaagtaaaggtgggaacagataaggggaaagagacaccacagcagatgttccagtgcccaggtgacctagaagcttcatgtggaggtgatggaacttcagtaggcctggaagtgatgcagtatcttctgccctcaattctttcctttaatcagtcactgagtcagttaggctgccaagaaacacttatgaaacatgggaaaggctttgctcttgaagcttttctggtaattccgatgctccgtgaggtttgggtgtcactggctggatggaggaaacagcagctgactgacctggacaggatagagctcacactgggcagcaggaaagtgacgggaaaggtgatattttcatctggtgaaggccccacaggggatgctacctaa

SEQ ID NO: 28437 - DNA, 457 bp, Homo sapiens
  SIMILAR (183)..(100): 781254mologous to Homo sapiens dJ1129A6.1 (sex comb on midleg (Drosophila)-like 2),accession number AL096763,Smith-Waterman Score=112.
  misc_feature (1)...(457): n = a,t,c or g
aaatgttaacagtacacctgggaattatgtccaatctaaacttacacatttttttaactgtattttccttctttangcttttcaatgtagtaacacagctttaatgctggccccagcttcagcccccatatacttcatcatcacatcactcttgagtaggaacagagccttcccatcaatttccttcacttttcctctgcatttggaatttaacttcatggggactgctcttgggggatatgtccccaactagtggtgaacttgtggtgcctggcacacttcgagaaaaatcctgggagactgaagtatgaatatacataggatttctacaggcaggattcaaataatttcctgaatttagtgatgagctcttagaatcttctgaaagattctcctctttgggaatggcacttcccccagcaaacaatggttctccttcagacgcntactcctttgt

SEQ ID NO: 28438 - DNA, 1284 bp, Homo sapiens
  SIMILAR (220)..(672): 351254mologous to Streptomyces coelicolor A3(2) putative translation initiation factor IF-2(fragment),accession number AL355913,Smith-Waterman Score=122.
aggaggaaaaccaggcaagtacagtgctatggaagtgaaaaggaatgtatttcaactaggtaatggtcaacggtgacaaagaacacttaaataaggatattaatgatgcttaggtttccaggccaacttatgcaaaggtatttacaacatccaaaactgcaccccaaaaggtatttccaactgcgtggtgttcagcaaaggacatgagaccgcattgtcggccacccaggttccaatacaatggatcgccactgccccaaactctccggcgcccccttcggacccccggcgccaatcctgggtctcacagatcccgagttcagccacgagcccaaacttcaccatgtgagagcccaggacccaagaggtgacggagccccacgactcccgcccagctattccttcacccgccgtccccaggcgcgaatcctgcaccgggcgcccccacctacccgcgaccaccccgtaggagtcatcagccgcctcccccgagctggccgagggcgagcggagggctccccgcccggcccagacgggttcgtacgcccaggctggggcggggggctgcgcagcggcgctggcggggacgggggcggcggggggcgcgggtccgaggggcgcccgccagccggagcccgcgaaccgcagacttcccgccttccgcagcccggaagggagctgtccgcactcgccgcggcccgcgtgggaagggaccgcgcctggctatcgccccgcgcgggggaggggaagtggagtggaacccagcgtagggctcctgtggggcggagcctccccgatgagcgccgccccgctgctccatggcacccagtcccatcggaggcccaagggctgaggagtgtggagcactgcgtgggagtggcagccagctccacctgctgcctggtgcgggatccactgggtgaaaccagctgggctcctgagtctggtggggacttggagaacctttacgtctagcttagggattgtaaatacaccaatgggcactctgtatctatgtcaaaacggaccaatcagctctctgtaaagtggaccaatcggctctctgtaaaatggaccaatcagcaggatatgggtggggccagataagagaataaaagcaggctgcccgagccaacagtggcaacctgctggcatccgtttccagctacagcccagcgggagagcaaaggaggacacagaaatgagagttgctaggccaggcgtggtggctcacgcctgtaatcccagcactttgagaggctgaggcaggcggatcacctgagg

SEQ ID NO: 28439 - DNA, 4171 bp, Homo sapiens
  SIMILAR (93)..(2192): 1001254mologous to Homo sapiens SCML2 protein,accession number Y18004,Smith-Waterman Score=3699.
tgaagctcggtgccggctcgcgcgatcggtgggacagaatttcgttgttttcaccgacgagactggaggaaacaacaccaaatagggataccatgggacaaacagtgaatgaagattccatggatgtcaagaaggagaatcaagagaaaactcctcagtcaagtacatcttctgtacaaagggatgatttccactgggaggagtatttgaaagagactgggtctataagtgctccttcagagtgcttccgtcagtctcagattccacctgtgaatgatttcaaagttggtatgaaattggaagcccgtgaccctcgcaatgccacttcagtatgtattgctacggttattggaattactggggccaggttacggttacgactggatggtagtgacaacagaaatgatttttggaggcttgtcgattccccagacatacaacctgttgggacatgtgaaaaggaaggagacttacttcaacctccactagggtaccagatgaatacatcctcctggccgatgttcctcttaaagacactaaatgggtctgaaatggcatctgccacattatttaagaaggaaccaccaaagcccccactaaataattttaaagtggggatgaaactggaagctattgacaaaaagaacccgtatctcatctgtcctgcgaccattggagatgttaaaggggatgaagttcatatcacatttgatggctggagtggagcttttgattactggtgcaagtatgattctcgagatattttcccagctgggtggtgtcgcctgacaggagatgtattacaacccccaggaactagtgttcctattgtaaagaatatagcaaaaacagagtcttctccttccgaagcaagccagcattcaatgcagtctccacagaaaactactctaatattaccaacacagcaggtcaggagatcaagtcgaattaaaccacctggacctactgcagtccccaaaaggagcagttctgttaaaaatatcacaccaaggaaaaaaggtccaaactcaggaaaaaaggaaaaacctttgcccgtgatatgttctacatctgcagcttctctaaaatcgctgaccagagaccgtggcatgttatataaagatgtcgcttctgggccatgtaaaatagtgatgtctacagtctgtgtctatgtaaacaaacatggaaactttggccctcatctggatcccaagagaatccagcagctgcctgaccacttcggcccgggcccggtgaatgtggtgcttcgccggattgtgcaggcctgtgtggattgtgcccttgaaactaaaactgtttttggatacctgaagccagataatcgtggaggagaagtgataactgcctcctttgatggggaaactcattccatccagctccctccagtgaacagtgcatcatttgctcttcgctttcttgagaacttctgccacagtctgcagtgtgataaccttttgagtagccagccttttagttcttccaggggtcatactcacagctctgcagagcatgataaaaatcagtcagcaaaagaagatgtaacagaaaggcaaagcaccaaacgatctcctcagcaaactgtaccatatgttgttcctctctctcctaagctccccaaaacaaaggagtatgcgtctgaaggagaaccattgtttgctgggggaagtgccattcccaaagaggagaatctttcagaagattctaagagctcatcactaaattcaggaaattatttgaatcctgcctgtagaaatcctatgtatattcatacttcagtctcccaggatttttctcgaagtgtgccaggcaccacaagttcaccactagttggggacatatcccccaagagcagtccccatgaagttaaattccaaatgcagaggaaaagtgaagctccaagttatatagctgtacctgatcccagtgtcctgaaacaaggcttctctaaggacccttcaacctggtctgtggatgaagtgatacagtttatgaaacatacagatcctcagatatcaggccccctcgccgacctcttcaggcaacatgaaattgatgggaaggctctgttcctactcaagagtgatgtgatgatgaagtatatggggctgaagctggggccagcattaaagctgtgttactacattgaaaagcttaaagaaggaaaatacagttaaaaaatgtgtaagtttagattggacataattctcaggtgtactgttaacattttaatttaaaagtatttctcttagcagtttttgttttgtagacagttcccataaaaatattttatcagaattgcagaactgtagtaacagttcagtcaactttgtttttttcctggagtcaccaaccagctttgggagacacagccgccactcccccagtctacttctttaaaaagcatttaacaggttagtattggcatattcaaattggcagttctttatgtctttttaaattttcattgtacagtttacaaatatacttaatgtagttaacagagaaaaacctttgattttggttaacctttatatctagaaccaaaacagctaaatcccaaaggggaaaatatcagggattgacaacttctataattaaatccatgagaatttttcctcactagagaatttaaaggtgcacctgtagatatcatcttttctcagatattttgtgtgatactctgtggtgttctgttcatgttctatcagtatatctagaaagggaatagccatataaattattttccttttattatttctctgtatgttgtatttgatcatatttaaaggaaaaaagcaagcttataagctttcatgaagtgttcttaccagtttttgataaattttttaaattataggatagaattgtcattttatgcaggagatatttatactacgagggttgtttggatggagtcagattaaattttttcagtgaaattcctattattttaaaactttccatattttcactacgcttggacatttaactaggcattcttttcttacatctctatatgaagatacctgtgtccaaaatttttgaagatatatattgtatgtgtttattcttcatatggtactttaccatatttatatattgttttatacctgtaggtttacacacaagtaaatctttttttcttgaatttaatctgggcactttgcactgccacagggggtgacgatggaactatgtatatagttaggatgttttgatttcggtaaaaaatatatgtcccatcgttgctatcaccagtacctctcagcttactcttcaggggatatgaaacaatctgtagattgggtttccataacagggaagtccgtcctaatgccaagtttctaattaatttgcttagttctgagccatttattctgctacactttgaaagatatattagttctgacttattgttggggctttattttatttttatttttttgagatggagtttcactcttgttgcccaggctggtgtgcaatagctcgatctcggctcactgcaacctccgcctcccaggtgcaagccattctcctgcctcagcctccctagtagctgggatcacaggcatgtaccaccacgcccagctaattttgtatttttagtagagacggggtttctccatgttggtcaggctggtctcgaactcccgacctcaggtgatccgcctgcctcagcctcccaaagtgctgggattacaggcatgagccaccatgcccagccatgtttggggctttattttataagttagaactttgaagaggaaatggtgctatatgtttattgttattactttgtgtaactttgatgtaatgtttataagctatgagaatcagttataaaagtattaggccctttggttggtaaatggcccaataaaatattccccccaggggcaagaatgtacattttcctttttagaaaacccaaatgtactttagacatgaatgcaactatttaaagaatagcttcatttatgttattccttacatgtcataagattcttacttaaacttggtcttctttcaagttgtttgtatgaagatgctgtacccacttgaacagtcctcaggtgtttacataaatactatgttttacagttttcatattttaaaatattaataaagttaatcgcaacgattcaaa

SEQ ID NO: 28440 - DNA, 422 bp, Homo sapiens
attgacagcttctaacaactcagtatactcctatgaacaaaatttggagcatatttgtttctctctacctgatttcttcagactgtggaaactatttgaatcaaacttgacttatggatccaataaagcccttggaaaaactggcctcatattttgtgtaaacagtccccgtacagggtttctgacttgtgttttcctaatttggaatcactgaaaactaagttttgctttcttaaaaccctgtgaactgaagccagacaacttaaacttcagaagaaaataacagcaacctatttgcatacataagccacttgcatacctgcctactaatgtatggacttcagagtaatgtggctgatatacatttttccaggattggtcttttggttattgggtgttttctcccttcttcccccaatttt

SEQ ID NO: 28441 - DNA, 1834 bp, Homo sapiens
  SIMILAR (1294)..(1371): 531254mologous to Mus sp. fibulin gene homolog,accession number S61006,Smith-Waterman Score=77.
tcagaggttataggttcttggggtctcagtgatgcatgaccttgcgttggtggtgatggggagttgggtggaggtgggaggtgatccctggggtttctgcacaaagaggagctgcgctgaagaccctgtagtgaccacaggtgtatgggatgggatcagcctgtgttctagacagtgctcaatgaatgtcacttctgtgttccattcctgatgtggtttggatctgtgtccccatccaaatctcatgttgaattgtaatcccgtgttggaggaggggtctgatgggaggtgattggatcttgggggtggagttctcatgtatggtttagcaccatcccgccttggtaccatatagttagtgacttctggtgagatctggtcgtgtaaacgtgtgtagcaccttcttcctttcttcctcctgctcctgccatgtaagatgcctgttccctctttgccttctaagaaagtaggtatgtttataccaatatcagacacggagaagtgaacctccaaattcaggatagccatgaactcctgcaaaactgcacctagcctctgcctgccatagataaaacaaattctggggctataaaagacaccaagctgctgctgcccctcagagctctctgacacagactccccatcttgctgctgagccacatcaccttgacacataacgccttctccaattcccttctccaccaggagttccattgccctcttccctttttgggcagtggccccatgccactgtctcaggaggtctcctgctgtagggaacttcccctcttgtgcaatgtgtcctccacggacaaccagaaggaggagaggaccctggagaagaggatttgcaccctctagaggataaggcagcacaatactaccatgggagagtgaggaacttgaccctctcctttgccagtgatcacctgacaagtacaagtcctgatttctgtcagcgatggctaaggctaaacaatccaccaggccatggctgccctggcctaaatcacaaggaacatcaccggcaaggccgccccctcgtagtgcaaataaaccaccaccagccaggcccccagttgagcgggaaccctgagatgcacggaagaggtcatctattagggttctcactgtgaggggatgggcaactgcccctccaaaaggtccatggcccctaccggtctgttgaattcggcggctacgtgtagaactcagaagggcaaactgtccccgatcctgtaaaagacaagttcccagagctgcagcctcccacactggcaaggacgcccaactgtggctggcatgtttggattctggcgccaccacatcccccacttccaatatttgctggatgctatctgtggagtctcccttacctcttccactctctagcggggacgaagtgagaaggtccagccgcctccaaatttgcttcccagagtgtctgccccaaatgcacaggcgagcacctatccatgggcttctgccgtaggcggctcccagtctcagcccaaaggtatccgtcacaagataggcatcacctggcagcaccctgggtacttcctgtacagggactgtgtagacaaagatataaggccagtttttccaaggggcttatattggctccataagttaagtttgattccttaaaggagagcacaccattccagtcaaagccttggtaaaacaaccagtttttcccattgcgttctaatcttaagagcttgatttccaaatgccattttccagcaaaaggaaccagatctccttggagaaataaatagcgaattctttgtctctctggctgctccttctcattatcttctataggcat

SEQ ID NO: 28442 - DNA, 825 bp, Homo sapiens
  SIMILAR (1)..(303): 961254mologous to Cloning vector pZC320 SopA,accession number U26464,Smith-Waterman Score=496.
atgaaactcatggaaacacttaaccagtgcataaacgctggtcatgaaatgacgaaggctatcgccattgcacagtttaatgatgacagcccggaagcgaggaaaataacccggcgctggagaataggtgaagcagcggatttagttggggtttcttctcaggctatcagagatgccgagaaagcagggcgtctaccgcacccggatatggaaattcgaggacgggttgagcaacgtgttggttatacaattgaacaaattaatcatatgcgtgatgtgtttggatctggctctgaacgggctacgtgtcttgctcgtggaaggggttatatcaactccctagcccgatgtcagaatttagttaacagggatcttgatcacctttcccttccacaagatagcacactggtccattacattgatgatattgtgctgcatggatttagtgaggaagagaagggtcaggtggctcagtctgctgatctagatgagggattgctcaaaattcctggagatacttttgggcctgaagcagataaggacttcttgcacaaagatctcagcacagaaattgtaggtcagagctataacactcaccacatggcccaagattccattccttggaatccgtcaggccaagaaccccaggtcagagaacacgaggcttgccatcatcttggaagcggctcaccaccatcttgggagctctgtgagcaaggacccccggtaacagaatcattccaggtgcttgtcaccagtggattggataaagaaaatatggcctatatgcactgtggaataatatgcagcaataaaaaaggatga

SEQ ID NO: 28443 - DNA, 1794 bp, Homo sapiens
  SIMILAR (176)..(57): 631254mologous to Homo sapiens Fragment of human secreted protein encoded by gene 92,accession number Y02893,Smith-Waterman Score=106.
atgcctggaggccacacaacagcattgcttcagagagagagagctcatgctggttccccaagtcctaagcagctacagcatggcaccattttgagggcccagtccccacaagactacatcctgccctggggtccaacagcccctacatctacaaatccatggagctacattgacatctcccacttgcagctaccactgtggcttgctgctgccaccagggctgaagtgcaagctgaaacttcacatgactttgatgaggatgacagtcttccaaagaaaacggaaaaagggctctttgaaaatgtggaaccacagaagaaacacagctgttcaccaaagcatagtaaattgcacaagcattgtcatcagcagttcgaatacagagatgggcagattataagccatgctgctcctcagctagtcttgggggttcaaggtcccaatctccgatcaggcatggaggtggttttggtggagaagaaatctgatggtagtcatcagcgctggatacaccaggaagacagcagaacattctgtacttttgtcatcttgggagctcctcatgtcaagacacggaaaagagaggcagttagtggaagggagatggtgatattggttgatccgtcattggaaacgtcagagtccagagagaagaggacctttcaccttgtgagtaaccctgaccttgtgctggcagtgtctatgaccaagactagaaatgaagtttgtggctatccagttattgttcagaaatataagccgtacaacaatggagctgccaatcaaaagtggcattacatgaaaaatataaaagcacttgtggcctttcatagcactgccttggataaggaaattacatcagcaaattatgctggtgtctgtacatcatctgtgattaaagaagaaaacattgatcaaccaggatactgttatctctcacctgatggaaagagaaaaactatgctctgcttggcttgtggacaatccatgagaacagagaaaggactgaaacaattgcttccaggggttccattcctctgtatttcaggcaccaagactcagaagcccttcttacaagggcccttcaaggtcatcagtgtggctgaggttgatttgtcgtgtgacaaggctgaaaaaactctaagttactaccaagcacgtctattgtctttacggatgaagacctgcacgcaagctgcatctcacagtggcatggcagccacacaccagaaggcagtgaaaataattgcatacaaaaatggggatgggtatcgtaatgggaagttaattgtggctggaacattccccatgcttcttacagaatgcacggaacaacttgggcttgccagagcagcctccaaagtatataccaaagatggaaccccaatctttaccttgcgtgatttggttttatgggctctagatgaattctttctccagagagactctgagaaacaaaagcaagatgcagctcctgttggaaaaagacagataattgttgaaagtatggaagaaaatccaagaatgaaagtgaaaaacagattatttgcaaaatctgtgacatccgatagtttggatggtatagacaagtctttgcttaccctcatcctcagaaatcctattgccatctgggtgtcttgtggtgaaccatttctacctccaaatgctttgcagaaagcagaaaaattagagaaacagaactggctaaaaaaggacagaattttggctgatctagataccatgagacacaaaatgagacagttaaaaggtcagtatgaactatatcaagcataa

SEQ ID NO: 28444 - DNA, 872 bp, Homo sapiens
  SIMILAR (872)..(690): 981254mologous to Homo sapiens KIAA1493 protein,accession number AB040926,Smith-Waterman Score=321.
ttttttttttttattttttgcagaggcctccactttttatttcagttgtactcatctgtcccactgtgcaaatggagtcacacgctcactcaattctgagaggcctggccaaggcaaagagaaaagatgcccagagcagtctgttagagttgcattctcagactaatatctttacagtcttgagaaatcactgtcagggtttatttaaaatgcagatttttgaaggataaattttacgactaattttttttaataaactatgcaggattgttatttagaagatttgccaaatttagagtcttcagcgatggaaataattggccttcttgtcacagtcttctgtttataaagtgggtaaagaaagttttctttccagaaaaatacagcagaaaatccgatggttctgataggagttaattgtggagatgtgccagagacagcagcttcgtggatggtgacaccacaatgtctgtggcttgagggccctgctgccttcggattctggcataatttgctctgatctccatcagttgttttaactcttttggggttttgaaaccatgtcccatagacacacagatgaccatatctcgctctatgtcgtcccaggactgaattggctctccactgggggtgtacagtgctctagctgggtgggtcattttgagacgagaggagcagtcttgcagcagctctgaaatagttttgccccaggcataagtgccatcttcaggtctgcctccatttagataaatccacactcgttttgtgttgggctgcttatacaggttgctcggcttgactgctatacgtttggttgcaattggaaaatttattttggattccatttcttggatttcagaaaggtgtgc

SEQ ID NO: 28445 - DNA, 1522 bp, Homo sapiens
  SIMILAR (317)..(415): 781254mologous to Homo sapiens reverse transcriptase,accession number AJ233632,Smith-Waterman Score=135.
gaatttcttaaatagcgagaagccttattccatgaaaaaatacggaactacaagaacattctgtacttttgtcatcttgggagctcctcatgtcaagacacggaaaagagaggcagttagtggaagggagatggtgatattggttgatccgtcattggaaacgtcagagtccagagagaagaggtggagcatcagggggcccagtgggacaagatttgctgataagcacaagtacgcctctagggacacgcagacagacttgaacaagatagtctttcagcataagggaaacacagttactttaaaattttggctaggttatatcaactccctagcccgatgtcagaatttagttaacagggatcttgatcacctttcccttccacaagatagcacactggtccattacattgatgatattgtgctgaatggatttagcgaggaagagaaagatcattctggctacaactttgacaaagaattcgatagaagcaaggctctgggggtgggggtgtgtgcagtgactagttggaaaattcagtgtattataccagtgagtgatggcagtggtctgaagtcagataggagtaagaattttgaaaatccaagaatgaaagtgaaaaacagattatttgcaaaatctgtgacatccgatagtttggatggtatagacaagtctttgcttaccctcatcctcagaaatcctattgccatctgggtgtcttgtggtgaaccatttctacctccaaatgctttgcagaaagcagaaaaattagagaaacagaactggctaaaaaaggacagaattttggctgatctagataccatgagacacaaaatgagacagttaaaagggcggcgagtagcggcatgtcagccagccaccatggttcctaccaagagccctgtgcagcccgtggtggttgaaggaggctggaccgaacagactcaacaggaaattaaactcatggaacttataagacatacagaggcacacctttctgaaatccaagaaatggaatccaaaataaattttccaattgcaaccaaacgtatagcagtcaagccgagcaacctgtataagcagcccaacacaaaacgagtgtggatttatctaaatggaggcagacctgaagatggcacttatgcctggggcaaaactatttcagagctttccttccttctgggtgtggggcaggcccttctcaagaatggggagtcttatgaactacagtcaaacaagctgctgcaagactgctcctctcgtctcaaaatgacccacccagctagagcactgtacacccccagtggagagccaattcagtcctgggacgacatagagcgagatatggtcatctgtgtgtctatgggacatggtttcaaaaccccaaaagagttaaaacaactgatggagatcagagcaaattatgccagaatccgaaggcagcagggccctcaagccacagacattgtggtgtcaccatccacgaagctgctgtctctggcacatctccacaattaa

SEQ ID NO: 28446 - DNA, 421 bp, Homo sapiens
  SIMILAR (213)..(419): 391254mologous to Homo sapiens PRO2221,accession number AF116695,Smith-Waterman Score=100.
  misc_feature (1)...(421): n = a,t,c or g
nnnnnnnnnnnnnnnnnnnnnnnnnnnnnnnnnnnnnnnnnnnnnnnnnnnnnnnnnnnnnnnnnnnnnnnnnnnnnnnnnnnnnnnnnnnnnnccagtaacatcaacatcaacaaaaaggaccccaacacaaaaaccccacccaaaggtcatcagcctcaaagatcaaatccaccacgtagataaatccatgatgatgaggaaaaaccagtgcaaaaatgttgaaaaatccaaaaaccagaattcctcttcaccacatgatcacaactcctctcctttctgcaagggcagagaactggacagagtatgaatctgacaaattgacagaagtaggcttcagagggtgggtaataaactcctctgagctaaaggagcatgttctaacccactgcaaggaagctcagaaccttcataataaggg

SEQ ID NO: 28447 - DNA, 358 bp, Homo sapiens
  SIMILAR (12)..(113): 521254mologous to Homo sapiens Human secreted protein sequence SEQ ID NO:103,accession number Y87064,Smith-Waterman Score =79.
  misc_feature (1)...(358): n = a,t,c or g
ctgctcctccctctggaagctttgtcccagaggggcaccagcctgatgccagcagagctctcctacatgaagtgtctgctgaaccctgctgggtggtctctctcagtcaggaggcacannnnnnnnnnnnnnnnnnnnnnnnnnnnnnnntcccttagcagagtgtgctgctagaatcctcctagttaggatcagctgctctcttcagagctggcaggcaggaaagttttagtctgttgaagcaacacccacagcttccccttcccccaggtgctctgtcccagggagttttatctgcaagcccctgactggggctcctttctttcagagatgccctgcccagtgaagaggaatctaa

SEQ ID NO: 28448 - DNA, 2697 bp, Homo sapiens
  SIMILAR (1981)..(2070): 1001254mologous to Homo sapiens dJ329L24.1 (novel protein),accession number AL132874,Smith-Waterman Score=167.
atgctccctgtttcagtgggatggaggggaaccctgagggaagctcgaaggcagaggttagtagatagagcatcttccggggtagctggcagcattttggcacatgatgctggaagaggatgtggccggagctgccaggcactgaatccaaaagtggtaattattcctctacatgcagacctcagcagctgctcacacattccagagcaggggagtccttgccttgggcttggttcagcatctaagaaatacagtgacattgcagggtggcagcacctggcgacgcagggcagagccgtccacgtagagcacattgagaatgacaaccctggaggatggcgagagagaccacccagcagggttcagcagacacttcatgtaggagagctctggctggcatctggcgggtgcccctctgggatgaagcttccaggggaaggaacaggcagcaatctttgctgttctgcaccctccactggtgataccccaggcaaacagggtctggagtggacctctagcaaactgcagcagacttgtggaagaggggcctattagaagaaaaactagcaaacagaaagcaaaaacaacaacatcaacaaaaagggcccccacacaaaaaccccatcctaaggtcatcagctcaaagatcaaagcaagggcacaaaactggacagagaatgagattgacgaattgacagaagtaggcttcagaaggtgggtaataacaaactcctccaagctaaaggagcatgttctaacccaatgcaaggaagctaagaaccttgataaaagattacaggaactgctaactggaataaccagtttagaaagaagcgtaaattacctgatggagctgaaaagcacagcacgagaacttcatgaagcatacacaagtatcagtactcaaatcaatcaagcgttacagaatcagagtgtgcaccaatcccaaccacgggtattggaggtagagactactccaggatccttgagaaatggtccaggggaagaatcaaacttcagaacttcatcacagcaggaaatcaactatagcacacatatcttctctcctggaggcagccccgagggaagcccagttctagatcccccaccgcatctggagcctaatagatcaacaagtaggaaacattcagctcagcacaaaaataacagagatgacagtttagattggtttgatttcatggcaactcatcagagtgaacctaaaaacactgttgttgtgtctcctcatcccaaaacatctggagaaaatatggccttcgaagatctctaacagcacatctcagggtaaggagaagagtgagccaggccaaaggagcaaagtggacattgggttgcttccatcaccaggagagacaggtgttccatggagggcagacaatgtggaaagtaacaaggaaaaaaaggctagcactagattctgaagcagcagtctctgctgataaaccagactcagtactgactcatcatgtccccaggaacctgcagaagctgtgcaaagagagggcccagaagttgtgcagaaatagcaccagggtgcctgcacagtgcacagtcccttcccatcctcagtccactcctgtacatagcccagacagaaggctggactcacccaaaagaaagagaccgaaatcccttgcgcaagtggaagagcctgcaattgaaaatgttaagcctccaggttcccctgtggccaaactggcaaaatttactttcaagcagaagtcaaaactgatccactcctttgaagatcacagccatgtgtcacctggtgcaactaaaatagcagttcatagtcctaaaatttcccagcgtagaacaagaagagacgcagccttgccggtgaagcgtccaggaaagttaacatctaccccaggaaaccagatctccagtcagccacagggtgagacaaaggaggtgtcgcagcagccaccagagaaacacggaccaagagagaaggtgatgtgtgcccctgagaagaggattattcagcctgaattagagcttgggaacgagactgggtgtgctcatcttacttgtgagggagacaaaataggaagaggtttcaggcagtaataaaagcggcaaggttcatgcctgcacattagccagattggcaaacttctgcttttactcccccatcggaatccaaatcaaaatcccctcctcctgaaaggaagaaccgaggtgagagaggcccaagctcccctcctacaaccacagctccaatgcgtgtcagtaaaaagaaatcttttcagctccgtgggtccaccgagaaactgattggttccaaagaatccctcttcactttaccagaactaggtgatgaagcatttgattgtgactgggatgaagagatgagaaaaaagtcatagttgggaaaagctttctggtcaaatctcaccttcttcaactccacagaggaccttcaggatatcaatatggtatttataaatgtatagaacaattggccatattgaggatcactctgaatactggctcccccttaaggctttctaatttcaggttaatcttcatgacttaaaaagttgtataatcagttgaggtcagtgtgataccagcagctgagctgaattaattatgttgtgcttaattttacaaatggagtacttgtattcctgttcctgaagctggttctggtttttggtttggtttgat

SEQ ID NO: 28449 - DNA, 1413 bp, Homo sapiens
  SIMILAR (1)..(1389): 621254mologous to Homo sapiens HTRM clone 438283 protein sequence,accession number Y73345,Smith-Waterman Score=1640.
atgaaggagttctcgtcaacagcacaaggcaatagagaagtgttccatgcagggacatctcaaagacatgaaagtcatcacaatggagatttttgtttccaggatattgataaagatattcatgacattgagtttcagtggcaagaagatgaaagaaatggccatgaagcactcatgacaaaaatcaaaaagttgacaggtagtacagagcgatatgatcaaaattatgctggaaacaagcctgttaaatatcagcttggattcagctttcattcgcatctgcctgaactgcacatatttcacactgaagagaaaattgataatcaagttgtgaagtctatccacgatgcttccttggtttcaacagcccaaagaatttcttgtaggcctgaaacccatatttctaatgactatgggaataatttcctgaattcttcattattcacacaaaaacaggaagtacatatgagggaaaaatctttccaatgcaatgacagtggcaaagcctataattgtagctcactcttaaggaaacatcagttaatccatttaggagagaaacaatataaatgcgatatatgtggcaaggtctttaattcgaagcgatacgttgcacgccatcgtagatgtcacactggtgagaaaccttacaagtgtaatgagtgtggcaagaccttcagtcagacatattacctaacatgccatcgtagacttcatactggagagaaaccttacaaatgtgaagaatgtgacaaagctttccatttcaaatcaaagcttcaaatacataggagaattcatactggagagaaaccgtacaagtgtaatgagtgtggcaagacctttagtcagaagtcgtaccttacatgccatcgtaggcttcatactggagagaaaccttacaagtgtaatgagtgtggcaagacctttagtcggaagtcacattttacatgccatcatagagttcatactggagagaaaccttacaagtgtaatgagtgtagcaagacctttagtcacaagtcatctcttacataccatcgtagacttcatactgaagagaaaccttacaagtgtaatgagtgtggcaagaccttcaatcagcagttaacccttaaacgccatcgtagacttcatagtggagagaacccttacaaatgtgaagatagtgacaaagcttacagtttcaaatcaaaccttgaaatacatcagaaaattcatactgaacagaatccttacaagtgtaatgagtgtggcaagaccttcagtcggacgtcatcccttacataccatcatagacttcatactggacagaaaccttacaaatgtgaagattgtgatgaagctttcagtttcaaatcaaaccttgaaagacataggagaatttatactggagagaaactacacgtgtaa

SEQ ID NO: 28450 - DNA, 348 bp, Homo sapiens
  SIMILAR (152)..(256): 451254mologous to Mus sp. alpha 1 (XII) collagen {triple- helical domain COL2},accession number S48406,Smith-Waterman Score= 79.
gggatgtctgtgaggactctttccaaataagatcccattctcagttctggagattaggacctgggcacatctttctgggagacaccactcagcccactgcactagctgtgcgtggccccaggttgcctgcttaccattggcgacacatcccagctgcacctgcacgttctgcagcctccaggcccctggacggcctgggcaaagccctctgagccccagacgggcctgtgggcctgaagacctgccccctcctccttatgtctgagacctagccccttccttggggccgtccctgggtccactgatgtcccaatcccagccacgtagaactccaccactgagaggccg

SEQ ID NO: 28451 - DNA, 708 bp, Homo sapiens
  SIMILAR (361)..(311): 471254mologous to Homo sapiens Amino acid sequence of salivary protein CON-2,accession number W50193,Smith-Waterman Score =40.
ccgcgctgcaggaattcggcacgagctgacatcagtgcctcatccgatgtccaaccccggccagaggaaccaccgtcgcttcagccccactctgaccttggaagccccaccctgcatggaggcagaggtgggaactctgtcatccaccgttccccacagaccactcacagccgctttaagagaacagccagggcttctaggcaggagcacgacagtgttcacgctgatggccagggagcctcctcagccagcagcagccgactcgtgcttgtgcattgttcagatggaagcatgatcattggatggaagttcctggcacaggtgcaagttgaccctgagtcattccagaaggattcgggcctcaccggaaagaacgccaggaaaagccatagggcaacagctcttctgccatttcagtcctcatgggtgaaactgggtctatgggagacagctagcaagtgtctgggcagcccccctggccctaagaagttcccgtcgcagggtatgctggcaggaagtggtctgggtcatcttggagatgcaaggtttggatggcgttgggcactgcaggaggagctgcccagcagtgcaagctcccagggtcctggacctctgaccctgtgtcagcccttgtttggtggccctgagcagggccacccagaaggtgggggtggaggacagttcagccgcagcctggaggctcactga

SEQ ID NO: 28452 - DNA, 906 bp, Homo sapiens
  SIMILAR (734)..(108): 291254mologous to Homo sapiens DC33,accession number AF260332,Smith-Waterman Score=111.
tcagggaggcggggtcttgcccaactggatatcttctgtgatgcagatttgtatgccagggtccccttccacgctcagcagtgtgaggaaggagatggcattagtgtcagtttgcacatggaacagcttcttctccacgtgtttgtctgaggcacaggtgtcggtcttggcaaaaggcatgggctgttgtttgctgcacgttctgcagcctccaggcccctggacggcctgggcaaagccctctgagccccagacgggcctgtgggcctgaagacctgccccctcctccttatgtctgagacctagccccttccttggggccgtccctgggtccactgatgtcccaatcccagccacgtagaactccaccactggcatggggctcttgagcattccccgagaacctgtgctcagtgggcctgaattgatggacagagcggaagccggcttggcgtgagctgcggctgttcggggcccgtgatggaaccaggagcagggagcgtggatagcatccttaaaagtccgccagttgggaggctgtggcaactgctttccttctctgagacttgtgttttccaagacgggcgcagatgggcgctcagcacgggccgggcgtgatccaattacacagcagatttcagacgcccagacttggagctggggaagcctggcgccctggggagaacactgccctttgtgctggtgtcctggggctgctctcacaaagggttcaaagccaccagctggggcttgaacaacagaagtgtctcccctcacagttctggaggcagagaccaatgtcaaggtgtcggcagggccctctccctccagtgctctaggggaggacccttccttgtctctttcagcttctggggcgtccaggtgttctttggcttgtggccacat

SEQ ID NO: 28453 - DNA, 1842 bp, Homo sapiens
  SIMILAR (1494)..(1730): 341254mologous to Homo sapiens Human normal pancreas tissue derived protein 13,accession number Y59905,Smith-Waterman Score=88.
tcagggaggcggggtcttgcccaactggatatcttctgtgatgcagatttgtatgccagggtccccttccacgctcagcagtgtgaggaaggagatggcattagtgtcagtttgcacatggaacagcttcttctccacgtgtttgtctgaggcacaggtgtcggtcttggcaaaaggcatgggctgttgtttgcctgcccacaccttgatcttggacttcacctccaggactgtaggaacatgaacgtctgtggttaaagcacccaggccctctgctacggcccccccgggagagaagcgcactccctggaaaccccagcctgctgggtcatggctcatcccagctgctgcagggttgacgtcggctacaccaggcctggccccgcacacacggtccctgttgccagcagaatgtcgagggtcccctccgcagagctgactcgtgcctctgcaggactgagccagggcccagccgcctatttcttcactttgttgggtgtgtttgagtggcctgggcttgccacaagtggggggagctgacccacgggcaaagctcccagagccacggcacggatcagggttgtccaacacaaaggcatcaggctcccagcttggctcactctctctgaaaaccacacgctggcccagacaaccctctgcgaaggcgacggtgaactgtggcctggagcccagcctacagccccttctagaccacaacagtccactctctccggggtcacgggcactttggtggggtacactcaggggctgtctggagctgtgctctcccccagtgtgaggaatcatcgaggcttctcggaggaggagagaacagaggacagtgcgtcgggcctgctcagggccaccaaacaagggctgacacagggtcagaggtccaggaccctgggagcttgcactgctgggcagctcctcctgcagtgcccaacgccatccaaaccttgcatctccaagatgacccagaccacttcctgccagcataccctgcgacgggaacttcttagggccaggggggctgcccagacacttgctagctgtctcccatagacctcttttgccaacatctgcttgcagcaggagctgtgccaggaacttccatccaatgatcatgcttccatctgaacaatgcacaagcacgagtcggctgctgctggctgaggaggctccctggccatcagcgtgaacactgtcgtgctcctgcctagaagccctggctgttctcttaaagcggctgtgagtggtctctgcctccatgcagggtggggcttccaaggtcagagtggggctgaagcgacggtggttcctctggccggggttggacatcggatgaggcactgatgtcagaacatgtgcacgtgtgaggtccaaggtccaaggccagcagaggagggggctgcacatctgagcattcggtggggggcgttgcacatcccagcactgctcaagaatgatttgtgtgcctactgagcaaaggttctgctggactctgggtttactgcagctgtggaccagctgctggacagggtcagggtcaggatgtggagggacactggggatatgcctttctccttcgggcagctgggaagatgggctgctgccccagaggaggaagggaagcctgcacgttctgcagcctccaggcccctggacggcctgggcaaagccctctgagccccagacgggcctgtgggcctgaagacctgccccctcctccttatgtctgagacctagccccttccttggggccgtccctgggtccactgatgtcccaatcccagccacgtagaactccaccacagacactgactcttcagcccacagcat

SEQ ID NO: 28454 - DNA, 525 bp, Homo sapiens
  SIMILAR (76)..(276): 311254mologous to Human endogenous retrovirus Method: conceptual translation supplied by author; putative hybrid protein similar to HERV-H protease and HERV-E integrase,accession number U34991,Smith-Waterman Score=79.
atgagtgtctgcaacttcattcttgaagtcagtgagaccaagaacccatcggaaggaaccaattctagacacattttggcaacccagatgggacacatttggcgacccagatgggacacattttggcgacccagatgggacaatcgcctattgccaagtgttaagatggcaggagtggaatcttggattcaccacaccccagttaaattttggacacccccggaggaacctgcgggaccatcagctcaggagtcccaagatcagccagaccagcctcgatacacctgcgaaccattggaggacttgcatctcctattttggaaggaaacatcccagactaaaaaggctcttacctctgatcctgaggaaaaacccattcctccttaaaaaagataagtgaaaacctacataatctttaatacctctccttgcccctttaatggaatccttttactatttcataatattattaagcagcatactaaccatactctttacgataggactacatactatagctcctgc

SEQ ID NO: 28455 - DNA, 990 bp, Homo sapiens
  SIMILAR (478)..(987): 981254mologous to Homo sapiens Delayed rectifier potassium channel subunit (DRPCS),accession number Y49281,Smith-Waterman Score=849.
gattcagctgcctctgaaaacctgtagcccaataatggttattccccaggagccgcgcgaagcatgagctaattttcagtgagcgcggactttggggtaacggttccagcacagcacatccctttctcctcttttcactcatcggcaccgctacctgaaaaccctggccgggtgctggggcttgaggagcagttcccacttcccagtctttttcacttttcacagctgcaaagttcacggagttgaactgcagtgctttcagttcactgctcactctgccacgatcaatctctgttgtaaattttcctcccagagcacgtgacgatgcacttcttgactatatatcccaactgcagcagcggagttgtcagagcgcagagccggacagagcagaagaaccctcttggactggacgatttgggaattcaaaacttgggacaaactgtcagccttgcccctgctgtggaggcagcctcaatgctgaaaatggagcctctgaacagcacgcaccccggcaccgccgcctccagcagccccctggagtcccgtgcggccggcggcggcagcggcaatggcaacgagtacttctacattctggttgtcatgtccttctacggcattttcttgatcggaatcatgctgggctacatgaaatccaagaggcgggagaagaagtccagcctcctgctgctgtacaaagacgaggagcggctctggggggaggccatgaagccgctgcctgtggtgtcgggcctgaggtcggtgcaggtgcccctgatgctgaacatgctgcaggagagcgtggcgcccgcgctgtcctgcaccctctgttccatggaaggggacagcgtgagctccgagtccttctccccggacgtgcacctcaccattcaggaggagggggcagacgatgagctggaggagacctcggagacgcccctcaacgagagcagcgaagggtcctcggagaacatccatcagaattcctag

SEQ ID NO: 28456 - DNA, 388 bp, Homo sapiens
  SIMILAR (257)..(12): 391254mologous to Homo sapiens precursor polypeptide (AA -20 to 657),accession number Y00064,Smith-Waterman Score=83.
gccatagcccctggccacaccaccgctccgtaactctctatggattcctggatgacaatctcctttcctgcaaaccgataatgctcctgagtgtagctggcgtaatctgtaggaacaaatttctggaggctatgaagagatggttctatcttgttggattcttctaggactcccccggtgctgtctttctgcggagcccccttcttctcagcctctaaccagccacccggggagctgagtccttcccgccggcgcccaggctgctgcgcggagctcagacacacgtccatagccggagcctcatttctctggagtctgtgtttcccagatggatattctcagcttttcaaagcttaaataacttctttcaagctaggttctaattctt

SEQ ID NO: 28457 - DNA, 1519 bp, Homo sapiens
  SIMILAR (613)..(951): 361254mologous to Arabidopsis thaliana tumor-related protein, putative,accession number AC012396,Smith-Waterman Score=163.
gaaagatcaatgtggaaatcaatgagtctcctattcatattctgggatgggaacaggaatagcagcccagggcgagctgtggtgaaacagccaatcaagttattgtcagtggtcccctgggatcatgtgcctgttatggaagaagcaacggagccagggaagaaatggacatcatctagaggtttggacttgggaagtgcaactccattgcctttagttgcaatagctggaggagacttcaggttattttccactgtagaaaggggggaacaattaacttcctgcagttgtgagaaagttggaaagaaggagaaagtgagcacctgtaagataaacaaattctcctgtgaatcagagcctggcagagcattcttggctggcttgagcctaggaggaaagcagagcagccttgtgtttgctccaaatcccagcttctcatccatgatgtcgttaaccccagaatccacatgtacccccagtgaatccaacaagatagaaccatctcttcatagcctccagaaatttgttcctacagattacgccagctacactcaggagcattatcggtttgcaggaaaggagattgtcatccaggaatccatagagagttacggagcggtggtgtggccaggggctatggctttgtgtcaatacttggaggaacatgccgaggaactgaatttccaagatgcaaaaatacttgaaattggtgccggaccaggccttgtttccattgtggccagtattttaggagctcaagtcacagcaacagatttgcctgatgtcctgggaaaccttcaatacaatcttttaaaaaacacactacaatgtacagcacatctgcctgaagtgaaagaactggtatggggggaagacctggacaaaaactttcccaagtcagctttttactatgattacggtcctagccctcagatgtggtctacccatcactacttcctggaccaggctgctcacccacccatggtgtacctttccccagcccagggacggtgctgctttgggcaaacaaattcacggttcagccaccgactatgaatttttagataaattcaagccaagtttttgacacaacactgttggctgaatatccagagtcgatcagtcaaactttttaaggggatactaaaatggggactaaatccaaccaaaatgccctttcacaacgttactgtgtcttttgagcaatgtgttagaaattgctttggtaatagacttctttcacaggattgagaaggtagtgcatagaaacaacttgtatacttggaacaaatgtaacaatactgcagaaactttctaatttctaagataatttaagattatctggttaatctaaatatctaaaaagaacaacataaaaacatgaaagtagctttgttggctccaacgaagttacatgtttaataaatcttacatggattaaagaataagggaatttctttcctatttctgctatagagcatatgtttaaaccttgcaatataagcctcgcacatgcttt

SEQ ID NO: 28458 - DNA, 410 bp, Homo sapiens
  SIMILAR (408)..(238): 911254mologous to Homo sapiens molybdopterin synthase large subunit,accession number AF117815,Smith-Waterman Score=257.
  misc_feature (1)...(410): n = a,t,c or g
cacaattatggcatttcttcctacagtcctgcttctatcttgagggccattttaaataacccttcatcctacatacccatttatcttgcttcctttttctcccttttgtcccactagtataagagattgcgcttcagtaaactatcctgaggtggagagaaaaaaatcaaaatgtgatcaataataatagtttaacaaagttaagactgcatgcnnnnnnnnnnnnnnnnnnnnnnngttggatgcccaaaagcactctttgtttcctttacaagatgatgactcttcggatatttcctttttccatatgggcaccttggcttttaaagtatcaatggcatatctcacagcttcaagagatgcagctctgtgggctgaggacacaacaatgattatgcttgcttctgacc

SEQ ID NO: 28459 - DNA, 1107 bp, Homo sapiens; identical to SEQ ID NO: 20710
  SIMILAR (88)..(624): 341254mologous to Homo sapiens molybdopterin synthase large subunit,accession number AF117815,Smith-Waterman Score=188.

SEQ ID NO: 28460 - DNA, 1338 bp, Homo sapiens
  SIMILAR (645)..(794): 681254mologous to Homo sapiens molybdopterin synthase large subunit,accession number AF117815,Smith-Waterman Score=157.
tgattcggtcccgctgtcctaggcgggatggtgccgctgtgccaggttgaagtattgtattttgcaaaaagtgctgaaataacaggagttcgttcagagaccatttctgtgcctcaagaaataaaagcgttgcagctgtggaaggagatagaaactcgacatcctggattggctgatgttagaaatcagataatatttgctgttcgtcaagaatatgtcgagcttggagatcagctcctcgtgcttcagcctggagacgaaattgccgttatcccccccattagtggaggatagtgcttttgagccatctaggaaagatatggatgaagttgaagagaaatctaaagatgttataaactttactgccgagaaactttcagtagatgaagtctcacagttggtgatttctccgctctgtggtgcaatatccccaattggaagggccttacagaaaatacctttgaagggaaaaaagtcattagcttacgaatatgaagcatatctacccatggcggaaaatgaagtcagaaagatttgtagtgacattaggcagaaatggccagtcaaacacatagcagtgttccatagacttggcttggttccagtgtcagaagccaagccataatcatttgctgtgtcctccagcccacagagctgccatctctttgaagctgttgagctattgccctttgatacttttaaaaggccaagggtgcccatatggaaaaaaggaaatatacgaagagtcatcaacttggaaaggaaacaaagagtgcttttgggcatccaacacgttaatcacttatgtttttagagcatgcaatcttaactttgttaaactattattattgatcacattttgatttttttctctccacatcaggatagtttactggaagcacaatctcttatactagtgggacaaaagggagaaaaaggaagcaagataaatgggtatgtaggatgaagggttatttaaaatggaactaaagatagaaggaggactggtaggaagaaatggaataatttaaatgtgaggaaagatatctgtgggtagacatggtccttccatggactaatttctaattgtaactcaacacacattgaggtatgggccctcctcagtgactttaactagctcagaaacggtactcccccaccaaccccacctcaccgccccccatcccggttctgggagagcattgttattaaggatgcatgacaggaatgttggcagaactggaaagtattaaaaaagcattatcagacagtcttgatattatacattttcagaaatatattaaaaataataaactaaaacccatgatttcaaaagtt

SEQ ID NO: 28461 - DNA, 546 bp, Homo sapiens
  SIMILAR (27)..(140): 421254mologous to Streptococcus pneumoniae Orf22,accession number AF295925,Smith-Waterman Score=71.
ctagctctcctccaactgccccagccaaactccgcattgttccgctggttggtggcctgccagcacgctggtgcctgtcggtgtgcgcctctcaatgtcccgatacccgtgtgcatgtctttcttcactggtggtgctcttccttatgtccagcacctgtgtgtctatctttgtgcagagggctatgaggccattttcctccagattctgaggatcaaagcagtcccaattgttcaggatacactttagaggagtataagcttctgcgatcccagacgatccccagttgtaatgggaagtttccttgtcctcctcgcagggcatatgatgggatatgactcgcttcttcagtgccttgctgctccagcctgtgttttccaaaaaatcaaaaccatttccaatactcttgttatgtgttattttattcttatcctttaattgatccaacagctttcctttcagactaaattggcttaattgtaccccagagatgcccacaaaatgctgaattgaatgagcaaggccctcggtctctgatagaggcat

SEQ ID NO: 28462 - DNA, 978 bp, Homo sapiens
  SIMILAR (657)..(764): 391254mologous to Mus musculus SPR2I protein,accession number AJ005567,Smith-Waterman Score=56.
atgacggcagagtttgcctggggaagttggaggagagctctggggaaaaccatccccggagagactccaggggacaatccatctcccttatggctcctccatctgctcagagctcttcctccagtgacacttctcagtgaaacccaaaggctggagcagcaaggcactgaagaagcgagtcatatcccatcatatgccctgcgaggaggacaaggaaacttcccattacaactggggatcgtctgggatcgcagaagaatgtgcaaccagttctcttcaccatccccagcttatactcctctaaagtgtatcctgaacaattgggactgctttgatcctcagaatctggaggaaaatggcctcatagccctctgcacaaagaggtctgagcagcggggcattgaagaatcaagtcacacctgcatcacatgccttgcgaggggggacaagggaacttttcccatttcactactaccatgctggctgcagcagggagttgcgactcagcctgtacactccatggagttccctgggcaccactgcagcagtcccaggcctcctggtctatgggccaagctgcagctgcagatccaggcctcctggtctatgggcagccgcccaaactacagctgtgggtccgagcctccctgtgctcttgtggggaaccggaagcaggcaggatctgccctctggggtgcagcttcagctgcccaaccagcagctgcagacctgggcctcccactccatggagcaggcaggagccagggacaatcgggagctctgccccttccaagttgtgacaaaagcccttctgttaacccaaaaccttcagctacagaaacagaagtagctttttcactctgggatgacaagagcaaaaaacaaagagctacaaggtgccaggaaactgaaaaagggaattcagtaggatcaggaaaatggataaatgaaagaactggagaaattcaaggctcataa

SEQ ID NO: 28463 - DNA, 566 bp, Homo sapiens
  SIMILAR (304)..(537): 371254mologous to Mycobacterium thermoresistibile RNA polymerase beta,accession number AF057489,Smith-Waterman Score=83.
agctttctggctccctcaaaacaaacaaacaacaacaacaacaacaacaaacagccattgttttgagtccaagtgcttcaaaaggctcctgcttaaagactggtctgtggtaaacatggcggttctttctagcccacatgtggcctaaaactctgtcagctctgtcaggcactagtccccggggagatggcccagcgtccatggggtgcgctccagctgctcggttcccaggaacgttgttatttttggccctggtgttattaagattgtgcccagattccctgcaaatcggccactaagcagcatggggccctagtgaaagcacgcggagaacagagggggcagcgcgcttcgggagactccccggccttggagagctccagcctccccggggggcggaggggccggccagaaggactcctgcgccccacacccgcagcgccgacaaggcgtgcgcctggtctacagcgctccccgactgctcccaacccaggggcacccagggccgaagcttcctctacagagcctccccctccttaggaaacaaaacaaaacaaaacaaaaac

SEQ ID NO: 28464 - DNA, 2773 bp, Homo sapiens
  SIMILAR (2542)..(2613): 461254mologous to Drosophila melanogaster GRUNGE,accession number AF217844,Smith-Waterman Score=40.
  misc_feature (1)...(2773): n = a,t,c or g
ttagcttttatggatacagagtgagagtatatagacaagactctgccacccagtggtttactggcataattactcatcatgatctcttcacccgcaccatgatcgttatgaatgatcaggtactagaaccacagaatgtcgatccttctatggttcaaatgacctttctagatgatgttgttcactctttgttaaaaggtgaaaatattggcattacatcacgacgcaggtctcgtgccaatcaaaacgtcaacgctgttcacagccattatacacgtgcccaagcaaatagtcccagaccagcaatgaactcccaagctgctgtaccaaaacagaatacacaccagcaacagcaacaaagaagtatccgtccaaataagaggaagggctcagatagcagtataccagatgaagagaagatgaaggaggaaaaatatgattatatatcacgaggagaaaatcctaaaggtaaaaacaaacacttgatgaataaaagaaggaaacctgaggaggatgaaaagaaactaaatatgaaaagacttcgaactgacaatgtttcagacttttctgagagcagtgactcagaaaattcaaataagagaataatagataattcctcagaacagaagccagagaatgaattgaaaaataaaaatacttcaaaaataaatggagaagaaggaaaaccccataataatgagaaggcaggagaagagaccctaaaaaatagccagcctccctgggatcaaatacaggaagataaaaaacatgaagaagcagagaagcggaagtctgttgacactcagcttcaagaagatatgattattcattcgtcagaacagtccacagtttctgatcataattctaatgatttacttcctcaggaatgcaatatggataaaacacataccatggaattgctaccaaaggagaagtttgtatccagaccacccacaccaaaatgtgttattgatattacaaatgacactaatttagaaaaggtggctcaggaaaactcaagtacctttggccttcagacacttcagaaaatggatcctaatgttagtgattcaaaacactctattgcaaatgcaaaattcttggaaacagcaaanaaagattctgaccagagctgggtcagtgatgtagttaaagtggatctaacccaatcaagtgttacaaatgcttcttcaggaaatgatcacttgaacatggaaaaagagaagtatgtctcttacatttctcctttaagtgcagtttctgtcatggaagataagctgcataagcgaagtccacctccagagactataaaatctaaacttaatacttcagtagatactcacaagataaaatccagcccatcacctgaagttgttaaacccaaaataactcattctcctgattctgtaaagtctaaggccacttatgtgaacagccaagctactggtgaaagaagattggcaaataagatagaacatgagctatcaagatgcagttttcatccaattcctactcgaagcagtacattagaaactacaaagagtcctcttatcattgataaaaatgagcattttacagtttacagagatcctgcacttattgggtcagaaacaggagctaatcatatttcacctttcctaagccagcatccttttcctcttcactcctcatctcatagaacctgtttaaatccaggtacccatcatcctgccttaactcctgcaccccatttactagccggatcatctagtcaaactccattacctaccattaacactcatcctctgactagtggtccacaccatgctgttcatcaccctcatttacttcccactgtgttacctggagtgcctactgcctccttacttggtggccacccacgactagagagtgctcatgccagcagcttgagccacttagcgctagcacaccagcaacaacaacagttgttacagcaccagtcacctcatcttcttggacaagcccatccttctgcttcatataatcagcttggactttatccaattatttggcagtatccaaatggaacacatgcatactcaggacttggtttgccttcttctaagtgggttcacccagaaaatgcagttaatgctgaagcttcattaaggaggctggcatactgtgtagtgcagtttttagaaaaggacagcaccctcacggaaccacgattctcctatctcagcctcccaagtagcggtaccttccaccccgtggtgaagatcagagctctcagcctttttgaaagggtaaagggagacagatttacacagtgtcaggaacgaagggcctcggcagcaagagcatctcagagccgaggctttggccacccgttgtctatcaatattgatgctcaggtactgcgatgggacctcccgggcagggcgtactgtgctctctgtgcgcacacctgtgggcgtcagatacaacagcctgagcagtgctgggcctgcgctttttacagtggtgtagagtgcagtgcagctgaaaccaggttagttgatcttatggtgtcatctagaaaaacaagagatgcagattctgggtcacgaaggcacagtgcccacttgttccgtggcacagccccagagctcctgttgaaggaacagactccaggactgactttccacttgattttcggagctcgcacatcccgagagattcatgttcaagctgcattttagacatagctggcaagagtattttcgtggtaaacgtaaacttactattggtaaagattcttattgaggaa

SEQ ID NO: 28465 - DNA, 359 bp, Homo sapiens
  SIMILAR (13)..(90): 531254mologous to Halobacterium sp. NRC-1 Vng1530h,accession number AE005066,Smith-Waterman Score=64.
gccagggagtgctggggaggggagaagagggaagaagcaggaagagagcagacacagggtggagactcaccagtcctgccaggtggggctttgtctggtccggactgtctctggtacgagagggcacatgcacattctcacgcagctccactctccctggccttcaagcctgctgcccccgagctccttttacagtgccaggtctgagtgtggctgaaagagccatctgcagagcctgctccatgcacatggtcagctctttgtggaagctgcttactggggggactttagaactcagcctttttgtcccacagaccgcatacttctggtggttttttccccctaaattgaaccactcc

SEQ ID NO: 28466 - DNA, 594 bp, Homo sapiens
  SIMILAR (5)..(169): 261254mologous to Chironomus pallidivittatus gamma protein constant region,accession number X06434,Smith-Waterman Score=63.
ctaaccagattcaggtggtgcaagtcccttcacatctggtggggagtcacagccagctggatcagcactgaagtaggccaaagagcaaaactgtggacagaaaggaatgctgaactcctgccagggcagagcacctggaatgtccgtatcttcaaggctacagtcaaggtcattaactgtgactgagcctacagaggatgggctagagggttgcagagagagctcaagttcacaaaagcaataagggtcttgcaggatttggatgtaggggagctccaagcaattccctccctccatgctaggatccacacagcttaagtctgtgtttgagatcttcagcacacttgttggtacttctgtcctccacagtgagtctatttgctcctcgagggccaaaaccttgtcttcagtgtccacatacctatctgagcactgccattgtacatgacctaataggagctcagtggattcaatgatctttttatcattttgctttaattttactctaatgacataaatgtgttgagcaaaatatcgatacgctcttcctctggccgcgtaagatgtgcctgcttctcctttgccttctgccat

SEQ ID NO: 28467 - DNA, 918 bp, Homo sapiens
  SIMILAR (302)..(568): 731254mologous to Mus musculus HN1,accession number U90123,Smith-Waterman Score=333.
tcaattaaagatccggttgctgctttccctgcggcactgtgacagggataacagaacagcgttgtcccctgcagttttctcacacctatttatgccgttaggtaggaggcggttttttggcctgtggaggacagaagtaccaacaagtgtgctgaagatctcaaacacagacttaagctgtgtggatcctagcatggagggagggaattgcttggaggtagggtaatcacttacaagaggatagaaggatattcttgtcagcattctgcttccacgccagcctaacttgctcctctgcgccatgaccaccaccactaccttcaagggtgttaaccccaacagcaggaatagctcccgggttttgcggctgctgggtggtggatccaatttttcattgggttttgatgaaccaacagaacaacctgtgagaaagaacaaaatgtcctctagtatctttgggacacctgaagaaaatccaccttcttgggccacattggcaggtgccaagtcagattcaggtggtgcaagtcccttcacatctggtggggagtcacagccagctggatcagcactgaagtaggccaaagagcaaaactgtggacagaaaggaatgctgaactcctgccagggcagagcacctggaatgtccgtatcttcaaggctacagtcaaggtcattaactgtgactgagcctacagaggatgggctagagggttgcagagagagctcaagttcacaaaagcaataagggtcttgcaggatttggatgtaggggagctggcaggactggtgagtctccaccctgtgtctgctctcttcctgcttcttccctcttctcccctccccagcactccctggcttatgcattttgaagtgataagccagtttagaattcccacatctcatttgttcagccat

SEQ ID NO: 28468 - DNA, 435 bp, Homo sapiens; identical to SEQ ID NO: 28298
  SIMILAR (283)..(432): 641254mologous to Homo sapiens envelope protein,accession number AF072508,Smith-Waterman Score=143.

SEQ ID NO: 28469 - DNA, 6507 bp, Homo sapiens
  SIMILAR (5355)..(3754): 881254mologous to Homo sapiens PEX1,accession number AB008112,Smith-Waterman Score=2320.
ctatactaggggttgttttataagcatttctaatggagggtcctgccttgcagctcttttggcttcaatatctgcttggcagttctcttctatttccctttcctttcctttctgatgaccccggcagtgtaagactgccacctctttaggtttctgtacagccaataataatttcctaatggcttcctgatgtttgataggtgttctctcagaagttaggaattccctttctttccatattgctgcatgggcatggaggactaggtaagcatatttagagtctgtatatatatttgcccttttttcttctcctaattctagtgcccaagtgagggctattagttctgctagctgagcactagttcctggagtgaggggattactttcaagtattccattatcactgaccactgcataccccacttttcgaagtcctttttctacaaaggaacttccatcagtatacaagttgaggtcgggatcagtcaaaggaacctctaaaaggtcccctcgagtggcataggtttgagaaattacttgttgacagttatgttttatcttttcttcattgtctggaagaaatgtggctgggttaagagttgcacaagtgcacagtcgcagcactggcccttcaagtaatagagcctgacatttaagtaaacagttgtctgacagccacaagtctcctttagcagtgagtatgccattcacatcatgagatgtccacacagtaagatctcttccctgtattattttaactgcttcagatactaagactgctactgccaccacctttgccactacatcaatttccttagtcaggtatgccacaggttgcaagctcatccctcggatctgtgtaaggactcctagagctattcctgttttttctgtgacatatgaagaaaagtcttgccctgttggcaaacttaacactggggcttgggttagggcctggaaagccacttctacttcagttgtccatcttactaaatgggtattggctttctgagtttccttaattagtgtatttaatgacctggctatttcgccatacctgggaatccattttcggcagaaacctattacgccaaggaatccccttagttgctttagggttttgggatgaggataagccagtataggctggatgtgttcctcactgagggccctggtgcctttggataattttagccctaagtaacctgctgtgagcagagttgagcctttggtttggaaaccatgtagccacaggtagcgaggaaattgaagagcgcttgggtggcttgatggcacaaggtttctccactgtctgttgggtttctgtactcctaaaattggagtactgcaggggttactgcatggttttactaggccttgggcttttaggtccttaacaatcttttggagtccttgttgggccttgggtctgagggggtactgcctttggtagggaaaggaggtggaatcctttagtttaacttgaacaggacgggcattctttgctcgtccatattgtccttctgttgcccagacttcaggattaattccttcctcaagcaggggacaacaaacgggtgttccttctcctatgttcaggtgtataatggcccctgcttttgctagaatgtctctcccagcgtgcccaacattgcctttgtgctcaggggtgagttcctttccagggtgcgtaaccacccatggacctctgtttatcggattagttatgcttaccgatgtagcagtcctgcaccccttttcccgcctttcttgaccacaaagaaaggggtctgggctgctggattctagtggtcctttaccagcatgcccaacattgcctttgcgctcaggggtgagtcctagagctgggctgggttccttttgaatcaggattgagatagtcttttgattctgtaagtactttaaggcttggctgagtgcaaacagctcacacgtttgaggagaccagttattaggcaatttttctaactctgcttccacaagagtccccgtatcaattactgaatacccattgtggtttttttcctcaatcacctgggaggaaccatctatcgtcctgtcctgagtcttaagtccggtggccacactaatcgtttttaactggccgacaagtgcccggtattttcctccaattttagccgtgcaggaacaatggcaagcctttagcccaattgggagcggcaatgggcgcctcgctggatcaggagcacagcggacacccttatcagcataagcatttcctagagtaatgggatctgacgccttttggtggcccttgcagtgtgtgactccagcttcctttggaagtaaagcagccttgagaagagtttttattaaagaggcattaatgatggaggacccttgcgtagtgaggaaacctctttcagcccatataacagcatggtggtgcaagatatggaaggcatatttagagtcagtataaatattgacgtgtagtccctttgcaagagtgaaggcccgagttaaggcaatcagttcggcttgctgagaggtagtggaggggggcagagcagtagcctcaatgatggatgtggaagattctatagcatagcctgcctttgctggtgagtggcgatcaggcctggtggaactgccgtcagtaaaccaaatgtgatcaacatgaggaacagaaaagaaggaaatatggggaaatggggtgaatgtcaggtagatcagagacatacaatcatcagggtcaggtgtggtatccagaataatgtgggaggccagattgaagtctgggccaggaagaatggtaattgtgggagactcaacaaagagtgaatacagctgaaggagccggggagcagaaagtatatgcgtcaggtgtgagaaagaaaatagattttggaagttgtgagagctgtagagagtgagttgagcatagtttgtgattttgagggcctctaaaagtattagggcagcggaagctaccgcatggagacatgatggcgagcctaaaacagtaaggtcaagttgtttggacaaaaaggctacagggcatggtcccggtccttgtgtaagaattccgactgcacagccctgcacttcggctgtgtgtaatgaaaagggttgggatgagacagggagagctagtgtgggagcagtctctaaagctgtcttgactatgcctttagctccagccacctctttaagaggaaattgttgggcagatgggggagggctagtcacagaacgaaactgtaagccggactgagtgtgaggagaggaggtgataaaaggattatagggtgggggagcagaggctgaggaagaattgggacctggctcggcctggtgaggagcagctttatggtgaaaagagggcaggtatgtcagctcagtgatttcatcaaagaatttctgtccaggtcgaaacattgttccactttgattttttctcctctttggattttgaaagctttcatatagctcagcaaaattcttccagtcatcttcactaatggatggtcttgtgtgaccaagtgcagtcattaaatgtgactgactaatagccagtctggttttgattggtcctggttggttcatggattcgtcctccaaatcagaagaggttccatttccaagttctgattcataagagcttccaaagtagagccggtacatattgaattttgattcatctggaaggatctcggacatctctaaagaaacaagggactgatctaagccacattctccatctccagctgaatcgtcagagccactgctatggttaagaaagaccattgaagacagacttaggtcactatcagagctggaacttccatcctgatcaggaggaggacagtatacacatttatctagtcgaccaggcctaagcagggcagggtcaatcaagtcagggcgactagtagcagccaatacataaacaccctgtaagccttctactccatccaactgagtcagcaactggttaactactcggtctgtaactcctgtattatcatgaccccgccgaggagcaatggattcaaattcatcaaagaaaagaatgcagggctttgcagcctgtgctctaataaaaatatcccgaacagcttgttcacttgctccaatgtatttgctgagtaactctggccccttgacacttataaaattcattctactctctcgtgcaattaccccagctagtaaggtttttcctgttccaggcggaccatacaacagtattcctgttctttgtcgtatgggcaagtttgcaaataattctggatacttggcaggtaactggatagtatccatgagtatctgcctaacttcatgtaacccaccaatcttgtcccaacccaggtctctaggtttatgcaggttgacacttcgcaaagacgcaggaagaaatccgcggagagccttttggaagtccaatgttgttaaaactaatttttctctggtggatatactctgacgagagagtcgagaatgtatggctcgatccacaagtactgtaaaatctctagccacaaacccgccagtttctttagctacatgctgcaggtcaagatcggtgaacttgtttatatcacagtccaatttattttttattacattacacagaatttcacatctttgttcctgattaggaggctgaatgtgttggacgcactgaaatatgtgaactccttgagcagaaacaagtaaaggatgtagagattgctgagactgacttgtggcaatcagtgcaaccaaacttcccatggagataaactcttttatcatatcattcaaagcatgagcaagccgctggctctgcaccgcatcaggactgtgctcatgttccgggacagcaggcagtccagcaatgaggtcaaggtcatccagcaggacaacagatggctgcatccacactgcctctgagaaagccacctctagggttttttgtatgttttcaagcctttttcctcgtaaagctttacagtcaactctctccacatgggcatccagtttgtcaaatgcttctttacagattgctttggctaaagttgattttccacttccctttcctcctgtgagtaaaagagctccattcctaagtcctgcaacaagagacatcagctgccgagacaaagggcgtcccaggaggctgtgagtgatgtgctccaaggaggatacgcctaaggaattcactccttgttttcttcttttaccataggatctagaaggaccatctttagtttccagcttaataaattcttcctctgatattaccaaaggaagcatggtggtagtagactgctgtagccatgaataaaatacagtttttatgtcttcttcacttatgtctttaggccagactttcccaagatggagaacttctacatttttggtatatttgatggcattgttcaattcttcaagtccattccagactacttgtagcacacaggccttctcatcttcttcattatgatctgacctaatttttttttgatctagtggctctgacatctgcttctctttttcaggtgataacacattttgttttgttttactttgctgttgctttggagaaagtagcttaactagctttccatatgtcacagtaaagctgggctctacatcaaaatattcctggtcccatggaaatacatgaatggcacagtgtttatgaaaaacagaggttgctgacgcgttatatatactaggaggttgagatttgcatactctgaaaatattgtctagaggaacaacctttgactgcatatttttgaatgcattgatttcagttaaaccccaagatgtctcttgtttcttctcagattgaaaggaaaaaatgcttcctatcatagtccataaacttgctactgatgatgagtcaactggaatctctgactcgttttcattagattcagtgattcccacagtatttgactgaagttgcttggtttgaagttctttcatcattcctttctggtctcttccataactatgaagttttttatattcagcatcagcttttgaaaatgtattctctttggctcggcgtgtctttggctgaataaggagtttggtgtcagtttccagccttccataagaggcagctggtattagtgcaacaatttggataaatatgtacgtttgttgatcaacccaaacaggaaaaatggcttttggaaaaactattcgaatttgatctagaagatgttgttcaagggaaacagcatgcagctcctgtcccccatttgagagtccaagtttttgaccaacttgtctgttaatttcagccacattttcaccttgatcactaaaatgcctgccttccacccagctcaagaatgcaggctggtgactccagaccacttctatagcttgattctgcagcagatgcagctgggccacgagacgccgcggcaggtggaggaagcagtcgcgagcgttggtgaaggccacagtcactgccgccccgcctcccccagcacccgccaggcgatcgctgccccacat

SEQ ID NO: 28470 - DNA, 1929 bp, Homo sapiens; identical to SEQ ID NO: 7522
  SIMILAR (1)..(861): 801254mologous to multiple sclerosis associated retrovirus polyprotein,accession number AF009668,Smith-Waterman Score=1223.

SEQ ID NO: 28471 - DNA, 398 bp, Homo sapiens
  SIMILAR (396)..(202): 861254mologous to multiple sclerosis associated retrovirus element gag polyprotein,accession number AF123881,Smith-Waterman Score=299.
ttaactgcttcctgctgaattggggcatagtaggggtcgtgcagttgagatttcctcgtgaggggtgccttcaatgtcatcaacatcaaagcatgggctagtgggccggtccaggggtccgcagtagatcttagtcatggactgcatctggggctccatttgaagaacgatttgtagttttacagcttcaattctggaatagacaaaccagagatcgccaaactctcgggctgcagttttggcggcacttttctcatttggggttagtgactgatctagcagtaacattatatctctccatgtcagatcaaaggattgtcttaacccttgtaaaacatcaatatagccatcagggttatctgagaatttacctaggtctattttaattttcctcaagt

SEQ ID NO: 28472 - DNA, 309 bp, Homo sapiens
  SIMILAR (157)..(306): 641254mologous to Homo sapiens envelope protein,accession number AF072508,Smith-Waterman Score=143.
gaacccagcccaactctagaactcacccctgagcgcaaaggcaatgtcgggtatgctggtaaaggaccactagaatccagcagccccaacccctttctctgtggtcaagagaggcaggaaaagaggtgcaggactgctacatcaaatagaagctgtgaagctgtaaaactacaaattgttcttcaaatagagccccagatgcagttcatgactaagatctaccacggacccctggaccagcctgctagcacatgctatgatgttgatgacaccgaaggcacccctcctgaggaaatctcaactgcatga

SEQ ID NO: 28473 - DNA, 1088 bp, Homo sapiens
  SIMILAR (932)..(1057): 831254mologous to Homo sapiens syncytin precursor,accession number AF208161,Smith-Waterman Score=171.
acaatgaagaacagatagaacataactgtcaacaagtaattgctcaaacctacgccactcgaggggaccttctagaggttcccttgactgatcccaacctcagcttgtatactgatggaagttcttttgtagaaaaaggacttcaaaaaggggggtatgcagtggtcagtgataatggaatacttgaaagaaatcccctcactccaggaactagtgctcagctggtggaactaatagccctccctcgggcactagaattaggagaaggaaaaaggggctcatcagaatctatatgcttcctctcattcttagtgccccctatgaccatctacactgaacaggatttatacaatcatgtcgtacctaagccccgcaacaaaagagtacccattcttacttttgttgtgggagcaggagggttaggcggattaggtactggcattggcggtatcacaacctctactcagttctactacaaactatctcaagaactaaatggtgacatggaatgggttgctgactccctagtcaccttgcaagatcaacttaactccctagtagcagtagttcttcaaaatcgaagagctttagacttgctaaccgccaaaagagggggaacctgtctatttttaggggaagaatgctgttattatgttaatcaatccggaatcgtcacagagaaagttaaagaaattagagatcaaatacaacgcagagcagaggagcttcaaaacaccggaccctggggccttgtcagccaatggatgccctggattctccccttcttaggacctctagcagctataatattgttattcctctttggaccctgtatctttaacctccttgttaagtttgtctcttccaaaattgaagctgtaaagctacaaatcattcttcaaatggagccccagatgcagtccatgactaaatctaccacggacccctggaccagcctgctagcccatgctctgatgttaatgacatcaaaggcacccctcctgaggaaatctcaactgcacaacacctactatgccccaattcagcaggaagcagttagagcggtcatcagccaacctccccaatag

SEQ ID NO: 28474 - DNA, 296 bp, Homo sapiens
  SIMILAR (47)..(199): 1001254mologous to Homo sapiens G-protein coupled receptor HUVCT36,accession number W51251,Smith-Waterman Score=288.
gttcagatattctagttgaattggagttggtgggctagtacaccttctgtgcaacctgacggtggccgacctcttctacatctgctcgctgcccttctggctgcagtacgtgctgcagcacgacaactggtctcacggcgacctgtcctgccaggtgtgcggcatcctcctgtacgagaacatctacatcagcgtcggctctcctctgctgcatctccgtggaccgctacctggcagcgtgccatcaactactaccgcttcctggtgggcttcctcttccccatctgccgaattcc

SEQ ID NO: 28475 - DNA, 470 bp, Homo sapiens; identical to SEQ ID NO: 8521
  SIMILAR (465)..(361): 511254mologous to Homo sapiens Human secreted protein, SEQ ID NO: 6606,accession number G02525,Smith-Waterman Score=66.

SEQ ID NO: 28476 - DNA, 1926 bp, Homo sapiens; identical to SEQ ID NO: 8034
  SIMILAR (1063)..(1431): 911254mologous to Homo sapiens aldose reductase-like peptide,accession number U37100,Smith-Waterman Score=591.

SEQ ID NO: 28477 - DNA, 333 bp, Homo sapiens; identical to SEQ ID NO: 13112
  SIMILAR (121)..(258): 931254mologous to synthetic construct chloramphenicol acetyltransferase,accession number A02739,Smith-Waterman Score=244.

SEQ ID NO: 28478 - DNA, 633 bp, Homo sapiens
  SIMILAR (433)..(630): 741254mologous to Homo sapiens envelope protein,accession number AF072508,Smith-Waterman Score=225.
atgcccacttactgcccgggggcttccttgctgatactgacatataagaccccaaaggagctgctgagcatttatgtgagtacaatccggaagtccagatgcagggagaggaggaacagaagactgggagctagaaatttccgctctgaagaacaaatctatgaccaatggaggctagatcaagtgggtaaatttttcccctttcctagacctagagagaattaccactttggtagtgaacatgtgggatctttttcacttgataaatgttgcaacgagaaactgtatgaagtcattgacttgcatttgaaaaagaaatttttaaacactgaaacactgagtttggtgaaatgtgaagtttcaagatgctgggtaactctgaatttgcttctcccatatcacgcttattccaaatttaactctcttggagggaacggcagaatcaaagctgtaaaactacgaatggttcttcaaatggagccccagatgcagtccacaactaaaatctactgtggtcccttggaccggcctgctagcccatgctccgatgttgatgacatcgaagtcacccctcctgaggaaatctcaactgcacaacccctgctacaccccaattcagcaggaagcagttag

SEQ ID NO: 28479 - DNA, 1368 bp, Homo sapiens
  SIMILAR (1368)..(877): 851254mologous to Homo sapiens Protein encoded by the endogenetic fragment of HERV-W,accession number B07702,Smith- Waterman Score=719.
tcagtaggaggcttcccttttctctaatatgcatggcaaaacactggctccctgctttgcctgaaaatggctatatgaagcagttctgtgtctctggtctgggtgttttgtttcatggctgtgtttttctctgctggcatcactgttgttttgtactctaggtttggagcctaggaagtccaaggtcaaggggcctgcatctggtaaaggccttctttctgtgttatccccgctccaactgcttcctgctgaattggggcatagtaggggtggtgcagttgagatttcctcaggagggttgcctttggtgtcattaacatcagagcatgggctagcaggccagtccaggggtccatggtagatcttagtcatggactgcctctggggatccatttgaagaacgatgtgtagttttacagctttgattctgggaatccatattcggcagaagcctggtatgccaaagaaccctcttagttgctttagggttttgggatgaggataagccagtatgggctggatacgttcctcactgagggccctggtgcctttggataattttagccctaagtatttagcctgttctgagcagagttgagctttggtttggaaacctttgtcccctggggcagtgggccttccattgattcctttgacataaggggcatggatgagggggtggcttatttgtatttggacaatctttttaaagtgtccttgtagaccacactggaagcaagccctattaggcattggatttgcccagcctttccgtgttccagagcctccaaagtctgcttgcctgagggccataactaaagcggtagccttttttaaatcccgtttgtcttgttctgcctgcttctccttatctctattatgaaaaaccaaggttgccaagttcaatagggtttctaagtttttgaagttttttctgatgtctgtagctgactgagtgataaacttatcctttaagattagttggccttcaatagagtcaggtgacagagaggtatgctttctcaaggcctcccttagtctctccagaaaggcggtaggattttcttccttaccctgtgttatagtggacatcattgaataattcatgggctttttcctagttttccttagtccttctagcatgcaagttagcaaatgtctgcggcaccaatctccgtgttttgattctgtgtcccagtgagggtgtacactgggaacttcctgctggcctgtgggcaatcgttctctttcctctgttgtcatcctgtcattgacctgactgagataccagagatcgccaaactctcgggctgcagttatggtggcacttctctcatttggggttagtgtctgatttagcagtaacat

SEQ ID NO: 28480 - DNA, 714 bp, Homo sapiens; identical to SEQ ID NO: 23137
  SIMILAR (67)..(303): 311254mologous to Mus sp. ICER=inducible cAMP early repressor,accession number S67786,Smith-Waterman Score=82.

SEQ ID NO: 28481 - DNA, 492 bp, Homo sapiens
  SIMILAR (417)..(473): 731254mologous to Plasmodium falciparum histidine rich protein B,accession number M17028,Smith-Waterman Score=90.
atggtggcaagcctcgtgttctctgacctggggttcttggcctcacagattccaaggaatggaatcttgggccatgtggatgaacccaggcacgtagctgtgcaggaacaacggcaagcctttagcccgatcgggagcggcaatgggcaccttgctggatcaggagcccagtggacatcctgctggatccagagggatggaagtcagcggcaggaaccagatgtttctaacacagacaaatcctctgtcctcgagagctcacggcaagtggtgaagacaagctacacaaacccctgggaagaaaacatcatggaaaaggctgccaaagatcctgtaagctgccatgggagcaaaggaagactctgttcggcccacctgggagccttcgacagagaaaatacacagcagctgctatccatcgtcatcaccagtgtcatcatcgccatccccatcatcaccaccaacaccgccacccccccagcgacacactag

SEQ ID NO: 28482 - DNA, 1080 bp, Homo sapiens
  SIMILAR (526)..(936): 821254mologous to Homo sapiens reverse transcriptase homolog= pol {retroviral element},accession number S61070,Smith-Waterman Score=555.
acagctttagagactgctcccacactagctctccctgtctcatcccaacccttttcattacacacagccgaagtgcagggctgtgcagtcggaattcttacacaaggaccgggaccatgccctgtagcctttttgtccaaacaacttgaccttactgttttaggctcgccatcatgtctccatgcggtagcttccgctgccctaatacttttagaggccctcaaaatcacaaactatgctcaactcactctctacagctctcacaacttccaaaatctattttctttctcacacctgacgcatatactttctgctccccggctccttcagctgtattcactctttgttgagtctcccacaattaccattcttcctggcccagacttcaatctggcctcccacattattctggataccacacctgaccctgatgattgtatgtctctgatctacctgacattcaccccatttccccatatttccttcttttctgttcctcatgttgatcacatttggtttactgacggcagttccaccaggcctgatcgccactcaccagcaaaggcaggctatgctatagaatcttccacatccatcattgaggctactgctctgcccccctccactacctctcagcaagccgaactgattgccttaactcgggccttcactcttgcaaagggactacacgtcaatatttatactgactctaaatatgccttccatatcttgcaccaccatgctgttatatgggctgaaagaggtttcctcactacgcaagggtcctccatcattaatgcctctttaataaaaactcttctcaaggctgctttacttccaaaggaagctggagtcacacactgcaagggccaccaaaaggcgtcagatcccattactctaggaaatgcttatgctgataagggtgtccgctgtgctcctgatccagcgaggcgcccattgccgctcccaattgggctaaaggcttgccattgttcctgcacggctaaaattggaggaaaataccgggcacttgtcggccagttaaaaacgattagtgtggccaccggacttaagactcag

SEQ ID NO: 28483 - DNA, 5229 bp, Homo sapiens
  SIMILAR (3579)..(2542): 221254mologous to Sus scrofa domestica submaxillary apomucin,accession number AF005273,Smith-Waterman Score=98.
tcagatcagaaatttgtctccgacgtaaaggatagccataatgtgatagggaattcccagaagatgctgatgctgctggtccagaaaccacactttaaacaccattgtgtttggaggaaggtgagcaaggtggaggctaggttgaaaatgtttaacatctgccatgcctgaagcaccagtgacggtggggctcactactcctgtcatgcctgcatttccagatgttgagatgatgggaactgaagtttcagtaatgcctgtagtaaaaggttcggtgagaggacctagagttgttcctgtgcttgggccaccggtaaccagtgtaattgctgctccggtgcttaatatggtggtagctgttgtagtggaaacttctaaaagtgaagaaaatttctggccaacgagctgatctttgcatgtttttgcagtcactgtgccacaaggttcataatgccatctgcattccccaggcgcattgtagtaatcacagtagacaggacacagatttggttttctccatgagacacagactccaactgcactacacgcctctgcgtacatagccacggcagtgcagaatcccaggtacttcccctccatgtcacatgcacaggcttcttcaatgcacacatcatggtaagcactggggtcaaccttgttgtggcagtctctgaaggtgctgtctctgaggatctcacatttccgcacagcccaggctttacagtatgggtttgaatcacatgggaaagtctgagccactgtatctgaacattcttggcttgttttccaactattcccaaattccagtgctccagaagctactgaagagtatcttgttgtgaaatcatccttgagatcaccattgttatttccacaaagaccacacactttgccctcaagaaatgaatactggcagagaccgtcaaaactgtaactcttcccatcaaaagttctaacatgaccttccccatagatgtggcagatggtttgacattcattttgggtacaactccaagaccctttaatgcaggtacatttattgtcatcaatatggatgagtttgcctggttgcatgacctcgtcgtttatgtaacagtcacactgagatttcagtacacagtttccttcattattctggtacattgcatcagggcaggtgcatccatcaactggaacatcttctacatcacagctcctatctctttctgacaaggatcggcaagaactattacaggcttttacattgtacttgaacactaggccacttgggcaagaatgttcacataggccagttctccatcccactatgtatgtttccttctcagcacacgctttcacatagttgcctaaaattgtacataggcagtcctgactgttttcacaagtgcaagtatattttttgcattcctcatgatagggtttagggttcacaattgggtggcaggaagccaaaggcccacttgaatcaagaagaattccacagtgcctttcagcaaatttttctttttctatactaatacatgaagaggggtttcctttaggacaggacatcatttcccaagagttagcaaatgcctgagatgtcttctccaatatattctgacttgacatgaaatcatcctctgctttgttgttgtaggaaccacagagtcccacagtgtctgtgaattggttgggtggcatagaaacatacaattgcatcacaggaacaatttgtatttgtagtttcacatgaaagtatgtttctacttgaaggtatgaggaagatgcattgaatatctgtattttatctgaatagtaataaccttgatttctaatcttgtcatttgtgactgttccatcactgttgaatacgtatttgtcaactggaacagagtgaacggccaggaagtggcagtttccaggaaagttgtacttaacaccatcaaaggtggtaagggaacttccttccaccttacatcttccagggcataatgcttcggtgcaagaccactttgcatcttggcatgtgcactgagaaccacaaggaccttctcggacttctcctggctgatacactgttccactggattcacagggacattcagcttttaatacacattttcctttctctccaatgtcatccaacagataaccttctgggcaggtgcagccgctcacacattcactgtcttgaaaaggagccacattagaacaagttgcagggttggagggtccacattctttgtagatatgttgttctggacatctttgtgttccacaaaccacatcggagtcgcttcgccaggattcaaaggtgccaggaccatctgaggcacagaggcgggacagttctgaataagtgtcacatgtagatgttttgtctctagtttggcagtattcatcaatgcagatcattttgtagtcattggatagagcagcaacctttccacatttctcaaagtaggttccaataattttgttacagtgctgtattccatcttcacaaacttcatagcttttaccaacagcattgggacaatcaccaggaattttactattggcaatgtgctcattaatatcttgccctgaaccactaaggccagtttcaccaaattcatttagtccagaagcaccaacaccaagttcatctgcactcttacctcctccaccacttccagaatcagaagaccaagtgtttcctcctgagtcactgacatcagatccaggactcaagtttccagcctcatcagggtcactgcttctctttctattcccaccagttctactgagttcaacttcatgttgatcagatgaccccaatatgactcctgaatcttcagagatgccactagaattttcaaacccatttcttgcacttgaatcacctaaatcactagaactagattctctagtaacttttattccattttcactaagctcattaccaccaaatttccttgaaccagaatacttaaaatcaaatccagctccaactttttttcctccaagtccaaattcaagagactcaagcattcccactgagctacttgaatcagatccaaaacctttgaatccagcctcagcagatacactgccactcattccattccctccaatttcattgattccaaatccctcttgaccagaatcccataaattggatatcgaatttagagagccaccaccaacaaattgattctcacttctgaaactggtatcacctagatcaatggaaacagatcctccagaactactcgtttgatttccttcaactgttttgctactaatgccagtgtcaccaaatgaattcgaatcagaaacttcaaaaccaaatgcagcatcacctttccctgctccaagtttcaaaccagaagaaccagttccaactgcatcaggtccaaagactatggtttcacccccagcagatccactgcctctagtttctctcccatcagctttactgacttccaatcccttttcatcagatatcccccaaccaaatcccacatccagagaggcaccactgctactaaagccagcaccatatcttgtgttggtgctatctgctgggctgtcttctgaccttgaattcccagcatcccagcgttctctggacttgtcttcatcctctcctgtagcaccaaattcaaagctaaagagtggcttttttttgtctgagtcaccagaggatgaactaccataaaaaaagccacctggtggggtgtcttctgactttgaacctccagcatcctgactgtctccggacttgtcttcagcctttcctggagcaccaagtcctaagctaaagaatggctttgtcctgtctgagtcaccggaggatgaactactgttaaaaaagccacctgctggggtgtcttctgactttggactcccagcatcctgacgttgtctggacttgtcttcagtctctcctggagaaccaaattccaagctaaagagtggcttttttctgtccaagtcaccagaggatgaactaccataagagaagccacctgatctgcttgctgctattttaccatctttgaagaagcaccaaagtgccacaaccaagtaccataagatcaacttcatggttgtgatttgggaccctgaatggacccttaagacagctaggcaattatattttctagtccatttgctgtcatattcttctatttcatatcttctctcctctccaacatccaacacctctttcccatcatccctttctgttaataacattatttccagttttacttcgatgtcatcaacattggagcgtgggctagcaggctggtccaggggtccacagtagatcttagtcatgggctgcatctggggctccatttgaagaacaatttgtagttttacagctttgattcctgcttttcgaagtcttttttctacaaaggaacttccatcaatatacaagttgaggtcaggatcagtcaaaggaacctctagaaggtttcctcgagcggcataggtttgagcaatcacccgcctgctcggcttggcggggagcgggatgtcgctgggggcgatgccagacgggccgcctctgatagcctctaggctctggcgcgcttccccgcccctcccgcgcaggcgggcgtgggatcccggctgatccagtccgggttttgcggcggagcgggcgggctgcgcgtgcggcggcttcaactgtcgcggtaggcagcagcaggctgaagggatcatggtgcagtacgagctgtgggccgcgctgcctggcgcctccggggtcgccctggcctgctgcttcgtggcggcggccgtggccctgcgctggtccgggcgccggacggcgcggggcgcggtggtccgggcgcgacagaggcagcgagcgggcctggagaacatggacagggcggcgcagcgcttccggctccaggtgaggcaacagccagtctgaagcaacgctagtgtctttcccccaggagctgcacataggtcaagcacgatgtccccaggatgatcccaggcagcaaagttattgaccagtgcaccatacttctgctctgagaggagactgacacggattgatggccaaagatctccaaactgcacactgtaagtcatgtcaaaattctgcaaagccagtcgaacagcagggaatttgggctctgtggcagcccatttcttcttatatcgatgtctccgcgggaccgtcgcgaggtccacacgcttcagcagctcccggacacccctcagtgtcagcgcagccat

SEQ ID NO: 28484 - DNA, 2300 bp, Homo sapiens
  SIMILAR (94)..(1524): 971254mologous to Homo sapiens G-protein coupled receptor HUVCT36,accession number W51251,Smith-Waterman Score=2464.
tgttatttatttatttatttatttatttatttatttatttatttatagagacaagggcttgccatgttacccaggctggtcttgaactcttgagctcgagcgatccccacctcccaaagtgctgggcttacaggtgtaagccatcatgtccagccgttcagatattctagttgaattggagttggtgggctagtacaccttctaaattaaatgagtaaaggatttagaatggtgcctgacacacagtaggtgctacattcatgttagctactattataaacctttcctgcctctgactttcagggtcttgcccaccaccagcgatgcccagcccttggtagagcttgaaccaccttctataaacaggatggcggtggagagacaggcccagtccctgagcccatgaggagtgtggccccttcaggcccaaagatggtgaacatcactgcagacaactcctcgatgagctgtaccatcgaccataccatccaccagacgctggccccggtggtctatgttaccgtgctggtggtgggcttcccggccaactgcctgtccctctacttcggctacctgcagatcaaggcccggaacgagctgggcgtgtacctgtgcaacctgacggtggccgacctcttctacatctgctcgctgcccttctggctgcagtacgtgctgcagcacgacaactggtctcacggcgacctgtcctgccaggtgtgcggcatcctcctgtacgagaacatctacatcagcgtgggcttcctctgctgcatctccgtggaccgctacctggctgtggcccatcccttccgcttccaccagttccggaccctgaaggcggccgtccgcgtcacggtggtcatctgggccaaggagctgctgaccagcatctacttcctgatgcacgaggaggtcatcgaggacgagaaccagcaccgcgtgtgctttgagcactaccccatccaggcatggcagcgcgccatcaactactaccgcttcctggtgggcttcctcttccccatctgcctgctgctggcgtcctaccagggcatcctgcgcgccgtgcgccggagccacggcacccagaagagccgcaaggaccagatccagcggctggtgctcagcaccgtggtcatcttcctggcctgcttcctgccctaccacgtgttgctgctggtgcgcagcgtctgggaggccagctgcgacttcgccaagggcgttttcaacgcctaccacttctccctcctgctcaccagcttcaactgcgtcgccgaccccgtgctctactgcttcgtcagcgagaccacccaccgggacctggcccgcctccgcggggcctgcctggccttcctcacctgctccaggaccggccgggccagggaggcctacccgctgggtgcccccgaggcctccgggaaaagcggggcccagggtgaggagcccgagctgttgaccaagctccacccggccttccagacccctaactcgccagggtcgggcgggttccccacgggcagaatcaaagctgtaaaactacaaatagttcttcaaatggagccccagatgcagtccatgactaagatctaccatggacccctggaccggcctgctagcccacatgctccgatgttaatgacatcgaaggcacccgtctcgaggaaatctcaactgcacaacccctactacaccccaattcagcaggaagcagttagagcggtcgtcagccaacctccccagcagcacttgggttttcctgttgagagcggggactgagagacaggactagctggatttcctaggctgactaagaatccctaagcctagctgggaaaggtgatcacacctgcctttaaacacggggcttgtaactcagctcacacccaaccaatcaggtagtaaagagggctcactaaaatgctaattaggcaaaaacaggaggtaaagaaatagccaaccatctattgcctgagagcacagtgggagggacaatgattaggatataaacccaggcattcgagccagcaacagctaccctctttgggtcccctccctttgtatgggagctctgttttcactctattaaatcttgcaactgcactctcttctggtccgtgtttgttacggattgagctgagcttttgcttattgtccaccattgttctttgccgctgttgcagacctgccactgacttccatccctctggatcaagcagggtgtccgctgtgctcctgatccagcgaggcgcccattgccgctcccgatcgggctaaaggcttgccattgttcctgcacggct

SEQ ID NO: 28485 - DNA, 1197 bp, Homo sapiens
  SIMILAR (973)..(1194): 1001254mologous to synthetic construct lac repressor,accession number A14595,Smith-Waterman Score=354.
atggagcttgcatatgtggagcagaaggactttgcgcatctcggcctggagcccatcaccttgctgcagcagaccacctcgggcctggcccacctccactccctcaacatcggtgagaggctacactttaccaggaaaacggcccgggccttcgaggacatctacattgagcagcggcgagtcattcgcaccatcctagaatatgccgacaaggtcttcacaaacatcttcatcatggagatgctgctcaaatgggtggcctacggctttaaggtgtacttcaccaacgcctggtgctggctcgacttcctcatcgtggatttctctcctgatcccctgcctggatctggcatttggcccacatggaaggtgggagcagacccaggctctgagaaagtgtcgccctcctcctcggtgggcatctccaggtcggactcctcggaggcgataagcacctgtatggtcagcttgcaatgccagcttggacactcgccaaggaagaagggagccccgagcaagaccgccacgggagacaccggcatctcgacggccatggaagaagacgtcattgcacgtgaattgatagagaagatgattgcgatggatcctcagaaacgcccctcagcgaagcacgtgctcaaacacccgttcttctggagcctagagaagcagctccagttcttccagggatttgcgtatttggaaccacatcaaacgtatttcgcctgcggggcaaacagcgtggccgctggtggcaatctctcagggccagccggctgtacaagaagcatggcattagcatttgcctctgatgagggcttctggctgcttccactagtggcagaaggcaaaggggaaccggagtgtacagagctcacagggcgagagaagcagcgagaggggagaaggtgccaggctctttttaagaaccatctctcacaggaattaataggggattttgccgatttcggaaccaccatcaaacaggattttcgcctgctggggcaaaccagcgtggaccgcttgctgcaactctctcagggccaggcggtgaagggcaatcagctgttgcccgtctcactggtgaaaagaaaaaccaccctggcgcccaatacgcaaaccgcctctccccgcgcgttggccgattcattaatgcagctggcacgacaggtttcccgactggaaagcgggcagtga

SEQ ID NO: 28486 - DNA, 821 bp, Homo sapiens
  SIMILAR (523)..(609): 371254mologous to Aquifex aeolicus protein export membrane protein SecG,accession number AE000673,Smith-Waterman Score=53.
atggcaccagcatctgcttctggagaggcctcagggagcttacaattatggaggaaggtgaaggaggaacaggtatttcacgtggtggagcaggagcaagagagttgccgggggttggcgggggccacactttacaacaaccagatctcgacgagcacccctccagctgtcccctgcaagtccaggagcctggccacgggtcagaatggcttccttgtgggagcagtccctctgcctaggaagagtgaggactgccctcatgaggaaagctgcgaaggaagcgtgaaggaaaagcgacggaccccccggaaaacaaaggtgaagaaaggaaccgcgcggtcaaataggaaaaaagacctaggatatgctacagctatcagtccctgtcttaagcgggcagcattagaagcagagctcttactctgcccagtaatgcagaatcggcaaggcaatcaggtgtatgtttataaaaagataagaaaaaaggcattaggagccgaaagccgtgcagccgagcaagcagtaaataaaaagaaaggctcggcagcccggaagttcacagaaacagagccagcacaggcaaaaggcagcgcttttacaagtgtaaaacagctaccgcccagggacccgccggctcagctctttagctctgcaggtgacccaaggcaagtgctccttgtttacaagcgacatcccagattataattctctgctaaaatttaactaaaatgcaagaatttgaaaaacctcttttctgataatggccactggtgctctctctctcctacccctgacggagctctccaaatccaatttaagtt

SEQ ID NO: 28487 - DNA, 373 bp, Homo sapiens
  SIMILAR (302)..(373): 541254mologous to Sulfolobus solfataricus Transport,accession number AL512981,Smith-Waterman Score=78.
aaatgttaaaccaaaagaatatatgaagggcatataatgaagggatatctacaaagttgtgacagggctaatgggaagaacaggggatatgaggcagcccaagatcagcaacagtagtgatccagtgtcaccctgtgctggttatgaagatttagtctcttctatcttttccaataccgctttgctagccacctccccaaaccctaccaatagaaagcactggaggaagactagagggctggaaggatgtgaaaagatttcccactttgtttgttgacatcctcacagaatgggttcttcaacctggcagtggcagttgaatccagtaacagcagttggcttcagtttggagatcttccatgctcctaaaatc

SEQ ID NO: 28488 - DNA, 1505 bp, Homo sapiens
  SIMILAR (240)..(845): 931254mologous to Homo sapiens histone H1,accession number X57130,Smith-Waterman Score=942.
gtgtgtttgcttgcgttgaggggagcaggaccataggccctagaggcccccagctgccttctgagactgggcgaaaccctcggcagcgcgcagggggcgctagggcgcgaggggcgggcactgacgggcaccaatcacggcgcagtcccaccctataaataggctgcgttggggcctttttttcgcatcctgcttcgtcaggtttataccactttatttggtgtgctgtgttagtcaccatgtctgaaacagtgcctcccgcccccgccgcttctgctgctcctgagaaacctttagctggcaagaaggcaaagaaacctgctaaggctgcagcagcctccaagaaaaaacccgctggcccttccgtgtcagagctgatcgtgcaggctgcttcctcctctaaggagcgtggtggtgtgtcgttggcagctcttaaaaaggcgctggcggccgcaggctacgacgtggagaagaacaacagccgcattaagctgggcattaagagcctggtaagcaagggaacgttggtgcagataaagggtaccggagcctcgggttccttcaagctcaacaagaaggcgtcctccgtggaaaccaagcccggcgcctcaaagctcaaaaaggccacgggggctagcaaaaagagcgtcaagactccgaaaaaggctaaaaagcctgcggcaacaaggaaatcctccaagaatccaaaaaaacccaaaactgtaaagcccaagaaagtagctaaaagccctgctaaagctaaggctgtaaaacccaaggcggccaaggctagggtgacgaagccaaagactgccaaacccaagaaagcggcacccaagaaaaaattgtttggtgctgaacagaataccagagaccaaataatttataaagaatacagatttatttcttacaattctggtggctataaagcctatggtcgaggggcccacctctggcaagggccttcttactgttatggcagatgtagagctgatactgtgtggctcaaagttcctattataaatcacattgttgactgtgtggtggtcaaaacctccagttataagaggactgaaaatggaagagtggacaaacgtatcagagatagtaatgacagaaagcaactaccacctccaggtttaggagaacaaggaaaagattctttgaagagatccccagaactgggacctctgaggagtgtatgctggaccactgatgatgatatgtctgtagatagaggcatgatgaggctgattttaggagcatggaagatctccaaactgaagccaactgctgttactggattcaactgccactgccaggttgaagaacccattctctccaccaacaaatcagaactttttctaactgcacctagtgcacctagagtctactccagaatgctcatggagaaagtttctgaaagaagatggacagtgaaagatgctcagttcctaaggaggggcatatccaatgtcctcttcaaatgtggccaaaaggaataa

SEQ ID NO: 28489 - DNA, 552 bp, Homo sapiens
  SIMILAR (344)..(550): 891254mologous to Escherichia coli ATP synthase UncI polypeptide (atp-1; gtg start codon),accession number J01594,Smith- Waterman Score=298.
cgtgcccgttcagaagcccgcgcggctggtccccagcccgaccggtcccgctctgcccctccccgtccctgccgggcccggacctgcgccgcccgcgacgtggaaggcactggaagcgccgccggggctgcccagaggccgggtccccgctccactttgcgcaaacttgtttttctaaggtcagcgctgcgagctggctacatcgtcctcttaaggtggagcggcagacgtgtgatggatcttcctggtgagcaaggccgtttctacgcgctgaaagggcaaatgccggaagatgaaatcgctttgttgcccgaagaatatcaggtcgaatcagtggttaaacttcaggttccagccctggatggcgaacgcgcatacaccagcgaaaggccgggtggcctggacattcgcatttggcgaagctttcaaagttctggcgatgttggtgttactggtggtggcgttggcggttttaaaggcggtattcttgccgctgatcgttacgtgggttttggtgctggtggttcagatactggcaccggctgtaattaa

SEQ ID NO: 28490 - DNA, 715 bp, Homo sapiens
  SIMILAR (229)..(618): 981254mologous to Escherichia coli ATP synthase UncI polypeptide (atp-1; gtg start codon),accession number J01594,Smith- Waterman Score=627.
attccgccttttagaggtattcgaaccaggggttagcaaaaaaaattccccaattggtatcgcactggaaaaaattttttaaaccttttattcccccctttgggttacctaattgtttgaaatccccgggggcgcccccttataatttgacccccttttttaatgcttgacttttaagccttaaaaaaagttttatccgccccgcggcatacctcgaagggagcaggagtgaaaaacgtgatgtctgtgtcgctcgtgagtcgaaccgttgctcggaagcttctgctcgttcagttactggtggtgatagcaagtggattgctgttcagcctcaaagaccccttctggggcgtctctgcaataagcgggggcctggcagtctttctgcctaacgttttgtttatgatatttgcctggcgtcaccaggcgcatacaccagcgaaaggccgggtggcctggacattcgcatttggcgaagctttcaaagttctggcgatgttggtgttactggtggtggcgttggcggttttaaaggcggtattcttgccgctgatcgttacgtgggttttggtgctggtggttcagatactggccccggctgtaattaacaacaaagggtaaaaggcatcatggcttcagaaaatatgacgccgcaggattacatagcccaccacctgaatacccttcagctgaaaaagcgtacattctcgctggt

SEQ ID NO: 28491 - DNA, 369 bp, Homo sapiens
  SIMILAR (321)..(368): 1001254mologous to Escherichia coli similar to,accession number D90855,Smith-Waterman Score=79.
gctacataatcgcggcgaggcgcgcccaacgagccccagagcgaagggaacggtgcccggcggacgggcacccggaaccggaaggccgacagacgcacaaccaagctggtcaaccatatcgtatgcggcagtcggtttggatctgccgttccaacgcgctccaacccgatcccgtggatcaacacttggctggaagtggaagtcagttcttatctggtcgggagattgactcggaagtggacaccgacgatttgagtaacttccagctctgtggcccgcgttaccctgcgcatcactggcacacaactgctgtgccaggagaacacccttcccttctggcggcgctggaatcccacaatgtggcggttg

SEQ ID NO: 28492 - DNA, 340 bp, Homo sapiens
  SIMILAR (337)..(146): 321254mologous to Rhodobacter capsulatus unidentified open reading frame (260 AA),accession number X15791,Smith-Waterman Score =84.
cagccaagtgttgatccacgggatcgggttggagcgcgttggaacggcagatccaaaccgactgccgcatacgatatggttgaccagcttggttgtgcgtctgtcggccttccggttccgggtgcccgtccgccgggcaccgttcccttcgctctggggctcgttgggcgcgcctcgccgcgattatgtagcctgcaattcgtgaaccacgaacccaggccaactccaggtagtaagcccccagtgacgggtgaatgcgtccagatgcggattcttgaacgagctgccatggatttgcgcccaaggaccccaattgtacggattggccacgactggacgt

SEQ ID NO: 28493 - DNA, 933 bp, Homo sapiens
  SIMILAR (127)..(717): 981254mologous to Escherichia coli ORF_f252; was ORF_f87p and ORF_f234p before splice,accession number U28377,Smith-Waterman Score=1001.
atgacgctacgcttaccgctgccactagaagcggtggggctggaaaacgccgcgcgcgtgctgaagctgtacccgttcgagatgagcggccggcatagttgcagcggggatcctctaggagtcaaccctaaacccaactacattccggggctgattgcggtggtcgggtgtgatggcaccggtaaatccacactgaccaccgacctggtgaaatcgctgcaacaacactggcaaaccgagcggcgctatctggggctgctctccggcgaagacggcgacaaaatcaaacgattgccgttggttggcgtctggctggaacggcgactggcggccaaatcctcgaaaacccaaagcatgaaaaccaaatctccggcgctatgggcggcggtgattatgtactgcttctcgctgcgaagaatggcgaatctacgcaaggttcagcgactggcgcaaagtggcgttctggtggtcagcgatcgcttcccgcaggctgaaatttcgggcttttattatgatggaccggggattggcgtcgaacgtgcgaccgggaaaatcagcatgtttctggcgcagcgcgaacggcgtttataccaacaaatggcgcaatatcgcccggaattaattattcgcctgggcattgatattgagactgccatctcccgcaagcctgaccatgactatgccgagctgcaggacaaaatcggtgtcatgtcgcaagaacctgcctgggctaagccccaattctggggctcacccgtcctgcatcacgtaggtatcggaaattgcgccgttaatgccgtagacttcggacattttcgccaccaccggtttgaaggtgctggtgaggatgccggaccctgcctgcaacaacatgaaaccaattatggttttaatcgtgcctttaataataacgctgacacttttgcgcagtag

SEQ ID NO: 28494 - DNA, 1248 bp, Homo sapiens
  SIMILAR (478)..(1038): 981254mologous to Escherichia coli seryl-tRNA synthetase,accession number X05017,Smith-Waterman Score=934.
atgcacacccacgcgcgggaaacctgcctggcgttagggaaacccgccgatgacgctacgcttaccgctgccatagaagcggtggggctggaaaacgccgcgcgcgtgctgaagctgtacccgttcgagatgagcggcggcatgttgcagcgcatgatgattgcgatggcggtgctgtgtgaatcaccgtttatcatcgccgatgaaccgaccaccgaccttgacgtggtagcacaggcgcgcatcctcgatctgctggaaagcattatgcaaaaacaagcgccgggaatgctgctggtgacccatgatatggacaaatggggccgcatcatcgcggatgtggaaagccagtaccgttaccagaccaccaatccgaaaatcttcgctggtggtgacgccgtgcgtggtgcggatctggtggttaccgcaatggcagaaggacgtcatgcggcacaggggattattgactggctggggctggatgtagataagctgggcgctcttgaagagcgtcgtaaagtattgcaggtcaaaacggaaaacctgcaagcggagcgtaactcccgatcgaaatccattggccaggcgaaagcgcgcggggaagatatcgagcctttacgtctggaagtgaacaaactgggcgaagagctggatgcagcaaaagccgagctggatgctttacaggctgaaattcgcgatatcgcgctgaccatccctaacctgcctgcagatgaagtgccggtaggtaaagacgaaaatgacaacgttgaagtcagccgctggggtaccccgcgtgagtttgactttgaagttcgtgaccacgtgacgctgggtgaaatgcactctggcctcgactttgcagctgcagttaagctgactggttcccgctttgtggtaatgaaagggcagattgctcgcatgcaccgcgcactgtcgcagtttatgctggatctgcataccgaacagcatggctacagtgagaactatgttccgtacctggttaaccaggacacgctgtacggtgttggcctatatcctttgggggcattggcctccggttggctcccaaaacgccgggaacgtaaagacgcgacaccggggcccacggggtacccaggggctcacggaaacctcgaattgcccgaaaggtccgagggacctagggcggggggggaaccgaggcgaagaacagggcacacacagaaagggtccccggacaggggccagacgccccccaagggcccatga

SEQ ID NO: 28495 - DNA, 4770 bp, Homo sapiens; identical to SEQ ID NO: 4188
  SIMILAR (1525)..(2382): 981254mologous to Escherichia coli K12 putative general secretion pathway for protein export (GSP) (TYPE II TRAFFIC WARDEN ATPASE),accession number AE000409,Smith-Waterman Score=1388.

SEQ ID NO: 28496 - DNA, 1398 bp, Homo sapiens
  SIMILAR (1134)..(466): 991254mologous to Escherichia coli NikC,accession number X73143,Smith-Waterman Score=1126.
ttaattgagccgattaaaatcaggattcgcgccccacggattgccgcttaaatgtccaccgctattgagcatgatgattccggcaagcccaatggcaatacccacccattccagtttgcgcgttttaatgccaaacaggcggctgaagcacagggtaaagaggggcacggttgcaaccactacggcggcgatgccggaaggaacattttgatgttcggcaaccgtcaccatgccattaccgacagccagcaataacaggccaatcagcgcggcattgagcagcggacgtagcggggggagtttgtgtccgcgcagtagcaaaaatgccagcaataaaataccggctgccaggaatcgaacgcccgccatcattaacggaggccagctttccacgccaatccgaatgacaaaataggttgagccccaaatgatatacaacgcaaacagcgcgccaaaaagcggtaacaacaggttaaaggccatcacgctgataaacagcgccagccccggccagaacatttgcagcggctgggtccagatatactggcgcgcgtcgttaatcatcacgccccattcggcggtcggcgcggtcacaccgaggccaaggaaagacatccccgcgacgtgcagcatcatatggccgatatccagcgttgccagcaccagcagcgaagggatcaccgcgcctgccagatgatcgacaaacacccgcacatggcccgcaccggaaagccgtgacgccagcacaaactcgcgttggcgtagtgaaatcaccaggctgcgcaccatgcgtgcataccacgcccagtgcgacagggcgatggcgataattacgttggtcagcccggtgccgagcacgccaaccataaagaacgacagaatcgaggtcgggaaggtcataaacatatcggcgacgcgcatggtggcctgatcaacgcgcccgccaatcaacccggcgctgccgccaataaccagccctaatgtcagcaccagcagcaggcaggccattaccgaaccgagcgacacgcgggtcgctgccatcagccgcgagaaaatatcgcgacctaagtgatcggtgcccagccagtgctgcgcatccggcgaaagcaggcgcgacggcaaatcaatcgcctgacgctcatcctgctccattattgcctgaccactaagctgaaaaacggtgtaaaaccaggcatcgtcgctgccttttacttcctgccaggtgcgggataaattcaccccgctggttgtcacggtactcagctttagtcctttggcaaaatgcgtgtccagtacacccgtgtaacgctcagtcagcaggcgtccggtaaaatttccgcatacctgattgatttgggaaagccattgctgaaactcattatccactgcggggttcat

SEQ ID NO: 28497 - DNA, 5017 bp, Homo sapiens
  SIMILAR (3365)..(3463): 291254mologous to Escherichia coli K12 orf, hypothetical protein,accession number AE000338,Smith-Waterman Score=43.
atgccttcctgccattgccctcttggcagctctctacgaccaccagcaactctagagcgaatattccccgcaaaaaaagtattgcaactcgggttcctggtacctcgaaagtcggcggagaatctaaaaccccggaactactggaactggtcagaagatgaagcctggcagtcacagtttgatcaaaaagatctgatcgaaaatgaactaactctggatctgaaagcggacgttaccggcaaggtcagttttccggtagattggggcgcttatcgtctggaagtcaaagcgccgaatgaagcggtcagtagtgttcttttctggtctggctatagctggcaggacaacagcgacggtagcggcgcagtgcgacccgaccgtgtcacgctgaaactggataaagccagttatcgccctggcgacaccattaagttgcatatcgccgcgccaacggcgggtaaaggttatgcgatggtcgagtccagtgaagggccgctgtggtggcaagagattgatgttcgggctcaagggctggatctgacgattccggtcgataaaacctggaatcgtcatgatctgtatttaagtacgctggtggtacgtcctggcgataaatctcgctccgcgacgccaaaacgcgcggttggtgtgttgcatctgccgcttggcgatgaaaaccgtcgcctcgatctggcgctggaaacaccagcaaaaatgcgtcccaatcaaccattaaccgtgaaaattaaagccagcactaaaaatggcgagaagcctaaacaggtgaatgtgctggtgtctgccgttgatagtggtgtgctgaatattactgactacgtcacgccagatccgtggcaggcgttctttggtcagaaacgctatggcgcagacatttacgatatttacggtcaggttattgaaggtcaggggcgtctggcagctctgcgtttcggtggcgatggtgatgagctgaaacgtggtggtaaaccgccggtcaatcacgtcaatattgtcgtgcagcaggcgctgccggtaacgctcaacgaacagggcgaaggctcggttacactgccgattggcgattttaacggtgaattgcgcgtcatggcgcaagcctggacggcagatgacttcggtagcaacgaaagtaaagtgatagttgccgcaccggtgattgctgaactgaacatgccgcgctttatggcgagtggcgatacctcgcgtctgacgctggatatcactaatcttaccgataaaccgcaaaaactgaacgttggcctgaccgccagtggtttgcttgaactggtcagcgattcacccgcaggcggtgaattaacgccatcggccggagccgcagtaaccttcgcgacactggtactcaaccgccacattgtgggattccagcgccgccagaagggaagggtgttcatcctggcacagcagttgtgtgccagtgatgcgcaggagctggaagttactcaaatcgtcggtgtccacttccgagtcaatctgcccgaccagataagaactgacttccacttcctgcggagcaacctgcacgttatcagacaccagccaagtgttgatccacgggatcgggttggagcgcgtctggaacggcagatccaaaccgactgcctgcatacggatattggtgatgtattcaacgtactggcagagaatgtctttattcagaccaatcctcgaaccgtcgcggaacagataatccgcccagtctttctcctgttgagctgcctgaacaaacaggtcatagcactcctgcttacactcttcggcaatttccgccatctcggatcgtcgcccgctggcagcgattacattgctggtccgccgtaagtcgatatccaaaggattcccacaaagcgatcggatcgaaactgtacaccgcttcgcgattcgactgataggggatcgtctcagtctggattcgagcatgagcgtggtaggaagcgaattattccatatggcgcagtgccgcaaaaagcaccgctcagctgacacatatcatccccgtctcgtcaaaagaatcccttcgctgctgttgctgcaaccgctggatatcgcccatatgatgctgcacgtcgcggggatgtctttccttggcctcggtgtgaccgcgccgaccgccgaatggggcgtgatgattaacgacgcgcgccagtatatctggacccagccgctgcaaatgttctggccggggctggcgctgtttatcagcgtgatggcctttaacctgattgaactacgtaatatcgcgctacaggccgcgcagccgctggtacacggtgtatcgttaaccctgcaacgcgggcgcgtgctggcgttagtcggcggtagcggcagcgggaaatcattaacctgcgccgcaacgctgggcattttgcccgctggcgttcgccagacggcgggggaaattttagccgatggcaaaccggtttcgccttgcgccctgcgcggcatcaaaattgccaccatcatgcagaacccgcgcagcgcctttaatccactgcacaccatgcacacccacgcgcgggaaacctgcctggcgttagggaaacccgccgatgacgctacgcttaccgctgccatagaagcggtggggctggaaaacgccgcgcgcgtgctgaagctgtacccgttcgagatgagcggcggcatgttgcagcgcatgatgattgcgatggcggtgctgtgtgaatcaccgtttatcatcgccgatgaaccgaccaccgaccttgacgtggtagcacaggcgcgcattctcgatctgctggaaagcattatgcaaaaacaagcgccgggaatgctgctggtgacccatgatatgggcgttgtggcgcgtctggcggatgacgtggcggtgatgtctgacggtaagattgtcgaacagggcgatgtagaaacgctgtttaacgcccccaaacatacagtgacgcgcagcctggtttccgctcatctcgccctctacgatcgacctgcagcagcaagctgcactggcgtcgtcgcggcgcttttcctgaccaagccccatttccagacacagtttgctgttgcgggcgcggtggcctttaagcaatttctggatttcacaccagttctccgagtcatcctgctcgagaaaaccagcaggaccaaaagcacgagtggcgctgttttcaaaagcggctttaacttcatcggaggcggctttgtcagtaatacagaacgcccacacttcaacttgatcagggccgcgcggatgccagacgcggaaagcatggctgaacagagcatgatactggtcactggcgaactgctctgccgggaatttccagttacagttgatcacccacttttgtacgccgccgacaatttcggtgccgccttcgcgacgatccagcatgccatccagataccaggcaatgtcacccagtccccagtgggatttacacaacccttgtgggtaggcgcgaggttccagcggtacatcgatcaactcgccgttaatgccataagaccagccgtgatacgggcaggtaaaggcgcgagtgttgccgcaatctgcataactcacacgcatggcccggtggcggcattggttgagaaacgccttgatgctgccgtctttctgacgcactacgacaaccgcatcttctcccatcccgagtatgagcagatgggtatctggcctggcgatgactatttctcccgtcgttacgactatctcaccgaatatgttcaggtgctgcgcgacctgtggggcacggggaaaagcgattttaaaggcgattttttcaccatgaatgattgtcgcgtgagtccgcaaccgagtgtccccatgaaagtgatctgcgccgggcaaagcgacgctggcatggcgttctccgcccggtatgccgatttcaacttctgtttcggcaaaggcgtaaatacacccacggctttcgccccgaccgctgcgcggatgaaacaggccgcagagcaaaccggacgcgacgttggctcttatgtgttgtttatggtgattgccgatgaaaccgacgatgccgctcgcgccaaatgggaacactacaaagcgggcgcggatgaagaggcgttaagctggctaaccgaacaaagtcagaaagatacccgctccggtactgacaccaacgttcgtcagatggccgatcccacttcggcggtaaacatcaatatggggacgttagtcggttcttacgccagtgtcgcgcgcatgttagatgaagtcgcaagcgtgcctggtgccgaaggcgtgctgttaaccttcgacgattttctgtcgggaatcgaaaccttcggcgagcgcattcaaccactgatgcaatgccgcgcccatctacctgcgctgactcaggagcaaagtgcgctgatcgtggtggatatgcaaaacgcttatgccacgccaggcggctacttagatctcgccgggtttgatgtctcaaccactcgcccggtcattgccaacattcaaaccgccgtgaccgcagcgcgagcggcagggatgctgatcatctggtttcaaaatggctgggatgaacagtatgtcgaggctggcggacccggctcaccgaattttcataaatcgaacgccctgaaaaccatgcgtaagcagccgcagctgcaggggaaattgctggcgaaaggctcctgggattatcaactggtggatgaactggtgccgcagcctggcgatattgtgctgccgaagccgcgctacagcggtttcttcaatacgccgctggacagcattttgcgcagccgcggaatacgccatctggttttcaccggcatcgctaccaacgtctgcgtcgaatcgacgctacgcgacggcttttttctggagtatttcggcgtggtgcttgaagacgcaactcaccaggcggggccgaaatttgcgcagaaagccgcgttgttcaatatcgaaacctttttggcggcaggacgtcgaaaattctgcgacgcgctttctcccacgtcctttgctcatatcgcttaa

SEQ ID NO: 28498 - DNA, 1188 bp, Homo sapiens
  SIMILAR (82)..(699): 991254mologous to Escherichia coli INAA PROTEIN,accession number D90855,Smith-Waterman Score=1094.
atggcgtcccaatcaagacgtaggattaccacgtcatttagtgcaacaactagcattcattgtgatcccatacaagcattgaagtacgacgaatttaatcactggtgggcaacagagggcgactgggttgaagagcctaactatcgccgtaatggtatgagcggggtgcaatgcgtcgagcgcaacggcaaaaagctgtatgtaaagcgcatgacgcatcatctgtttcattccgtacgttatccgttcggccgaccaacgattgtccgtgaggttgcggtaattaaagaactggaacgggccggtgtcatcgtgccgaagatcgtttttggtgaagcggtgaaaattgagggtgaatggcgagcgttgctggtgactgaagatatggcggggttcatcagcattgctgactggtatgcccagcatgcagtatcgccttattctgacgaagtacggcaagccatgttgaaagcagtggcgctggcgtttaagaaaatgcatagcattaatcgtcagcatggctgttgttatgttcgccatatctatgtgaaaacagaaggtaatgcagaagctggttttcttgacctggagaaaagtcgtcgccgcttgcgtcgcgataaagcgattaatcatgacttccgccagctggaaaaatatctggagccaatccccaaagcggactgggagcaggcgtgtgcgacaggagccgcagtaaccttcgcgacactggtactcaaccgccacattgtgggattccagcgccgccagaagggaagggtgttcatcctggcacagcagttgtgtgccagtgatgcgcaggagctggaagttactcaaatcgtcggtgtccacttccgagtcaatctgcccgaccagataagaactgacttccacttcctgcggagcaacctgcacgttatcagacaccagccaagtgttgatccacgggatcgggttggagcgcgtctggaacggcagatccaaaccgactgcctgcatacggatattggtgatgtattcaacgtactggcagagaatgtctttattcagaccaatcatcaaccgtcggggaccacacaccgagcaaacaacacaccaagcccaaggcgacaactcacactcgacacccgacacgacaacaccaacaaccaaagccacgacccctacactactaacatcttactataa

SEQ ID NO: 28499 - DNA, 1440 bp, Homo sapiens; identical to SEQ ID NO: 1582
  SIMILAR (875)..(949): 1001254mologous to Escherichia coli ORF_o492,accession number U14003,Smith-Waterman Score=116.

SEQ ID NO: 28500 - DNA, 1581 bp, Homo sapiens
  SIMILAR (813)..(367): 931254mologous to Escherichia coli 4-hydroxyphenylacetate 3- monooxygenase (EC 1.14.13.3) small chain,accession number D90737,Smith-Waterman Score=741.
ctatgcttccggcggcagacagacgccaattccgccaattccacagtaaccatacgggttgttatgcagatattgctggtggtcatcttcggcataatcaaacggtgtggcgttcgcgatttccgtggtgatgtgcacgatcgtcatcggcggcaagcatcgccgcctgaaaacgtgccatgactggcgcgagctgcggcatcctgttgtgccgatccccgacattaaaatggaaagattgggatccagccccatcagaatcggcattaacgaccgatcaggcccgaaccccaaacagccaaatccggcgccaacacggccggatgggtttggacaaccgggcacacgaattgtacgtggcccggtcagcccgtagggtgtggtgtgacgatgaatcgcttcgatggcgcaaaacagaatgtcgtgggtgccgacgctcaccacctggctgatacggcagtcaaacgaaaccagagcctcttccagttgcgggcatccggtcacccccgtctgccagcgggcgtcggcaaagcggtgttccatgggcgttttgccgccaaaaaggtttgaaagcggctcctgcccggcgctaagtgtatttacacacagcgttcgattttcattgaatgccggccagacggacgccccacgattcaggcacaccagtaatgtgggcggcgtatcggtcacactgcagacggcgctggcggtgaacccggcgcgcccggctggaccgtccgtggtgataatattgaccgccgcgcccatgcaggacatcgcatcgtcgaaaagtttgttgatcgacaatgttctatagtttgctccggcgagacgcacggcggtacgataaaattcgtcaagcagcagtatatgctgggtggagccacaatcttcgccccccaggctgccgctttcattatgacggaagcggttttcatcaatcaggaagaagctgactaaccacaccgcgaggagcgcccattttccaacagtagcaggtaccggcacgccttcgcccacgcacagaatggtgcccacttcgataatgtcgacttcttcggcaatcaggcgagtggtttcgtaggcgctatccatagtctggttgtccagcgcgacttgcaacatcggtaatgacatgttcaattccttcttaagttcctgctcggtacggcaggcgcgtaaacggtcaaaattctcttcatcttcaaacaggttgacgatctgcatgatgcccacttcctggtgagtattggcatcgaccgccgccatggtgatgaggatatccaccggatcgttgtcatcgtggttgaactccagcggctttttcagcgttaccagagagaaaccggttttcttaacgccctcttccggacgcccgtgcggcattgccaggcccggagcgataacgaaataaggaccgaactgttcaacgccatccagaatcgcctggtagtaacgcggctctaccacatctgccgccaccagcaggtcaacgccgattttcaccgcttcctgccatgtctctgcttcagcctgcaggcggatggatttattttccagccagcgaatcacgtaattcat

SEQ ID NO: 28501 - DNA, 1257 bp, Homo sapiens; identical to SEQ ID NO: 22514
  SIMILAR (250)..(549): 1001254mologous to synthetic construct insB,accession number M27083,Smith-Waterman Score=535.

SEQ ID NO: 28502 - DNA, 2178 bp, Homo sapiens; identical to SEQ ID NO: 18297
  SIMILAR (1636)..(2010): 971254mologous to Escherichia coli K12 putative fimbrial-like protein,accession number AE000322,Smith-Waterman Score=617.

SEQ ID NO: 28503 - DNA, 1180 bp, Homo sapiens
  SIMILAR (658)..(993): 971254mologous to Escherichia coli YafI,accession number D38582,Smith-Waterman Score=540.
ctatgcttccggcggcagacagacgccaattccgccaattccacagtaaccatacgggtttttatgcagatattgctggtggtcatcttcggcataataaaacggtgtggcgttagcgatttccgtggtgatgtgacgatcgtcatcggcggcaagcatcgccgcctgaaaacgttccagactggcgcgagctgcggcatcctgttctggggtcagcggataaatcgctgaacgatactgcgtgccggggtcattgtctttgaagatcctaacggcgaagatggcgacgatgaagattttgtcgatgaagacgatgacggagttcgccatcccggttaatggcgctatcccaccgccgccgaccacttcaccctcgtactcaacgacccaatatgcatggccaggctgactatatacttgatacagctcgtcaagattcggatcggcgacggtgtagcctttatcaacggtaagaccgtattcggcggataccatcgcccgtcgcgctttatcggcgagctgccggaagagtgtgtggaagaggtgcgcctgcgcgccacggtaagccgcccggtcagccatcagcggatgggtacgccgatggtcgagaacgacagcggctacaagctcggccagcgcgtacgccacgccggcgatgctatttctgacgttagtcatatttcctgcgtcggtaatgatttcggtttcaatgatattttctcccgctacgttgaagcggtaggtcgcgaaggcgatgtactgctggggatctccacctccggtaactctgcaaacgtgatcaaagcgatcgcagcggcgcgtgagaagggaatgaaagtgatcaccctgaccggtaaagacggcggcaaaatggctggcacggcggatatcgaaattcgcgtaccgcactttggatatgccgaccgcattcaggagatttacattaaagtgatccctatcctgatccagttgattgaaaaagaaatgtttaaataagcctggcgtaggccggataaaacgtttacgccgcatccggcatttgtgcgctgatgcctgatgcgacgctgacccgtcttatcatgcctacaaatctgaacgcgaaccgtaggccgaataatgcgttcacgccgcatccgacctgaaaattcttaaatcaatcttcgccgggggccatgcgctc

SEQ ID NO: 28504 - DNA, 261 bp, Homo sapiens
  SIMILAR (109)..(261): 941254mologous to Escherichia coli Transcriptional activator protein MetR,accession number D90840,Smith-Waterman Score=252.
cagtatcccgatccgctggtaatgccgctggagtaaacgatcacgccagcaggacgccgcatgcactgcaagggggcgtgtatgaaaccactgctggatgtgttgatgatcctcgatgccgtgcgggaactggaaaagcaggcgatcaaactgcatgaaggctgggaaaacgagctggtgattggcgtggacgacacgtttcctttttctctgcttgcgccactcattgaagctttttatcaacatcatagcgtgacgcgc

SEQ ID NO: 28505 - DNA, 2406 bp, Homo sapiens
  SIMILAR (2406)..(1969): 1001254mologous to Escherichia coli K12 putative export protein I for general secretion pathway (GSP),accession number AE000409,Smith-Waterman Score=720.
ttagaaggcacacgcataccgatggttttgcgtttttcctgcaacagacggcgtggcacttccttcgtccccttcaggatgaaggtatagttgcccggcgtgttgtttttcattaaacgacaacgcaacgttatcaacaaatgaataggtcgagagttcagaaagatcgcgacacatcagggtaaagttgtgaccgtccggcagctggcgaatacgacaaatacgctccatcgcgtttttatcttcaattttacagccgatcgcatagccggaatcagttggataaacaatcaccccgcctttacgcacgatctccaccgcctggttgatcagacgttgcggcaaatcattctgcgcggctttgattttgacggccaggaggcgctgaaagattctcgcgtgctgatagtgggcctgggcggcctcggctgtgcagcctcgcagtatctggcaagcgccggtgtcggtaacctgacgctgctcgacttcgacacggtttcgctctcgaatctgcaacgccagacactgcacagtgatgccacggtcgggcaaccgaaggtggaatccgcccgtgacgccccacatatcgcgattacgccagtcaatgcactgctggatgacgcagaacttgcagcattgattgctgaacacgatctggtgctcgactgtacggataacgttgcggtacgtaatcaactgaacggcagcagcgataacgtgggtaacgcagcgccccggcaatgaccgcgcacgatcgggacgccattgcgagttcatcagaaacttgcgcgcgtagtcgttggtctgtggagtacgcttctccggtttgcgcgccaccagattcacggagtaaaaggcgctcggcatcgaattcagccgcgtcgcatgttttttgacaaattcctggaacgctgaatggtagtgaccatagcgaatagaagcaccaatgaccacacggtcatagttttcccactgtggttcttcaatgcggtgcacattggcgacatccgcctggatccccagttctttcagttccgaagccaggtaggaggcaatctcgcgcgtttgtccgtccagcatgttggcaatcaggatccatttagccaccgggttcatactggtaaagttatcagcaaccacgccaagccctggccccaggttattcaatgtcgcaacaaccgacgcaaaggcagaaaagtcatccacgcccgtggcgataatcgccagcatactgacaataaacaccaatgcataggcggagaaaaatccccaacggcttcgaggatacgttccggcagtgcgcgatttcccagctttaatgctatagacggcgttcggatgcaccagtcgtttcagctcacggttcccctgcttaaacagcagcaggatgcggatcaccttcagggcattttcactgatatctttgcgggaaatagcatgctgctcacgcgggatcaccgtcacctgtggacgggcgactgcctgttcagcctcgctttcctcgcggcttagcaccgtgcgggaactggaaaagcaggcgatcaaactgcatgaaggctgggaaacgagctggtgattggcgtggacgacacgtttccttttctctgcttgcgcactcattaagctttttatcacatcatagcgtgacgcgcaattatctttacttcctttcttgtttcttccttgatttttcatccctgattcaaattcattatcatcagcatgatgccagcaataagtgccaggcacgatggtagcaaaatgtaatgccgcaactgtttgtgatacagcatcatcggcgtcaatactaatcccatcagaatgacaatccgccactggtatggtccacattgcaattttctgggtatccataattatgacacggttgtcggaaacttgctcttggccaagtatgctatgccatatctggcttcggtaggtattccgaatcttggtcaacgggcttttatgtaacgtgactgagagaggaagttcctggctttccccgctgttactttccagaagaaagctctcgacatgttccagcatcgcctgggcgggttgatccttcctgccatccacagaagtacgaacagcacggtagagcgtatgatttcgcagataccagtgaacagtgagtaaggtttgtgcttcactgagaggagccagcggatcgcgactttgcgtggtaaaaatagcttcttcacccaacaccatgattttgtccgtactccgattcctccgggcgaccagttgcaggagatcgttatcaagaatggtgatggtgcgctgtagctgattgaactgctggatttctttctgtgagcgttgatgcaactcggaagcttgcgaaaaaatcataaacgccagcacgctaagcattgagaaaatcgccagcgccgccat

SEQ ID NO: 28506 - DNA, 2298 bp, Homo sapiens; identical to SEQ ID NO: 24913
  SIMILAR (637)..(443): 521254mologous to Escherichia coli hexosephosphate transport protein,accession number M89479,Smith-Waterman Score=135.

SEQ ID NO: 28507 - DNA, 5316 bp, Homo sapiens
  SIMILAR (2131)..(2985): 951254mologous to Escherichia coli ddl cell wall enzyme,accession number M14029,Smith-Waterman Score=1381.
  misc_feature (1)...(5316): n = a,t,c or g
ggccggaaagtagtggtcacttccgcttaaatcttgcgcaaacatttaactcgtttggcgcaattatcgcgggtgtctttgggcaaagtcttattttgtctaacgggccacattaattcgcaagaacgttctcgataaaatgtctccagagcaattgagtgcgtataaacacagcctggtattatcggtacagacaccttatatgatcatcgtggctatcgtgttactggtcgccctgctgatcatgctgacgaaattcccggcattgcagagtgataatcacagtgacgccaaacaaggatcgttctccgcatcgctttctcgcctggcgcgtattcgccactggggctggggggtattagcgcaattctgctatgtcggggcacaacgggctgctggggctattggaatctgtgaaaaaatccagaagccctgttaagccccccccggtatccgtaacaacggggacgatattagagactcgagctggctcacaattaccgggactcggcaatattctgcgtcttgcgggcctgtcggaccgggacgtcatcccggacgcttctttgccggaaaaaccgcgcctgatgatggcccgtttactggggctggaacctccgcagttcagaaatagtctggacagcggcaaaggtaagattattgatggcagtcggatttgtaatgaactgggatttgaataccagtatcccgatccgctgggggcgtgtatgaaaccactgctggatgtgttgatgatcctcgatgccttagaaaaagaaggcagttttgcggcggcgtcggccaaactctacaagacgccgtccgctctgagttacaccgttcacaagctggaaagcgaccttaatattcaattgcttgatcgtagcggacaccgcgctaaattcacccgcaccggaaaaatgttattagagaaagggcgggaagttctgcataccgtgcgggaactggaaaagcaggcgatcaaactgcatgaaggctgggaaaacgagctggtgattggcgtggacgacacgtttcctttttctctgcttgcgccactcattgaagctttttatcaacatcatagcgtgacgcgcctgaagtttatcaatggcgtactcggtggttcatgggatgccctgactcaggggcgagcggatattattgttggcgcgatgcatgagccaccatcttccagtgagtttggtttttcacggttgggcgatctggaacaagtctttgcggtcgcgcctcatcatccgtttagccctggaagaagagccgttaaatcgtcgtattattaagcgatatcgggcgattgtggtgggggatactgcgcaggcaggcgcttctacggcatcacaacttctcgacgaacaagaagccattaccgttttcgattttaaaaccaaactggaagctgcaaatttagcgggctcgggctgcggctattttaccccgttatctggcgcaacgttttctcgatagtggcgcgttaatcgagaagaaagtggtcgcccaaactctctttgaacccgtctggattgggctagccggcgatttgggcgcagtggagtagcaacgcgcaggatcgctggcatcttggcgtgatggcaggctacgccaatcagcacagtaatactcagagtaatcgtgtgggttataaatcggatgggcgcatcagcggttacagcgctgggctgtacgcgacctggtatcagaacgatgcgaataagaccggcgcttatgttgacagctgggcgctgtataactggtttgataacagcgtcagttccgataaccgttctgctgacgactatgattctcgcggtgtgacggcctctgttgagggtgggtatacctttgaagcgggaacatttagcggcagcgaagggacgctgaatacctggataaatacagccacaggcgcaaatcacctggatgggtgtgaaagattccgaccatacccggaaagacggaacgcgcattgaaacggaaggcgacggaaatgtgcaaacgcgacttggggtgaaaacctacctgaacagccatcaccagcgtgacgatggtaaacagcgtgagttccagccttacattgaagcgaactggatcaacaatagcaaagtctacgccgtgaagatgaatggtcaaaccgtaggccgtgaaggtgcgcgtaatctcggtgaacnggtgttagccggactgcgtgaaggcggtattgacgcgtatcctgtcgacccgaaagaagtcgacgtgacgcaactgaagtcgatgggctttcagaaagtgtttatcgcgctacacggtcgcggcggtgaagatggtacgctgcaggggatgctcgagctgatgggcttgccttataccggaagcggagtgatggcatctgcgctttcaatggataaactacgcagcaaacttctatggcaaggtgccggtttaccggtcgcgccgtgggtagcgttaacccgcgcagagtttgaaaaaggcctgagcgataagcagttagcagaaatttctgctctgggtttgccggttatcgttaagccgagccgcgaaggttccagtgtgggaatgtcaaaagtagtagcagaaaatgctctacaagatgcattaagattggcatttcagcacgatgaagaagtattgattgaaaaatggctaagtgggccggagttcacggttgcgatactcggtgaagaaattttaccgtcaatacgtattcaaccgtccggaaccttctatgattatgaggcgaagtatctctctgatgagacacagtatttctgccccgcaggtctggaagcgtcacaagaggccaatttgcaggcattagtgctgaaagcatggacgacgttaggttgcaaaggatggggacgtattgacgttatgctggacagcgatggacagttttatctgctggaagccaatacctcaccgggtatgaccagccacagcctggtgccgatggcggcacgtcaggcagaggaaagcacaatggaagcattaggaatgatcgaaacccggggcctggttgcactgattgaggcttctgacgcgatggtgaaagctgcgcgcgtcaagctggttggtgttaagcagattggcggcggcctgtgtactgccatggttcgtggtgatgttgcagcctgtaaagccgcgaccgatgcaggtgccgcagcggcacagcgtatcggcgagctggtatctgtacacgttatcccgcgtccgcacggcgacctggaagaagtcttcccgatcggcctgaaaggcgatagcagcaacctggggagcttttacctgaaatacgccacggaggcgggtatgaaactggcagtcgtcactggacaaattgtttgtaccgtacgccatcacggactggcgcatgacaaattgctgatggtggaaatgattgatccacaaggtaatcctgacgggcaatgcgccgtcgccatcgacaatattggcgcgggaaccggggagtgggtgttactggtgagtggcagttccgcccgccaggcgcataaaagcgaaacgtcaccggtcgatctgtgcgtgattggcattgtcgatgaggtggtgtctggcggtcaggatattgaacaggtggtgaaagcggtactgctgaaaatgcaaagcagtgacacgccgtccgccgccgttcatgagatgggcgttttcgcgtccctggatgacgccgttgcggcagccaaagtcgcccagcaagggttaaaaagcgtggcaatgcgccagttagccattgctgccattcgtgaagcaggcgaaaaacacgccagagatttagcggaacttgccgtcagtgaaaccggcatggggcgcgttgaagataaatttgcaaaaaacgtcgctcaggcgcgcggcacaccaggcgttgagtgcctctctccgcaagtgctgactggcgacaacggcctgaccctaattgaaaacgcaccgtggggcgtggtggcttcggtgacgccttccactaacccggcggcaaccgtaattaacaacgatatttacacggaaacaccggtcaaagtgtctggctttaagcgcgtcatagacgagcaggactggacaatcactaaggtgacacattttctgaataatagcggcttcacgacgtcattagagcttgagcatgccgcacatgcgcgtacaagccgctatatcactgacacgacaaaagagcgttatcaccagtgtcagaacgtgaattgcagcgccacgttcatcacttatgagtcggtacagcgatacattgtgaagccgggagaagtccacgtcggtgtgcgctctaaccacctgagctacaagcctgtagaggtttactgctcattttcatcagacaatctgtgtgagcactgcaaagtacgcttctttaaggcgtcagtcttcgtccagggggccgccttcgccaccggtattcctccagatctctacgcatttcaccgctacacctggaattctacccccctctacgagactcaagcttgccagtatcagatgcagttcccagtaattccgattaacgcttgcaccctccgtattaccgcggctgctggcacggagttagccggtgcttcttctgcgggtaacgtcaatgagcaaagagtcagagcacaagttggcatgttatatgaagatcttgccggacatgctgcttttgatggcatattgttccacgatgatgctttgctttcagattatgaagatgccagtgcaccggctatcacggcttatcagcaagcaggctttagcgggagtctgagcgaaattcgacaaaacccggagcaatttaaacagtgggcccgctttaaaagtcgtgcgttaactgacttcactttagaacttagtgcgcgcgtaaaagccattcgcggtccacatattaaaactgcacgaaatatttttgcacttccggtaatacaacctgaaagtgaagcctggtttgcacagaattatgctgatttcctatatagctatgactggaccgcgattatggctatgccgtatctggaaggtgtcgcagaaaaatcggctgaccaatggttaatacaatggaccaatcaaattaaaaacatccctcaggctaaagacaaatctattttagaattacaggcacaaaactggcagaaaaatggtcagcatcaggctatttcttcgcaacaactcgctcactggatgagcctattacaactgaatggagtgaaaaactatggttattatcccgacaattttctgcataaccaacctgaaatagaccttattcgtcctgagttttcaacagcctggtatccgaaaaatgattaa

SEQ ID NO: 28508 - DNA, 4224 bp, Homo sapiens
  SIMILAR (718)..(1374): 981254mologous to Escherichia coli pseudouridine synthase 1 (hisT) (aa 1-270),accession number X02743,Smith-Waterman Score= 1142.
atgacgaaagtgacctcactgacgcaacagcaaagagcagaactgtgggcgggtatcaggcacgatattggtctgtcgggagattcaccgctgctttcgcgtcacttccctgccgctgagcataatctggcgcaacgtctgctggccgcgcaaaaaagccattctgcccgccagcttttagcgcaattaggggagtatttacgtctggggaataatcgtcaggcggtcacggattatatccgtcataactttggtcagacgccgctgaatcagctctcaccggagcaattaaaaaccattctcaccctgttgcaggaagggaagatggttattccgcaaccacagcagcgcgaggcgaccgaccgtcctttattaccggcggagcacaatgcgctaaaacagctggtgaccaaacttgcggcggcaacgggggaacccagcaaacagatctggcaatcgatgctggaactttccggggtgaaagatggcgagttaattccagcgaaactgtttaaccatctggtgacctggctacaggcgcgtcagacgctaagccagcaaaatacgcctcgacccggggggggagaaattcccccttggtgctcgtccgtgttagcagaaagcgaaagaaaaaaaagaggaagaaagaaacaacgaggaattgactcccccgatgttggagctctcttattagtccgcgctactttctacatatggcaacaaccgccggttaataaaattgcgctgggcattgagtacgccgccagtaagtattacggctggcaacggcagaacgaagtccgcagtgtgcaggagaagctggaaaaggcgctctcccaggtggcgaacgaacccatcaccgtcttctgcgccgggcgtactgacgcaggggtacacggtaccgggcaggttgtgcatttcgaaacaaccgcgctgcgcaaagacgcggcgtggaccttgggcgtaaatgcgaatttacctggtgacatcgctgtgcgttgggttaaaactgtacctgatgattttcatgcccgatttagcgccacggctcgccgttatcgctacatcatctacaatcatcggctgcgcccggcggtactgagtaaaggggtaacccatttttacgaaccgctggacgctgaacggatgcatcgggctgcgcaatgcttgctgggcgagaatgatttcacctcgttccgtgcggtgcagtgccagtcccgaaccccgtggcgcaacgttatgcatattaatgtcacgcgtcacggtccttatgtggtggtagatattaaagcgaatgcttttgtacatcatatggtcaggaatattgtcggcagcctgatggaagtcggtgcccacaaccagccggagagctttcccccgggaacccccgggaccccctttggtccagaaggtgggcgaatccctggggctttacacaacgacacaggaaaaggctctggcgcgccaaaaacgtggccacgtcaggccgataaacatcaccgccgaagcgatcaaaaacagcacgtttaccaccagcaccactggaatattcccggcgaggaacaggctttgcagggtgctgacgaaataacgagcgggaataatgtacgtcaccgcgcggatcaccgcgggcatactgtcgatctgaaaaataaagccggaaagcataatcgacggcagaaaagcggcgttcagggcgacctgagcggcattgaactggttgcgggaccctacccgtattgttatttataccgtgatgccaacgatctcgccaatgaaggcattacgctgcgctttattttacaactctgtctggcggcctggcgctgtttattctcgtccagctcgctaaactctacgcccgacacaaacatgtggatctgtctgcttcgcgccgcagcccacttactcacccaaaaaatgaaggatagaacgatgttgcaacattattcagtgtcatggaaaaaaggactggctgcactctgtttactggctgttgctgggcttagcggctgcgatcaacaagagaatgcggcggcaaaagtggaatacgacggactttcgaacagccaaccgctgcgtgtcgatgccaataaccatacggtaaccatgctggtgcaaattaatggtcgtttcctcaccgacgacactcgtcacggtattgtgtttaaagatggctccaacggacataaatcgctgtttatgggttatgcgaccccgaaagcattttatgaagccctgaaagaggcaggtggtacgccgggcgaaaacatgacgatggataataaagaaacgactcatgtcacaggcagcaaactggatatttcggtcaactggcaaggggcggcaaaagcgtattccttcgatgaagtgattgttgacagtaatggcaagaaactggacatgcgctttggcggtaatttaacggcagcagaagagaagaaaacgggttgcctggtgtgtctggatagctgcccggtcggcatcgtcagcaatgcaacatacacttatgtgttatacctgggctttagcatacaccggaacgttaaccgattgccagcgaagtgggtgaacagtcgatcatttcccgtgcggtcggatctgctgggcgtggtgtctcctggcctgaagcggaccgattcactgcctgctaacctgctggcaacagcgctgtgcgtactggcgtggggctacttcctccatcagggcgtggtcgatccgctgggcggcattaacactctgtggccgctgtttggtattgccaaccagatgctggcagggatggcgctgatgctctgtgccgtggtgttgttcaagatgaaacgtcaacgttacgcctgggtggcgctggtaccaacggcctggctgctgatttgtaccctgaccgcaggctggcagaaagcgtttagcccggatgcgaaagtcggcttcctggccattgctaataagttccaggcaatgatcgacagcggcaatattccgtcgcagtatactgagtcacagctggcgcaactggtgttcaacaaccgtctggatgccgggttaaccatcttctttatggtggtcgtggtggttctggcactgttctcgattaagacggcacttgcggcattgaaagatccgaagccaacggcgaaagcgcaagggtttgtaaaaaaggtgaagggaaacggtattttgcctgtccagttgtactttatcgccagtcttcggattacgtccgtgcaaagagaaactgccgagaccgcggatttcgatacgctcgccgtgcgcaagagtcgaggccatatgctccagcatctcttttactgcatcttcaaccgtcttggcgggaatgtgcgattgcctggcttcgtctttcgcacgaacagacaggctgattgcgcggtttttacgatcaacgccggtgaatttagcttcaacttcgtcgccaacgctcagaaccagggtagcgtcttcaacgcgggggatcctctaagtcacctcagcatgcagccggggctatggaatgcagagatgcagttaaatgaaaaaggatattattttgccgtactggtattaggactgttttctgcggcgtcttatcaaaagaccgttcgggacaagtatgaaggcataccgaccacttccatttattatatgacctgcctgactgtctttattatctctgttgcattactgatggcgcaacggaaaaccccgtcgtgtctggctgtggaacagtggcaacagcgcggtattcgcgtggggtcgtatcgcggggatatggtgccattctggcgcaacagccctgatgtgcagatcatcgtaaccgacgacggtttacagcattaccgtctggcgcgtgatgtggaaattgtcgttattgatggtgtgcgtcgctttggcaatggctggtggttgccggcggggccaatgcgtgagcgagcggggcgcttaaagtcggttgatgcggtaatcgtcaacggcggtgtccctcgcagcggtgaaatccccatgcatctgctgccgggtcaggcggtgaatttacgtaccggtacgcgttgtgacgttgctcagcttgaacatgtagtggcgatggcggggattgggcatccgccgcgcttttttgccacgctgaagatgtgtggcgtacaaccggaaaaatgtgtaccgctggccgatcatcagtctttgaaccatgcggatgtcagtgcgttgacaaggtctcactctgttgtctag

SEQ ID NO: 28509 - DNA, 1007 bp, Homo sapiens
  SIMILAR (656)..(934): 1001254mologous to Escherichia coli K12 putative amino acid/amine transport protein, cryptic,accession number AE000484,Smith-Waterman Score=474.
atggcggctctacaaatggtaaacggccaaaagtgggtttcctccaaccaaaagtactggttggtttataagactaccgacccacctcgtcttaggcccattttctcgggttatcagcccatgtgtccctttaatggtcggcccttctggattcataaaaatcccatgggtgttcactgggcagtggccaccgggctggcgttgatccccatagtcggaattgccgaatttggctggttctggttcggtggtgaaacctatatggcggcatggaacgtcagcggcctgggcacctttggtgcaattcaaagtacctttaacgttacgctgtggtcgttcatcggtgtggaaagtgcctccgttgccgcaggtgtggtgaaaaacccgaaacgcaatgtccctatcgccaccattggtggggtattgattgccgccgtttgctatgtactttctaccaccgcgattatggggatgatccctaatgccgcactgcgcgtttctgcttcgccattcggtgatgccgcacggatggcgttgggtgacaccgccggggccattgtttccttctgcgcagctgcgggttgcttaggttcactgggcggctggacgttgctggcgggtcaaacggcgaaagccgctgccgatgacggactggttcccaccgatttttgcccgtgtaaataaagcgggtacgccagtggcggggctgattatcgtcggtattttgatgaccatcttccagctcagcagcatttcaccaaacgcgaccaaagagttcggtctggtttcttccgtctcggtcatctttacactggtgccatatctttacacctgtgcggcgttactgctgctcggacacggtcactttggtaaagcacgcccggcatatctggcagttactaccattgccttcctctactgcatctgggccgtgtacataactcacattgacgcctgtgttgtcgtatatatcgccggctatcgagcagcgaagctaacatgtgcag

SEQ ID NO: 28510 - DNA, 1682 bp, Homo sapiens
  SIMILAR (990)..(1679): 981254mologous to Escherichia coli K12 putative amino acid/amine transport protein, cryptic,accession number AE000484,Smith-Waterman Score=1157.
atgcgggagatcgttgccggaatatcctccaacgacgctcgacggcggggccttgtgcggcaaggtgaagattacgcgcatcagcaagggagaggtgcggcagcgacattcatgactccatcaatcgaacgctgccgcggcgtaactagttgccagaagccagcaagtcattaccagcgtttgcccggcgcttaccaacgcactgacatccgcatggttcaaagactgatgatcggccagcggtacacatttttccggttgtacgccacacatcttcagcgtggcataaaagcgcggcggatgcccaatccccgccatcgccactacatgttcaagctgagcaacgtcacaacgctacccagatgcatgggactctataatgccaaccgtctgaccgaaatcctgtcagaaacctgttccattatcggggctaatattcttaacatcgcccgccaggattacgaaccacagggtgccagcgtcactattctggtgagtgaagaaccggttgacccgaaactcatcgacaaaacagaacaccccggcccactgccagaaacggtcgttgcccatcttgataaaagtcatatttgcgtacatacctacccggaaagtcatcctgaaggcggtttatgtaccttccgcgccgatattgaagtctctacctgcggcgtgatttctccgctgaaggcgctgaattacctgatccaccagcttgagtccgatatcgtaaccattgattatcgcgtgcgcggtttatacccgcgacattaccggtatgaagcacattatcgaccatgagattaattcgattcagaactttatgtctgacgatatgaaggcgctgtatgacatggtggatgtgaacgtctatccaggaaaatatcttccatacccagatgttgcttaaagagttcgaccttaagcactacatgttccacaccaaaccggaagacttaaccgacagcgagcgccaggaaattacacgtgtggtgaaaaacccgaaacgcaatgtccctatcgccaccattggtggggtattgattgccgccgtttgctatgtactttctaccaccgcgattatggggatgatccctaatgccgcactgcgcgtttctcgttcgccattcggtgatgccgcacggatggcgttgggtgacaccgccggggccattgtttccttctgcgcagctgcgggttgcttaggttcactgggcggctggacgttgctggcgggtcaaacggcgaaagccgctgccgatgacggactgttcccaccgatttttgcccgtgtaaataaagcgggtacgccagtggcggggctgattatcgtcggtattttgatgaccatcttccagctcagcagcatttcaccaaacgcgaccaaagagttcggtctggtttcttccgtctcggtcatctttacactggtgccatatctttacacctgtgcggcgttactgctgctcggacacggtcactttggtaaagcacgcccggcatatctggcagttactaccattgccttcctctactgcatctgggccgtggtggggtccggagcgaaagaggttatgtggtcatttgtcaccctgatggtcatcaccgccatgtatgcgctgaattacaaccggctacataaaaacccgtatcccttaggatcaccaataagcaaagattaa

SEQ ID NO: 28511 - DNA, 2310 bp, Homo sapiens
  SIMILAR (266)..(6): 371254mologous to Escherichia coli FhiA,accession number D38582,Smith-Waterman Score=121.
  misc_feature (1)...(2310): n = a,t,c or g
ttatattccgcaaccccgaaaacccgttggggaaccggggttaccctgtctttgtgcccaccaagcccaacatgtttggacccaaggtttaaatttatagggttggatcacggaaatggtttcccaattgacctgttgttcgctggtttcgggtattgtggcgggtaagcgtttcaaaggcttttctctccgccttccgccgccaagggttgtttgctcatccgccaggcgggtaaacccaagcagggcgttgaacagcaatacgggcaggtgcggcattcccggtaccaccgccagcacgaacataatcccggtgncggtgtagagcaccgacgggcttgccagcagctggttacgcacgtcatgggcgatatcgccgttgtcgctgacgcgggtgacgataatcgccgccgcggtggagagcagcagggaagggatctgcgccaccaggccgtcgccgatggtcatcagcacatactgctggaaggcagcatcggcgctcaggttgtatttgaagatcccgatacagacgccgccgatcaggttgatcgccagaatcatcatcccggcgatggcgtccccgcgcacaaacttcgatgccccgtccatcgcgccgtagaaatcggcctcgctggcaacatctttacgccgggtttgcgcctgcgcctggttgatcaatccggcgttaagatcggcgtcaatcgccatctgtttgccgggcatcgcgtctaaggtaaagcgggcagaaacctcgaaaatacgctcggcccctttggtgacgacaataaagttgattgtccacagcgtcagtaaatccgagcgtgaaagaattataaccgcgctgcacgggcagtcgatttttaacggtggtgggaaaatcgtctcttccgtaaaaatcctgcgcgcgcccaaaaaatggtcctgccagaaaggttcggctaatcggcttatccgaatggtttcgccggtacgtggcgactcgataaattgcccatcgcccaaatacacgcccatatgatcggctatctcgcggctgtggatatggaaaaacagcaaatctccccggcgcaggtcgttgttcgccacaatcgttgcccggcgatagtggtacatctcattggccgtgcgcgggagcttagcctcaaggatcttgttgtaggcataaaaaaccaacccgctacagtcaaagcctttatcaggccgcgtaccgccccagacgtaaggcttgccaagctgctgctccaggcggtgaatcgccacttcggtaatgttatgcagatggtcgctgcttaaaaagtggttgttttccgccagcgcctgccagcgtctgtcaatcgcaatgagcggagcaggaaaccattctgaatgctgttttatctgctcccggttgtgctggttatgacccccggaaagtgcaagtggcaccaaggccagggcagcactgggcttgtctcccattacccgctggcaggacatcaaccctgcactctcccggagcaatgacactggctctactttgccgtttttactggcgtgatcgttggactgatcctcgaacccgtgccgggtgccgtggtggcgatggtgggtatatccatcatcgccatactctctccctggctgctgttcagcccggagcagctcgctcagccaggctttaaattcactgcaaaatccctctcgtgggccgtttccggtttttctaattcggttatctggctgattttcgccgcctttatgtttggcacaggctatgaaaaaaccgggcttggacgccgcattgcgctgattctgagtatctgcaaaaatatccgcagccacaatccctacaggaattaagtcgtcatgactgtctggtgaccaaagagcgcgatatgacccatggaatatgggagttggggaacggtcaggagaaaaaatcggtgaaggtaagcgggcatctttcctccaatagcggcgagattgtgctgcaatgggcgctggtacggtttggaagaaccaccagtaatacttctgggggaactcagacccatcatcatggaagaggccaggaaagaggcaagagaggacgctgagggggctgatggagaacaggtacacattcaccacatggcccacagtttcctcaaaatgaagggtccggaaggaacgcccaactgctgtgtttagacctaagtaattagcctcatagggagtttccagaatgtttattggacccagggttgagccaggggtcttcttcatcagtggaccagaaagctgccgtattcttttcatccacagtaggcgtgtataggcctggcgcttcat

SEQ ID NO: 28512 - DNA, 892 bp, Homo sapiens
  SIMILAR (169)..(525): 971254mologous to Escherichia coli MbhA,accession number D38582,Smith-Waterman Score=591.
atgaatgcatgccgtagtccgctgctgaagaagaaatccgccaccgagctcggtgagctggcaaccagtatcaacaccattgcccgtgatgcgcatatggaagcgaatctggagatggagattgttccccagggattacgcgtgctgattaaagacgaccaaaaccgcatgttcgactcgctcgataataaaattattattaccgggcataacgatgcgatggcctacaaaaacaatatctacaacaactggaacctttcgggtgaccgcgcgctttctgttcgtcgggtgctggaagaggccggaatgccggaagataaagtgatgcaggtaagcgcaatggcggaccagatgctgctggattccaaaaatccgcaaagcgcgggcaaccggcgcattgagattatggtgctgaccaaaagtgcgtccgatacgctgtatcaatactttggtcagcatggggataaagtggtgcagccgctggtgcaaaagctggataagcagcaggtgctttcgcagcgaacgctggagatgcgcgacaatcccgccctgcgcgatatccctattgctattggcggcagccgcgaacgtcggggggtgatcagcaccgccaattatcccgcgcgtaaatttggcgtacgtagcgctatgccgacagggatggcgctcaaagtgtgcgccacatctcaccttgcttgcggggcgctttgacgcctacaaagaagcctcaaatcatatccgtgaaatcttctcgcgctacacctcgcgcaggctgcaatctgagctcagccacctacacaccaccgtggccgacactttcattaaaaagtttcctgagacgacttgcgtgcatgttgacttcatgatcagcgccgctgggaagaacccctga

SEQ ID NO: 28513 - DNA, 1011 bp, Homo sapiens
  SIMILAR (57)..(284): 891254mologous to Homo sapiens dJ831C21.3 (A putative novel protein),accession number AL133466,Smith-Waterman Score=370.
gctgatgtgggcattgccgaaggtaacccgtggcccagtgtatatggccgggtctcctcaaactgcattcattcaagtaggacccagggtgcatgcccatctccagcccagggcagctcccctgtaagctgggtgagctactgaagccaaggcgggaggcagctgacaacacccacagcccatgcggaggtggtggaaaggctggactcagcagcaacaccaaatcccggaccaggcagaaaccacccaagactgaggggctcgtgccagagcggtggccacagccccaccccaccggctcaggggttcttcccagcggcgctgatcatgaagtcaacatgcacgcaagtcgtctcaggaaacttcttaatgaaagtgtcggccacggtggtgtgtaggtggctgagctcagattgcagctgctaagacaccagccacttaccaagagaaagccaggctgcttcaaacccagggcccacggcaaaaaaagcatcacttccggccggggaagtctggaagccacgccttgtgggaaggtcacactgggcatctaggccttcgcctgcattgcagaagggagagccagggtccccctcctgggagaacgcctgcgttccccaagccccacaccggcttttgcaccaacaaaaggctttttaagcacagagccgggtaaaacgtaactgtagacccaaaggcaaccaccagccctggggaccctgggacatgacctccaaggcacgtcctgtcagtcatggtgacaggctggctggggttggcagggagcttgctctccttctcggagggccggagcagcgtggggccaaagacagtggcgaggttgtgcagggacatcttattgaccgcctccttctctgccacccgatgccctctgcgaagttggggtagaactcgtcagtgaagaggggctcgggcagctcacgggagtacagcttcagcgtggcctgcgatggcgttcacgtacatctcgctcatcatcaccgaaacgtc

SEQ ID NO: 28514 - DNA, 1401 bp, Homo sapiens
  SIMILAR (936)..(343): 1001254mologous to Escherichia coli Arginine-binding protein ArtJ,accession number D90724,Smith-Waterman Score=1036.
tcaacagccaggacttcccagcctgcgggggcctgtgtcacgctgaactggacaggactgcagcagggctcgtgcatcagcacctggcatccaggccacactagtgttgccgctgaaaagctctgtcacggggatgttgaaggggatggatgtaatggtccggcatccgatctggctacatttgaggtcaagccgctgcgcctgcgccactgccagatctgttgtgactccaactggcgaaggcctgggtgccactggggaagtgtggcggggactagctaacggagccgccgctacaggggaacgtacgctacagctgttgatactaaggccccaagagagttccagcagggctttgttatccggacgtacagcgatgcccaggccggtgccaaaatattgcggatcggtcactttctcagtagcaacaccaagttgtggattggttttcagccattcgtttaccaccgctgtgtcaccaaataccccatcaatacgaccatttttcagatcgataaaggcattctgataactgtcataagagacagttttcacttccgggtgctgatcctgaatatatttctggtgcgtagtaccgttttccatcccaatacgtttgcctttcagatcggcaaacgttttgtaggtatcttttttggcaatcacgacggctgagttttcatagtagggcgtggtaaacgatacctgtttgctacgctccggggtgatatccataccggagattacggcgtcatattttctgaatttcagggacgggatcaggctgtcgaacgcgtgattagtaaaagtacattctgcctgcatttgtttgcacaaggcttttgccagatcgatatcaaagcccacaatctcattattagcacctatagattcaaagggtggataggtggctgaaacgccaaaattgattttctcgttccggatgaaaacttccaaaacggcaaactggatctggaaaacgggcgtatcgacgggggtttttgggtgacaccggaggggtccactgtaggggcttgaaactttcagcataaagtcatactgaatactcattttcacatcccagtaattcaggcgatcgcccagcgtactgccatcgcgcttttcccgccctttatcggcagcaagaaagaaattcatcccttgtaacggcccttcgctgacccgatagttcataccacctaagatacccgtgccttcaatccgcacatctcgtttactggattcatagccgcgagtcacaatcggtgcaaatgtcagcgtaaattgcggcgttaaacgatagttgacgcccaattgccaggactgcattccttcacggttacgatcaagacttaatgaaaagggatagccaatgtcggtatccaccacggcaccattcat

SEQ ID NO: 28515 - DNA, 3082 bp, Homo sapiens
  SIMILAR (1016)..(1642): 961254mologous to Escherichia coli K12 putative ATP-binding component of a transport system,accession number AE000509,Smith- Waterman Score=1026.
gcaatattttggcaccggcctgggcatcgctgtacgtccggataacaaagccctgctggaaaaactgaataacgcgctggcagcaattaaagctgacggtacttatcaaaaaatcagtgaccagtggttcccacagtaagattcagaaagccgcaaccgcggcttgagactgatgacaaaggtaaaattgcctgatgcgctacgcttatcaggcctacatggcccatgcaatgtattgaatttgcacgcttttgtaggccggataaggcgtttacgccgcatccggcaacagtgccaactgcctgatgcgacgcttgcgcgtcttatcaggcctacaaattcccgcaccatccgtaggccgataaggcgttacccgcatccgcaacagttgaaaagctggagaaaatgccgcatcaccgacgataccgccgagaatcgccactgcgttcagaccgatttggaccacggtaaagaacatgccgggattttcctgcatattcagaacgcgttgggcatttatattgccttcatcagccaccagtttaagtttgattttgcgccagatcctcggaaggggaagttgattaatttgtgtgaaatacacattgaaagccgattcgaagaaagtgaaccggcatttctcagtggcatagtactacgccgtcatatgacagacgccaattccgccaattccaaaatgcatgcagctgccttaccccaccacgtgctaagggcaggagttgagtcagctgtggcctgccctgggggctggggtccttggggagaacacgggcatgttgatttggacactcattcagcaaacatctacgaagcacctgctgtagaatgcactggacgttgccaatccgtacaacaggtgatagtgaacgccaagagaggccccctttgtcctcacggaccttctcttgtaggagcaggaagagtgaggaaaacttttaacagctcccagcagatgcccgtatgtctcattgagcctgtgttcgcttctaaactgatccctgttagagcgatcttcggatcaatcggtccgatcgtgcagggtaaatcgaccctgttccgtatgatctctgctcaggaacagccggacagcggcaccatcactttgggtgaaacggtgaaactggcgtcggttgatcagttccgtgactcaatggataacagcaaaaccgtttgggaagaagtttccggcgggctggatatcatgaagatcggcaacaccgagatgccaagccgcgcctacgttggccgctttaactttaaaggggttgatcagggtaaacgcgttggtgaactctccggtggtgagcgcggtcgtctgcatctggcgaagctgctgcaggttggcggcaacatgctgctgctcgacgaaccaaccaacgacctggatatcgaaaccctgcgcgcgctggaaaacgccctgctggagttcccgggctgtgcgatggttatctcgcacgaccgttggttcctcgaccgtatcgccacgcacattctggattaccaggatgaaggtaaagttgagttcttcgaaggtaactttaccgagtacgaagagtacaagaaacgcacgctgggcgcagacgcgctggagccgaagcgtatcaagtacaagcgtattgcgaacttcagcaccaagttactttttgtcgacctgcttaagaatgcctacctatacgatctccatttaccgttgttaaacctgatgctgacgccagatgagcgcgaagcgttggggactcgcgtgcgtattgtcgaagagctgttgcgcggcgaaatgagccagcgtgagttaaaaaatgaactcggcgcaggcatcgcgacgattacgcgtggatctaacagcctgaaagccgcgcccgtcgagctgcgccagtggctggaagagaatcaccgcaggcaacggcaaagtagccgaacgcgcctcgccgcgctggctggcgttttcaatcaccacccaactgaaagtgctgtcaccatcgatgccagcttcaatcgccacccaggtgaggagacgaggcaaagccgatacgaggacgaaggagaagacacccgagagcgaggagtgatattatctgtacatggggagccaaagcagcaatctccagcaaagtcgcgcgttattcagtttttccagcagggctttgttatccggacgtacagcgatgcccaggccggtgccaaaatattgcggatcggtcactttctcagtagcaacaccaagttgtggattggttttcagccattcgtttaccaccgctgtgtcaccaaataccccatcaatacgaccatttttcagatcgataaaggcattctgataactgtcataagagacagttttcacttccgggtgctgatcctgaatatatttctggccagtacagggggtcacttcctgtctcgtattacctgtcgggtccagtactttctcagcaaatccttgcgtatttctgggagttttctgtggtcgaaaagggcacggttgttcagcttctgcggaggtggattacccgcgtatggaccactccgggttatttggctttggatgctgctggatctgcgttcatgtctgccggcaccgatgtcttctcgtggatccggtcaccgttgtttcggtgattcccagccggccaccgttgttctgcgcaccagacgctggaaactgttcctgatcccggaagagtattcgccgccgcaggtgctggttgataccgatcggttccttgagatgaatcgtcaacgctcccttgatgatggctttatgcacgcagtgtttaacccgtcatttaacgctctggcaaccgcaatggcgaccgcgcgtcaccgcgccagtaaggtgctggaaatcgcccgtgaccgccacgttgaacaggcgctgaacgagacgccagagaagctgaatcgcgatcgtcgcctggtgctgctaagcgatccggtgacgatggcccgtctgcatttccgtgtctggaattccccggagagatattcttcatgggtgagttattacgaagggataaagctcaatccactggcattgcgtaaaccggatgcggcttcgcaataa

SEQ ID NO: 28516 - DNA, 1704 bp, Homo sapiens
  SIMILAR (1024)..(1701): 1001254mologous to Escherichia coli ribonucleotide reductase,accession number X06999,Smith-Waterman Score=1196.
atggtgccagctcctatgccattattcacttcgaccgttatgaaattggagctttgtgtaaaaccaatgattgtccatgcgttatctggaagttgccatggctataatgtttgtccgatgagaagattacatcgatgtgacaggccatcaataaaaagagatttggttgattataatatcattaatgaattgctttttaattgtagcaaaattcaaccagttgaaaaccagaaagatgctaatgaaactttagagttaaaaattattgagcttcagatgaaaattaataatttaatcgttgcattgtctgtcgcgcctgaagttaccgctatagcagagaaaataagactattagataaggaattacgaagggcttcggtatcattgaaaactttgaagagtaaaggtgtaaattcattcagtgatttttatgctattgacttaaccagtaaaaatggacgagagttatgccgtacacttgcctataaaacattcgaaaaaatcataattaatacggataataaaacctgtgatatctattttatgaatggcattgtttttaaacactatcctttaatgaaaggatttaccctggagttacaaaaggtatcgttacacgccctactagaaaactcagccgtcgtgatggccaaaaaagatacctacaaaacgtttgccgatctgaaaggcaaacgtattgggatggaaaacggtactacgcaccagaaatatattcaggatcagcacccggaagtgaaaactgtctcttatgacagttatcagaatgcctttatcgatctgaaaaatggtcgtattgatggggtatttggtgacacagcggtggtaaacgaatggctgaaaaccaatccacaacttggtgttgctactgagaaagtgaccgatccgcaatattttggcaccggcctgggcatcgctcccctgctggaaaaactgaataacgcgctggcagcaattaaagctgacggtacttatcaaaaaatcagtgaccagtggttcccacacgccaacaacctgacgcataaaaccttcgaagccattcagtattacctgctgaaagcctctaatgagctggcgaaagagcaaggcgcgtgcccgtggtttaacgaaaccacttacgcgaaagggatcctgccgatcgatacctataagaaagatctggataccatcgctaatgagccgctgcattacgactgggaagctctgcgtgagtcaatcaaaacgcacggtctgcgtaactccacgctttctgctctgatgccgtccgagacttcttcgcagatctctaacgccactaacggtattgaaccgccgcgcggttacgtcagcatcaaagcgtcgaaagacggtattttgcgccaggtggtgccggactacgagcacctgcacgacgcctatgagctgctgtgggaaatgccgggtaacgatggttatctgcaactggtgggtatcatgcagaaatttatcgatcagtcgatctctgccaacaccaactacgatccgtcacgcttcccgtcaggaaaagtgccgatgcagcagttgctgaaagacctgctcaccgcctacaaattcggggtcaaaacactgtattatcagaacacccgtgacggcgctgaagacgcacaagacgatctggtgccgtcaatccaggacgatggctgcgaaagcggcgcatgtaagatctga

SEQ ID NO: 28517 - DNA, 3299 bp, Homo sapiens
  SIMILAR (33)..(1283): 961254mologous to Escherichia coli catalase HPII,accession number M55161,Smith-Waterman Score=2170.
ccttcaagtaataaattaaggagacgagttcaatgtcgcaacataacgaaaagaacccacatcagcaccagtcaccactacacgattccagcgaagcgaaaccggggatggactcactggcacctgaggacggctctcatcgtccagcggctgaaccaacaccgccaggtgcacaacctaccgccccagggagcctgaaagcccctgatacgcgtaacgaaaaacttaattctctggaagacgtacgcaaaggcagtgaaaattatgcgctgaccactaatcagggcgtgcgcatcgccgacgatcaaaactcactgcgtgccggtagccgtggtccaacgctgctggaagattttattctgcgcgagaaaatcacccactttgaccatgagcgcattccggaacgtattgttcatgcacgcggatcagccgctcacggttatttccagccatataaaagcttaagcgatattaccaaagcggatttcctctcagatccgaacaaaatcaccccagtatttgtacgtttctctaccgttcagggtggtgctggctctgctgataccgtgcgtgatatccgtggctttgccaccaagttctataccgaagagggtatttttgacctcgttggcaataacacgccaatcttctttatccaggatgcgcataaattccccgattttgttcatgcggtaaaaccagaaccgcactgggcaattccacaagggcaaagtgcccacgatactttctgggattatgtttctctgcaacctgaaactctgcacaacgtgatgtgggcgatgtcggatcgcggcatcccccgcagttaccgcaccatggaaggattcggtattcacaccttccgcctgattaatgccgaagggaaggcaacgtttgtacgtttccactggaaaccactggcaggtaaagcctcactcgtttgggatgaagcgcaaaaactctccggacgtgacccggacttcccccgccgcgagttgtgggaagccattgaagcaggcgattttccggaatccgacctgggcttccagttgattcctaaagaaaatgaattcaagttcgacttcgatcttctcgatccaaccaaacttatcccggaagaactggtgcccgttcagcgtgtcggcaaaatggtgctcaatcgcaacccggataacttctttgctgaaaacgaacaggcggctttccatcctgggcatatcgtgccgggactggacttcaccaacgatccgctgttgcaggacgcagaatgtacttttactaatcacgcgttcgacagcctgatcccgtccctgaaattcagaaaatatgacgccgtaatctccggtatggatatcaccccggagcgtagcaaacaggtatcgtttaccacgccctactatgaaaactcagccgtcgtgattgccaaaaaagatacctacaaaacgtttgccgatctgaaaggcaaacgtattgggatggaaaacggtactacgcaccagaaatatattcaggatcagcacccggaagtgaaaactgtctcttatgacagttatcagaatgcctttatcgatctgaaaaatggtcgtattgatggggtatttggtgacacagcggtggtaaacgaatggctgaaaaccaatccacaacttggtgttgctactgagaaagtgaccgatccgcaatattttggcaccggcctgggcatcgctgtacgtccggataacaaagccctgctggaaaaactgaataacgcgctggcagcaattaaagctgacggtacttatcaaaaaatcagtgaccagtggttcccacagaggcccacgacgggttataaacaatgtaccgaaaaaaaaataccagaaaagaaagaaagaaagaagaagaagaagaagaagaaaaaagcagaaagaacgatgaataacccacaaatatccgcgcccccgaaacctgcccatgagccgtggagcaccgcccggccatgctgcgaggaaaaagagccaatgacattacgaggaggaccaaataagcgtcatgccacctgtaaaatccccgggacactctccgggtttagaaacccagataaatatggagttaatgtgagacaaattccttacgcgtggaggtttcgaggggccaatgtggagaaaccttttacggtgcgaccagttactactatgaaagctgtctctctggaaggtcggattgttgatcccctgctaccacatcgaggtcggcagataatggttccaacgcagaacgctcagacaaaaccggaggtgcctctgtctaatgaagataggatatttgctcaccaaaggatgcgtcgatcggggaaagaactgcgtgccaatttgggagcgggcgctgaaatattgcctgttgcaaggcgctcaacgatggaccttacaatgggggtgtccacgggttttcatatagtagggggagtggtgaaagcatacgtcaccacgctgacgacttataccatgtatggcctggagttatgccccggcctgacgtcctgctcgggggacccaacgggttcccgccaccgccgagctcgcctcgcgagtcgtgtctggcatggctcggcgccggccgcgctcctatgttcgggcccggtaaatttacgctactgttgtgtgcttactatgctgtgctgtgttgatatgtacttgacagtcgtgcactgcaagatgccacagctgggggaagctattgatggtgtggcgcttgcattttgccgcacctttgccatgccgtccagaaatttacctttgagcttctcgccttcagctgatattcgcattcgacacaggtttcacgtagcatgtagggagcccgatgatgacaactttgcctaccatatgggtaatgccgaatggcacattatttatgcttcattgggcactacccgaagtgccttacgcttcttgttttccttaggtgtggctaacattacactttatagtgttatgcgccccaatgcgcttggctatgccgttttactacatgggggcacaatttacccggtggcactgcccggtcattactggctggcccgtactaactttactaaatccgtgcttaatacgccttgcacggccttgctgctaccctacggtgtagtgatgattatgcggtttttactgtgcttccacactattttcttgatcgtgccgggggtccctttagcgcctgtgcctggccttgcctacacgctaccccgcgtggccttgcgggaccgcctgcctggtttttgccacattatcggtgttgcctatggcccatgccgtatgtag

SEQ ID NO: 28518 - DNA, 1998 bp, Homo sapiens
  SIMILAR (1)..(684): 961254mologous to Escherichia coli carbamoyl-phosphate synthetase subunit A (ttg start codon),accession number J01597,Smith-Waterman Score=1155.
atgattgctattcccgatatcgatacctgtaacctgacgcttttactgcgcgagaaaggcgcacagaatgcctgcattatcgcgggcgataacccggatgcggcgctggcgttagaaaaagcccgcgcgttcccaggtctgaatggcatggatctggcaaaagaagtgaccaccgcagaagcctatagctggacacaagggagctggacgttgaccggtggcctgccagaagcgaaaaaagaagacgagctgccgttccacgtcgtggcttatgattttggtgccaagcgcaacatcctgcggatgctggtggatagaggctgtcgcctgaccatcgttccggcgcaaacttctgcggaagatgtgctgaaaatgaatccagacggcatcttcctctccaacggtcctggcgacccggccccgtgcgattacgccattaccgccatccagaaattcctcgaaaccgatattccggtattcggcatctgtctcggtcatcagctgctggcgctggcgagcggtgcgaagactgtcaaaatgaaatttggtcaccacggcggcaaccatccggttaaagatgtggagaaaaacgtggtaatgatcaccgcccagaaccacggttttgcggtggacgaagcaacattacctgcaaacctgcgtgtcacgcataaatccctgttcgacgacttgcatgggtcctgtatcttttccatcttgcgtaacgctcgcgcgctgcatgtggttgaagcgccaaatatggtggtcttctgggtcggtcactcaattaacgaaaacgagtatttgtatgcccgtcgcgtcggaaaccagctgggcctgcgtgagctgaatatctgcaccggctgtggtccgggagcgatggaagcgccgatgaaaggtgctgcggtcggacacgcgcagcagcgttacaaagacagtcgttttattggtatgacagagccgtcgattatcgccgctgaaccgcctaacccgctggtcaacgaattgatcatcatgccagatatcgaaaaacgtctggaagcgtttgtccgtatcgctcacggtatcattatcttccctggcggtgtgggtacggcagaagagttgctctatttgctgggaattttaatgaacccggccaacaaagatcaggttttaccattgatcctcaccggcccgaaagagagcgccgactacttccgcgtactggacgagtttgtcgtgcatacgctgggtgaaaacgcgcgccgccattaccgcatcatcattgatgacgccgctgaagtcgctcgtcagatgaaaaaatcgatgccgctggtgaaagaaaatcgccgtgatacaggcgatgcctacagctttaactggtcaatgcgcattgcgccagatttgcaaatgccgtttgagccgtctcacgagaattcgcattcagccaggaaagttcatacagcgtccagatatccgtaccgtgaaaaggcaggttatccgctttcagacccagcgggtcgcgattcaggctgcgtggaacgccttgcagtaggctggcgtcatagagagaaattagtggacgatttgaccgcacaagccctgaaagattttactgcacgctactgcgatgcgtggcatgaagagcataaaagctggccgttaagtgaggaactgtacggtgttccttcaccgtgcattatttcaactaccgaagatgccgtatactggcaaccccagccgtttaccggggaacaaaatgtaaacgcggttgaacgcgcttttgatattgtgatacaacccacaattcataccttttatacgactcagtttgccggggatatgcacgcgcagtttggcgatatcaaactgacattgctgcaaacctggagtgaagacgacttccgtcgggtgcaggaaaatctgattggtcatctggtgactcagaaaaggctaaaactgccgcccacactatttatcgcgacgctggaagaagagttagagggtaccgacaactaa

SEQ ID NO: 28519 - DNA, 370 bp, Homo sapiens
  SIMILAR (1)..(72): 951254mologous to Escherichia coli prolyl-tRNA synthetase,accession number M97858,Smith-Waterman Score=117.
atgtttgctgatatggaactgatcggtattccgcacactattgtgctgggcgaccgtaacctctacaacgacgtttccaatgggcttatcaaatggcacaccaggagattatatcccacacatgactcggaagttcctacgcccgtggatcctcgctcattgctagcacagcagtctgagagcaaactgcaaggcagcacgccccacaccaagaaggtaggaatccgggccccacgaagaggtcctttctggacccaggcatgttctggactcaagatcaacgctatgtttaccttcacttgtgaatcgtcttggtcaaacacaccttcaccttcttgcatgcgcacagactttactccaactcatgaca

SEQ ID NO: 28520 - DNA, 996 bp, Homo sapiens
  SIMILAR (403)..(993): 971254mologous to Escherichia coli K12 putative fimbrial-like protein,accession number AE000123,Smith-Waterman Score=983.
atggataaagaacgcatcattcaggaatttgtgcccggcaaacaggtcacactggcgcatctcatcgcgcatcccggtgaggaactggcgaagaaaatcggcgttccggatgcgggcgcaattggcattatgacgctaactcccggcgaaacggcgatgatcgccggtgatttagcgctgaaagccgctgatgtgcatatcggttttctcgaccgattcagcggtgcattggtgatttatggctcggggaattataccctcgccagaaaaacacaggccgtggaatttaatgataagggcgatattgatacgccgggtgaatattttaaccatccccgctggtatcacgccttaattaccacgctacaggatgtagacatgctctcaccacttatatggggattccggaactacaaggacgtccaagtgataaaagcgacgccacataaaatagtgatactgatgggaatattattatcaccctcagtatttgcaacggatattaatgtagagtttacagccactgtcaaagcgacaacctgtaacatcacacttactggtaataacgtcacgaatgatggcaataataactacacattgagaatccctaagatgggtctggataagatcgcgaataaaacgacagaatctcaggctgattttaaactggttgccagtgggtgcagcagtggcatcagttggattgataccactctgaccggaaatgcatcatcaagctcacctaagcttattataccgcagtctggtgattcatcttcgacgacaagtaatatcggtatgggtttcaaaaaacggactactgatgatgccactttccttaaacctaacagtgcggaaaagatacgctggagcacagacgagatgcagcccgataagggtcttgaaatgaccgttgcgctacgtgaaacagatgcagggcaaggcgtaccggggaattttcgtgcactggcgacgtttaatttcatctatcaataa

SEQ ID NO: 28521 - DNA, 2023 bp, Homo sapiens
  SIMILAR (1166)..(2020): 941254mologous to Escherichia coli prolyl-tRNA synthetase,accession number M97858,Smith-Waterman Score=1415.
atgtcacgagtacacgaaagttgttcacgaggcggcgactcgatggataaagaacgcatcattcaggaatttgtgcccggcaaacaggtcacactggcgcatctcatcgcgcatcccggtgaggaactggcgaagaaaatcggcgttccggatgcgggcgcaattggcattatgacgctaactcccggcgaaacggcgatgatcgccggtgatttagcgctgaaagccgctgatgtgcatatcggttttctcgaccgattcagcggtgcattggtgatttatggctcggggaattataccctcgccagaaaaacacaggccgtggaatttaatgataagggcgatattgatacgccgggtgaatattttaaccatccccgctggtatcacgccttaattaccacgctacaggatgtagacatgctgatctatgtccatggcgcaaatgacccggaaagtcggttgcctgccgggttgctggatattggcgtcagcaaacggcaaatcgccgtcatcagtaaaacggacatgccagatgctgacgtcgccgcaacgcgaaagttattgcttgagacgggtttcgaagagccgatgttcgagctaaacagccacgacccgcaaagcggtgcagcaactggtggattatctggcatctctcaccaaacaggaggaagcagagaaattagtggacgatttgaccgcacaagccctgaaagattttactgcacgctactgcgatgcgtggcatgaagagcataaaagctggccgttaagtgaggaactgtacggtgttccttcaccgtgcattatttcaactaccgaagatgccgtatactggcaaccccagccgtttaccggggaacaaaatgtaaacgcggttgaacgcgcttttgatattgtgatacaacccacaattcataccttttatacgactcagtttgccggggatatgcacgcgcagtttggcgatatcaaactgacattgctgcaaacctggagtgaagacgacttccgtcgggtgcaggaaaatctgattggtcatctggtgactcagaaaaggctaaaactgccgcccacactatttatcgcgacgctggaagaagagttagaggtcatctcggtgtgtaatctctccggtgaagtgtgcaaagagacgctgggaacactgccgattgagaaaacggttaagactctgctggttaaagcggttgaaggcagcagcttcccgcaggttgcgctgctggtgcgcggtgatcacgagctgaacgaagttaaagcagaaaaactgccgcaggttgcaagcccgctgactttcgcgaccgaagaagaaattcgtgccgtggttaaagccggtccgggttcactgggtccggtaaacatgccgattccggtggtgattgaccgtaccgttgcggcgatgagtgatttcgctgctggtgctaacatcgatggtaaacactacttcggcatcaactgggatcgcgatgtcgctaccccggaagttgcagatatccgtaacgtggtggctggcgatccaagcccggatggccagctgggtaccaagtactccgaagcactgaaagcctccgtacagggtgaagatggccgtaaccaaatcctgacgatgggttgctacggtatcggggtaacgcgtgtggtagctgcggcgattgagcagaactacgacgaacgaggcatcgtatggcctgacgctatcgcgccgttccaggtggcgattctgccgatgaacatgcacaaatccttccgcgtacaagagcttgctgagaaactgtacagcgaactgcgtgcacaaggtatcgaagtgctgctggatgaccgcaaagagcgtccgggcgtgatgtttgctgatatggaactgatcggtattccgcacactattgtgctgggcgaccgtaacctcgacaacgacgatatcgaatataaatatcgtcgcaacggcgagaaacagttaattaagactggtgacatcgtcgaatatctggtgaaacagattaaaggctga

SEQ ID NO: 28522 - DNA, 2586 bp, Homo sapiens; identical to SEQ ID NO: 18326
  SIMILAR (619)..(1365): 931254mologous to Escherichia coli K12 putative frameshift suppressor,accession number AE000501,Smith-Waterman Score=1188.

SEQ ID NO: 28523 - DNA, 4491 bp, Homo sapiens
  SIMILAR (1714)..(2508): 921254mologous to Escherichia coli K12 survival protein,accession number AE000115,Smith-Waterman Score=1169.
atgagccagacgctgcctgcgtggtgtgaaaactgggcgcaagaagtcgatgcccggttgacgaaagaagcgcagagcgcgctgcgtccggtgatcaacctgacgggaaccgtgctgcataccaaccttgggcgagctttacaggcggaagccgcggtggaagccgttgcgcaggctatgcgttcgccagtgaccctcgagtatgatctggacgacgccggacgcggacatcgcgatcgggcgctggcgcagctgctgtgccgtattacgggggcggaagatgcctgtatcgtcaataacaatgcggcggcggtgttattgatgttggcggccactgccagcggaaaagaggtggtggtatctcgcggcgaactggtggagattggcggcgcgtttcgtattcccgatgttatgcgtcaggcaggctgcaccctacacgaagtagggaccaccaaccgcacgcacgcgaatgattatcgtcaggcggtgaatgaaaataccgcactgttgatgaaagtacataccagtaactacagcattcaggggttcaccaaagcgatagatgaagcggaactggtggcgctcggcaaagagctggatgttcccgtagtgactgatttaggcagtggctcgctggtcgatcttagccagtacggtttgccgaaagagccaatgccgcaggagttgattgcggcgggcgtcagtctgtggcgagaagcacttacaacccgccaaaagctgattgcccaggattataaagtcagttattcattggccaaatcctgtaaaagtgacttgaagaaataccggtgcaatgtggataaccttccgcgatcgcgtgaagccaagtgtgagcgcaacatcatagttgacgaagctggtttcgaagctgcaatggaagagcagcgtcgtcgcgcgcgcgaagccagcggctttgctattgccgcctacgccagtaatattgaaaacctgcctgcgctgctgccagcggtagaaaaaatcgcgcagaagcacaccagcttccagatcaaaccggaacagtacaacatcgtcggtgaacacctgttggcaacgctggacgaaatgttcagcccggggcaggaagtgctggacgcgtggggtaaagcctatggtgtactggctaatgtatttatcaatcgcgaggcggaaatctataacgaaaacgccagcaaagccggtggttgggaaggtactcgcgatttccgcattgtggctaaaacaccgcgcagcgcgcttatcaccagcttcgaactggagccggtcgacggtggcgcagtggcagaataccgtccggggcaatatctcggcgtctggctgaagccggaaggtttcccacatcaggaaattcgtcagtactctttgactcgcaaaccggatggcaaaggctatcgtattgcggtgaaacgcgaagagggtgggcaggtaggtgctgtcgccaggtgggcaattgccgatcgttggtccattgttggggcctactactacgacaccaatgctaacaagcaagccgactctatgttaggtgtgcaatacagctcctgctgctatgcaattcgcgtcggttacgagcggaagctgaacggttgggataacgataaacaacatgcggtatatgacaacgcaatcggctttaacatcgaacttcgcggcctgagctccaactacggtctggtgcggttaattgaaatggaaaaagtagtcgataaagtcgcagccgtcgtcaataacggcgtcgtgctggaaagcgacgttgatggattaatgcagtcggtaaaactgaacgctgctcaggcaaggcagcaacttcctgatgacgcgacgctgcgccaccaaatcatggaacgtttgatcatggatcaaatcatcctgcagatggggcagaaaatgggagtgaaaatctccgatgagcagctggatcaggcgattgctaacatcgcgaaacagaacaacatgacgctggatcagatgcgcagccgtctggcttacgatggactgaactacaacacctatcgtaaccagatccgcaaagagatgattatctctgaagtgcgtaacaacgaggtgcgtcgtcgcatcaccatcctgccgcaggaagtcgaatccctggcgcagcaggtgggtaaccaaaacgacgccagcactgagctgaacctgagccacatcctgatcccgctgccggaaaacccgacctctgatcaggtgaacgaagcggaaagccaggcgcgcgccattgtcgatcaggcgcgtaacggcgctgatttcggtaagctggcgattgctcattctgccgaccagcaggcgctgaacggcggccagatgggctggggccgtattcacgcgagcttgcccgggatcttcgcccaggcattaagcaccgcgaagaaaggcgacattgttggcccgattagttccgggggccgtttcgacggtaccgttgaagtgaaagacggtcatctgatcgttaacggtaaaaaaatccgtgttaccgctgaacgtgatccggctaacctgaaatgggacgaagttggtgttgacgttgtcgctgaagcaactggtctgttcctgactgacgaaactgctcgtaaacacatcaccgctgatacgccagcggctctgcgctggctggaagaaaaccagcttgaagacgggcatgaatgtttgcttcgtcgcgtgatcagcagcgatggtcgctcccgtggtttcatcaacggtacagctgttcctctgtcacaactgcgcgaaacatctacgactaccggtgccaggcgagtcatacgtgcgatacgacgcataaacagcagcgatgccagcacgatccccacgctgatggcaataaccatatcaaacaacacggtcagcgacatgcacagcagcatgacgatgatgtccacgagaatcagaacgctcatcaccacgatctacaacggagatttgcggatgattcgccagaggaagttgtgcaaaacggctatcgccaggacttatggcaatgacgacacgtttcacccggggatgcgccaccagcgcatgcaccgagtgttcaagaatgcaccgcacttggaccaacctgtggtcacccttaacatctatccaaaagctgatgaaagcagcagcctgaaggcatcacgtgggacaagaggagcagcgtacaggccagcgcgccaaaatctttattctgcgtcgtctggaaagaaggatgaaaatcctgtgattgaatttaaaaacgtctccaagcactttggcccaacccaggtgctgcacaatatcgatttgaacattgcccagggcgaagtcgtggtgattatcgggccgtccggttccggtaaatcgaccctgctgcgctgcatcaacaaactggaagaaatcacctccggcgatctgattgtcgatggcctgaaggttaacgatccgaaagttgacgagcgcctgattcgccaggaagcaggtatggtgttccagcagttttacctcttcccgcatctgacagcgctggaaaacgtcatgtttggcccgctacgcgtgcgtggcgcgaacaaagaagaggcggaaaaactggcacgtgagctgctggcgaaagtcggtctggcagaacgtgcacatcactacccttccgaactttctggtggtcaacagcagcgtgtggcgattgcccgcacgctggcggtgaaacacaaaatgatgctgtttgatgaaacgactttcgattttgacccggaacttgtccatgaagtgctgaaggttatacacgaatttgctgaaaaagggattaccaatgactctctgacggaaaatcctgctaagacacaaggagaaggcggctgtttacaatctcaagaaagaggtcctcagagggaaccaaccccccggcaccttgattctggcctgtatgcttccagaactctgagaaaatacattctgttttttaacccacccagggggaggaacctcggatggcgccagatcacccagaacacagattaccgcttaaaccccatgttaagaaaagcctgtaaagctgacattcctaaattctgtcacggtatcctgactaaggccaaggatgattcagaattagaaggacaagtcatctcttgcctgaagctgagatatgctgaccagcgcctgtcttcagactgtgaagaccagatccgaatcattatccaggagtccgccctggactaccgcctggatcctcagctccagctgcactgctcagacgagaccaatgcgaatcatccacgccgggcgcagatgcggacgattgagcgccgccgcaacatgcatcaggccagaatcgttagtgacaatggctttacaggctgcaatcaggataaccgcttgatcaagctgtgtttcccccgccaggttccgacaccatgcctgctgctcggtattcaaagcggcaagaatctcattgcccgcttcatgatctttcgccgagccaaacagaaccacatcagtagtatctaa

SEQ ID NO: 28524 - DNA, 2310 bp, Homo sapiens
  SIMILAR (1261)..(1848): 991254mologous to Escherichia coli tehB,accession number M74072,Smith-Waterman Score=1027.
atggtgccacaccagcagcatcaccacatcctgatcatccaacacacacaaagcacacgcagcaacacagcaaacagcacaagcacacaagcaagagcacagtgcaagtgcaaggcacaggcacaggcacaggcacaggcacacagcagcagcagcagcagcacacagcacacaggcacagtgcacagtgcacaggcacaggcacaggcacaggcacaggcacaggcacaggcacagcatgtgttccatgttgttgcaacatgtgttcatccagcgtccaccaatatcccacgaccaaccatcacgaagcctggcaaagccatcacaagtggtcaacagcccttgggggtagccgtcacatgcagatgcagcctcaacctccacaatatcaatttgccgttagcagcatccacatgcccagcattatccaagatcggggcacaacctagtacagtgaccagcatgcgaattcaagtgcaatcagggcccaacagccgccggaggcagcagggcaggctttcaaaatccaaaagggaccgggaacaatcactgcggttaatcacaaccaggcacatcaaagcggcgcaatctaacgggccaagggcaaacaggcacaccattgttcggcaggccgacaacaaagcgcccaagcacaaacaaggggcccaggggcaaaccgggttaacaacaagggggccagcaggcatcttccgcccccgtaatacggcacagcagctgcgccagcgcccgatcgcgatgtccgcgtccggcgtcgtccagatcatactcgagggtcactggcgaacgcatagcctgcgcaacgggctttcccaccggcggacttccgcctgtaaagctcgcccaaggttgacaagcaaagctgagggattttgtggtggtaaccaggcctgccttacaagagcccctgaaggcagtgcagctgcatgctttaggtcgactctagaggacccccccacggtactgcggacatcactcggcattcagctcgctcctgcgctggtggcttgtagtgcctggctgagcgtcaacggcggcgagggtgacacgctggcgaaaatgcttttcggttatggactgctgcaactgctgtttatgctacgtctgatgccatggtatctctcccagccatttaatgcttcattctggagtttctcgttcggcgtatctgcactggcaaccaccgggaaaatagttagtcagaaccgagcgcgccgttttaatgaaagcagaggacaaagaatgatcattcgtgacgaaaactattttactgataaatatgaattaacccgcacacactctgaagtactggaagcggtgaaagtggttaaaccgggtaaaacgctggatctgggctgtggcaatggtcgtaacagtctttacctggcagccaatggttatgatgttgacgcatgggataaaaatgccatgagtatcgccaacgtcgagcgcattaaatccattgaaaatctggataatttacacacccgagtcgttgatctgaataacctcacatttgatagacagtacgattttattctttcgactgtggtgctgatgttccttgaggctaaaaccatccccgggttgattgccaatatgcaacgttgcactaaacctggtggttacaacctgattgtggcggcgatggataccgctgattatccatgtaccgtcggcttcccgtttgccttcaaagagggagaattacgtcgatattacgaaggctgggagagggtgaaatacaatgaagacgtcggcgagctgcaccgcaccgacgccaacggtaatcgtattaaactgcgtttcgccacgatgctggcacgacggtccgagcctactgtttatagttttatggcgatgactgcgggcaacgagcacgtcagggattgcaaaaagagacggagaaaagtggtgcccgctggcacaacgatctcgaacatcaggcgacctggcttgaaagtaatcaatagcggcaccgcgggcagtgggcgactgaatatcaatatccttaaccagcagcagtttgccgttgtaattcagtaccataccttttttaatttcgttcgctcttggcatcgaaaaattcctgtagtcgaaaatgtcaaaaatatcgcgacaaagtactcgcgacgggcctttcgggcaagtggtattcgcacttttgctggtgcaaaaaaggtggtactgtgcgcgctcatcaatccggtggttaaccttaagagaacaacgtatggaatgccgtccgggttgcggggcgtgttgcaaccacagacaatacgcagcgcgtga

SEQ ID NO: 28525 - DNA, 977 bp, Homo sapiens
  SIMILAR (3)..(551): 1001254mologous to Escherichia coli Iron-dependent pyruvate formate-lyase-activating enzyme,accession number D90720,Smith- Waterman Score=960.
tgaaaagcgttgaggagatcatgacgaccgttctgcgcgataaaccgttttacgatcgcagcggcggcggtttaacgctttcgggtggtgagccctttatgcagccggaaatggcgatggcgctactgcaagccagccacgaggcaggcattcatactgcggtagaaacctgtctgcatgtgccgtggaaatatatcgccccttctctgccctatatcgatctgtttcttgccgatttaaaacacgttgccgacgcgccgtttaaacagtggaccgacggtaacgccgccagagtgctggataacctgaaaaaactcgccgcagcgggcaaaaaaatcattatccgcgtgccgctgattcagggctttaatgccgacgaaacctctgtaaaagccattaccgattttgccgccgacgagctgcacgttggcgaaattcattttctgccctaccacacgctgggcatcaacaaatatcacttacttaatctgccctatgacgccccggaaaaaccgcttgatgcgccagaactgctcgactttgcccagcaggttaaccgcgaccttacgaggataacaaccatgaccacactgaaactggacacgctcagcgaccgcattaaagcgcacaaaaatgcgctggtgcatattgtgaaaccgccagtctgtaccgagcgcgcgcagcactataccgagatgtatcaacaacatctcgataagccgatcccggtacgtcgcgcgctggcactggcgcatcacctggcgaatcgcaccatctggatcaaacacgatgagttgatcattggcaaccaggcaagcgaagttcgcgccgcgccgatcttcccggaatatactgtctcgtggatcgaaaaagagattgatgatctggcagatcgtcccgggtaccgaactcgacgtgtacccgcccacatcatggtggagtattactcggctaccggtagaaccggcgcgcgataa

SEQ ID NO: 28526 - DNA, 1104 bp, Homo sapiens; identical to SEQ ID NO: 17833
  SIMILAR (1)..(408): 1001254mologous to Escherichia coli 'YafH,accession number D38582,Smith-Waterman Score=732.

SEQ ID NO: 28527 - DNA, 608 bp, Homo sapiens
  SIMILAR (1)..(459): 1001254mologous to Escherichia coli Iron-dependent pyruvate formate-lyase-activating enzyme,accession number D90720,Smith- Waterman Score=815.
atgattttcaatattcagcgctactcgacccatgatggccccggtatccgcacggtcgtatttcttaaaggctgttcgctgggctgccgctggtgtcagaacccggaaagccgcgcccgcacgcaggatctgctgtatgacgcacgactgtgtctggaaggctgcgagctgtgcgctaaggccgcgccggaagtgattgagcgcgcgctgaatggtttgcttattcatcgggaaaagttaaccccggagcatctgacggcgttaaccgactgctgtccgacacaggcattaaccgtgtgtggtgaagtgaaaagcgttgaggagatcatgacgaccgttctgcgcgataaaccgttttacgatcgcagcggcggcggtttaacgctttcgggtggtgagccctttatgcagccggaaatggcgatggcgctactgcaagccagccacgaggcaggcatagggattaatccgtttcgcctcccggaacattcggcatttgccgtatcagggtttcccgcgggaaccccgccactgcagataatctccccgcgacggcgaaatttgcccgatacgcacgtcagcagtaaaacgcacgccatggtccattg

SEQ ID NO: 28528 - DNA, 4086 bp, Homo sapiens; identical to SEQ ID NO: 9218
  SIMILAR (1488)..(871): 971254mologous to Escherichia coli No definition line found,accession number U00039,Smith-Waterman Score=1054.

SEQ ID NO: 28529 - DNA, 1128 bp, Homo sapiens
  SIMILAR (652)..(1125): 981254mologous to Escherichia coli activator protein,accession number M85227,Smith-Waterman Score=826.
atgaacggaattaaagcgccgattggcaccggaccgtggattttgcaggaatcgaaactgaatcagtacgatgtcttcgtccgtaacgaaaactactggggcgaaaagccagcgattaaaaagatcacctttaacgtcatcccggacccgactacccgcgcggtggcgtttgaaactggcgatatcgacctgctgtacggaaacgaagggttattaccgctcgataccttcgcccgctttagccagaatccggcttaccacacccaactgtcacagccgatcgaaaccgtgatgctggcgctcaataccgccaaagcccccaccaacgagctggcagtacgtgaagctcttaattacgcggtaaacaaaaaatcgctgattgataacgcgttgtatgggacccaggagaagaaaaaggaaacaacaaagaaaaaagaagaaagagaagaagagaacagaaagagaacaaagaaaaagaaacagcaaaaagaaaagacaatccaacgtatacagattacacacttcgattctcggtaccccgaaatcatcctgcctaccacacgctgggcatcaacaaatatcacttacttaatctgccctatgacgccccggaaaaaccgcttgatgcgccagaactgctcgactttgcccagcatcatggaccgcatcctcaaagatcatcaaatcgtggtcgacattccccacggagaagcgtggctgcgcgatgatgaagagcgtccgatgattttgattgcgggcggcaccgggttctcttatgcccgctcgattttgctgacagcgttggcgcgtaacccaaaccgtgatatcaccatttactggggcgggcgtgaagagcagcatctgtatgatctctgcgagcttgaggcgctttcgttgaagcatcctggtctgcaagtggtgccggtggttgaacaaccggaagcgggctggcgtgggcgtactggcaccgtgttaacggcggtattgcaggatcacggtacgctggcagagcatgatatctatattgccggacgttttgagatggcgaaaattgcccgcgatctgttttgcagtgagcgtaatgcgcgggaagatcgcctgtttggcgatgcgtttgcatttatctga

SEQ ID NO: 28530 - DNA, 1505 bp, Homo sapiens
  SIMILAR (568)..(1182): 891254mologous to Escherichia coli Iron-dependent pyruvate formate-lyase-activating enzyme,accession number D90720,Smith- Waterman Score=962.
atgggacataacggccagttcggcggttttttgaaagaagttcgcgaaaatggcggcatgcagagcgaattgatggatcaaacaaatctgccggttattttgctgggctttgatggttcgccggtttatgacgataccgctgtgcttaaccgctggctggacgttaccgaaaaagataaaaacagccgtagtgccacgttctacaacacgcttccactgcatgacggcaaccattatccgggggtcagcaaaacagcggattacaaagcgcgggcgcagaaattctttgatgaactgacgccttctatactgaagggatcctctagagtgactcaacggaaaccgcgaaataccggcgcggaaatcatcgacttacgcataggcgcaaagttaaatggcacgaggataatggccagaggcaccagtacccacgccgaccacagaccagcaacgccgagggcggctgtccaggcgagcaaaatcagactgctgataaataagctcacgcggtcaaaaagtcctggtcatagcacctgcccgtacttctcgcttttggcggtatccgcgcgcgcggtcctgttagcagacagctttaaagccggtggcaaagtgctttcctgcggcaacggcgataaaccgttttacgatcgcagcggcgccggtttaacgctttcggttggtgagccctttatgcagccggaaatggcgatggcgctactgcaagccagccacgaggcaggcattcatactgcggtagaaacctgtctgcatgtgccgtggaaatatatcgccccttctctgccctatatcgatctgtttcttgccgatttaaaacacgttgccgacgcgccgtttaaacagtggaccgacggtaacgccgccagagtgctggataacctgaaaaaactcgccgcagcgggcaaaaaaatcattatccgcgtgccgctgattcagggctttaatgccgacgaaacctctgtaaaagccattaccgattttgccgccgacgagctgcacgttggcgaaattcattttctgccctaccacacgctgggcatcaacaaatatcacttacttaatctgccctatgacgccccggaaaaaccgcttgatgcgccagaactgctcgactttgcccagcagtatgcctgccagaaagggttaaccgcgaccttacgaggataacaaccatgaccacactgaaactggacacgctcagcgaccgcattaaagcgcacaaaaatgcgctggtgcatattgtgaaaccgccagtctgtaccgagcgcgcgcagcactataccgagatgtatcaacaacatctcgataagccgatcccggtacgtcgcgcgctggcactggcgcatcacctggcgaatcgcaccatctggatcaaacacgatgagttgatcattggcaaccaggcaagcgaagttcgcgccgcgccgatcttcccggaatatactgtctcgtggatcgaaaaagagattgatgatctggcagatcgt

SEQ ID NO: 28531 - DNA, 2853 bp, Homo sapiens; identical to SEQ ID NO: 8712
  SIMILAR (2430)..(1795): 991254mologous to Escherichia coli trimethylamine-N-oxide reductase,accession number X73888,Smith-Waterman Score=1155.

SEQ ID NO: 28532 - DNA, 1073 bp, Homo sapiens
  SIMILAR (51)..(680): 981254mologous to Escherichia coli K12 putative dehydrogenase subunit,accession number AE000137,Smith-Waterman Score=1072.
gggggggaaacatcgggcataaatgggcatgaagtaatggagtattagttgtgaatgtcaatttctttgtcacctgtattggtgacgccctgaaatcaagaatggcacgagactccgtgctgctactggaaaaactcgactgtcgcgtaaatttcccggagaaacagggatgctgcggtcagcctgcgatcaatagcggttatatcaaagaagcgattccagggatgaaaaatctgatcgccgcactggaggataacgacgatcccattatttcaccggctggctcttgcacctatgccgtaaaaagttacccgacgtatctggcggatgaacctgaatgggcatcacgtgccgcaaaggttgccgcgcgtatgcaggatctcacctcttttattgttaataaattaggggtagtcgatgtaggtgccagtttgcaagggagagcggtgtatcacccatcttgtagcctggcccgtaagctgggagtgaaggacgagccacttacgctgctgaaaaatgtgcgtggactggagctgttgacctttgctgaacaggatacctgctgcggatttggcggcacgttctcggtcaaaatggccgaaatatccggcgagatggtgaaagaaaaggttgcgcacctgatggaagtccgccctgagtatttaattggtgctgacttaatgaaatgtgagaatgatgaactgatcagccccgatagcttcttgccggtcgcgcacgaatttggtttatcgtcgagtatcgacatgtgggtcattgagcatacgctgcaatttatggctgaaaacagagcgaagatgcccgctcaccgttttgctattaatctgtctccaacctcggtatgtcaggctcgttttcctgttgaagtcagtcagttgctggctaaatatcagattgaagcgtggcaacttatttttgaagtcaccgaaagtaatgctctgaccaatgttaagcaggcgcaaatcaccttgcagcatcttcaggaattaggctgccagattgcgattgatgatttcggcaaccgtacgccagctatgcgcggcttaaaaatgtga

SEQ ID NO: 28533 - DNA, 516 bp, Homo sapiens
  SIMILAR (85)..(50): 911254mologous to Homo sapiens Na+/H+ exchanger isoform NHE- 3,accession number S83545,Smith-Waterman Score=56.
  misc_feature (1)...(516): n = a,t,c or g
agggccgnnnnccttttgatttcgcaccacantccgtgtggtggaattcgcggatgaaggccagggacccgcggcgctctccctgtggtcaggaagcagcccggagaccctaaaactccattggcctcatgtccagaactgaatcaggttcagctcgtggaagacattcaggatccggtctcgagacttctgggccgaccgtctcatgaggaccctgctgaggaacttcctgtcgaagtgggaccacctgtagggacagaccttgggtgtgagcctcaggcgcgtttaaaatgagggaagcagcccctgccacacgcccaggccgtccgccgttctcccgcctgtcctgttggatggaggccgttagacgcatatgaaactgcatgccgcctcctccagagggtggctcaggacacgcctaacggaattagagtattcgctggttatccggatcagaagggacggtggcctggccggacttagaggaaactctggggcacaaggaggtgatgcctg

SEQ ID NO: 28534 - DNA, 780 bp, Homo sapiens
  SIMILAR (126)..(221): 871254mologous to Escherichia coli K12 putative transport system permease protein,accession number AE000302,Smith-Waterman Score=151.
atgacgctacgcgatgcgctctctctgtttgttgcgcggggatgcgaggtgctgccggtggtgaacatgctgggccagccttgcggctcgctgtattttcaggatctgctggtggaggcgttggcccgctgtttgctgccttgttcccgcgattgccacgacccgtttatcagccagaaagttttgcagctctggtactggctcatttctggctggctggcaatttcgagtttgtttgcggtgctcattggcactggtgccggaattgctgtcactcgcccgtggggcgcggaatatcgcccactggtggaaactattgccgccgttggacagacttttccgcccgtcgcagtgctggcgatcgccgttccggtgatcggctttggtctgcaaccagcgattatcgccttgatcctttacggtgtgctgcccgtcctgcaggcgacacttgccgggctgggagcgattgatgccagcgtgacagaagttgcgaaaggtatgggaatgagtcgtggtcagcgagtgcgtaaggtcgagctaccgctggcggctccggtgattctggcgggcgtgcgaacttcggtgattatcaacattggtacggcgacgatcgcctcaacggtaggggccagcacgctgggtacgcccatcatcatcgggcttagcggatttaataccgcgtatgtgatccagggggcgttactggtggcactggcggcgatcatcgcagaccgcctgtttgaaaggctggtgcaggcgcttagccagcacgcaaaataa

SEQ ID NO: 28535 - DNA, 1014 bp, Homo sapiens
  SIMILAR (586)..(1011): 971254mologous to Escherichia coli K12 putative transport system permease protein,accession number AE000302,Smith-Waterman Score=653.
atgaagccatttgagtcggaccgcaccaccgatcatgaatttccgccacctgctggagcagcatcaaatggcccgccaattgttcaagaccatcaatcgctaggctggccgaagcgaggcgctcatgatgacgtcaaggcagccttggatgtccaaagaagtggccctgacctcactagcactgggtcactcaaccgacggcccaaacgagacactgacccctcaacgtcacgtctaggagtacattgctcgctcgtcatgagacgaaggcagcaatctgtgtcctctagccgaatgctcgtgctaaccaagcgcgaggagctggccgaggtggatgtggactggctgatcgccgagcgccccggcaaggtaagaaccttgaaacagcatccacgcaagaacaaaacggccatcaacatcgaatacatgaaagccagcatccgggccagggtggagcacccatttcgcatcatcaagcgacagttcggcttcgtgaaagccagatacaaggggttgctgaaaaacgataaccaactggcgatgttattcacgctggccaacctgtttcgggcggaccaaatgatactgctggcgatcgccgttccggtgatcggcttcggtctgcaaccagcgattatcgccttgatcctttacggtgttgctgccgtcctgcaggcgacacttgccgggctgggagcgattgatgccagcgtgacagaagttgcgaaaggtatgggaatgagtcgtggtcagcgagtgcgtaaggtcgagctaccgctggcggctccggtgattctggcgggcgtgcgaacttcggtgattatcaacattggtacggcgacgatcgcctcaacggtaggggccagcacgctgggtacgcccatcatcatcgggcttagcggatttaataccgcgtatgtgatccagggggcgttactggtggcactggcggcgatcatcgcagaccgcctgtttgaaaggctggtgcaggcgcttagccagcacgcaaaataa

SEQ ID NO: 28536 - DNA, 1278 bp, Homo sapiens
  SIMILAR (1188)..(826): 871254mologous to Escherichia coli similar to rhamnose operon regulatory protein,accession number L10328,Smith-Waterman Score= 571.
ttaacccgcaaaaaggtaacgaataccatggagatacgcgtatttcgccaggaagatttcgaagaggtcatcaccctttgggagcgttgcgacttgctgcgtccgtggaacgatccggaaatggacatcgagcgtaagatgaaccatgacgtcagtttgtttttggtcgctgaggtaaacggtgacgtggtcggaacggtgatgggcggttatgacgggcatcgcgggtctgcttattatcttggcgtgcatccagagtttcgtgggcgtgggattgccaatgcgttgcttaatcggctggagaaaaagctgattgctcgtggctgcccgaaaatgcaggcaatccgctgacgatgctgactcgtccggcgaatgattttgtccgccagttttttggacgtagtgaactgggtgtgcgcctgctttcgttacgtagtgtggcggattacgtgcgtcgcgaagaacgagcagatggtgaggcactggcagaagagatgacgctacgcgatgcgctctctctgtttgttgcgcggggatgcgaggtgctgccggtggtgaacatgcagggccagccttgcggcacgctgcattttcaggatctgctggtggaggcgtaagcgtatgaagatgttgcgcgatccgctgttctggctcattgctctgtttgtggcgctgattttctggctgccttacagccagccgctgtttgctgccttgattcttggctgagaccccctgtttcttgtccctgaaggctggtgcttgcatcttgacttcctggtgcttgtagatttcctccacttccatggtccccagcccgcaaatttgtccatacacgtccccgcccaccggaaggtgtgggcagatgaggaaatcaacgggaatatccatcatactggtgggggtaaattccatccagtactgttcccacactaaaccttcacagtgataagagtgaatatccattggctttaagaatataatacagttgccatgcagtgttatttgttcgccattctttaaaagaattttcccacatccttgtacggtatacaccgcaacccatgagttggcgataagcggtttcttcttgtcccgcggccagatcacccggtaatgctcgtcggcgtaggtatgccagagcgagatcagagaaattccgctggagatcacatttgcgttaatcaaagaaaacaatccgttcaaggatcgacgcccgaatttaagaatctgatggcggaccgagcttttactttcccatattttgggtccggacat

SEQ ID NO: 28537 - DNA, 2584 bp, Homo sapiens
  SIMILAR (2574)..(73): 1001254mologous to Homo sapiens plasma membrane Na+/H+ exchanger isoform 3,accession number U28043,Smith-Waterman Score= 4248.
gcggcggcggcggtgggcggaccgtggcgcggggacgagcggccggttagcggcgtgtcggagccggtgtcacatgtgtgtggactcggggagggcggcggggggccgctcctcggggccgtctgcctgcaggaaggagtccacggacttgctgctgaggcggaagggcatcaggcggcggaaggtgccgggagagtagggaatctgcgtgcgggccctctgcgaggggaccaccgtctccccgggagacagccagggcggcagcctggccaggaggctgcggtccagggcctcgtccggagaaaacacagggttgtcaattcctgcaggggagtcggacgctgtgtccttggtgacactagccaggaactcgatccccccactcatctcctcatcatagttggggggctcctcggtgtctgaaagttccaagtctttctccttgatggtgaaattctgcgcagggctctccatgggcagcttcccattggggatgctgctgtttctccgcttctgggcacgctcccgcttgtacagcttggctgccttcttgttctggttgagccccagcttggtcgacttgaaggactccaggcgcttccgcatggtcctgtggaagatttcccggtcctgtttctcgtcctccgtgggcgtgagctcgtgtcggctgtacagatgcttgtactcctgccgcggcttgtacaggtactgctgtagcgtgtggtgcgtgaccatgtcctccgcgtcccggatgctccgccgtcgctgctccagagactgcatgtccaggcagacagcgctgacattttctctcaggaggtaggagacagaggcctccacggtggacgatcgtggcgtgaagtccacgttgaccacgttgtcggtgctgggggagcggatgaaggccagggacccgcggcgctctccctcagccacgtagctgatggcatccttcaggttcagctcgtggaagacattcaggatccggtctcgagacttctgggccgaccgtctcatgaggaccctgctgaggaacttcctgtcgaagtgggaccacttgtctctgagataattgtgcccgatctgtccggatatgtcctcgatggccgagaggatgtggtcgaaagcgcggccgtgcagcttctcgttgagccgaggttcccggtgctcgctcctcttcaccttcagccactgcaccagaggcttgatggtcaggccctggaagatgacggtgaagaacactacgatgatggtggtgctgacgaacaggttcttctccttgaccttgtctccatccagaagcaccaccagggcaaaggccacggccccgcgcaggcccccgtaggacaggaccacctggtcaatgggctccagctgcaccatgcggtagcggttcagaagccaggtctgcaggaccacaccgatggcccggtacacggagatgaagaccagcgtcaggagcacgaaggccgtgttccaggtccagatgaacgggttcacggccgagatacccaggaacatgaagatgatggtctcggcgctgctggccagcatcttcatggtgtagcgcacggtggtggccgactgctccgagatgttggccttcacatacttctgacagcagatgccacagaaggtgatggcgaggatggccgacagcgacagcatctcggacgtcaggtaggacaggtaggagatgatgaacacgaagccgggctcgatgatacgcacatgcttggtgaagcgcgtcaccagcgacagcaggaaggcgaagaccacccccaccagcgtgccccccaggctcaccacgaagaaggacactatgcccttcacgcagtccacgccagtcacgttgtcacctcccagcgccacgaaagattcaaacacattgtacagaaccacggtgactgcgtcgttcagcagcgactccccgaagacgatgatgaacaggacctcgttgacatggacctcctcaaacacggccaggacggccaccgggtccacagccgccatgaggctgccaaacaggaggaagtccagcagcccaatctgcaggtcgcccatgagcccactgaggaagacgccgtagagggacagcccggtggtggccgcgttccacacggtacccacgacggcgtacaacaggatggtccccaggttgccgaagaagaggcggttgggcatgaagtagccggcgtccagcacgatggggggcagcaggtagaagaagaagacggtgggcgtcagtgtgaaggacgcgatgtggtcggccgcccagacgatgccgcccagcaccaggcccagcacgatgagcagggcgctctcgggaaccacgctggtgaccttgtgggacaggtggaacccgatcttggccaagctggccacgaggatccagagcgcgatgacgtagggatcctgcacgtgggcccactcgaaggtgaccacctggaagcccccgctctcgccgtgcgcgccgccgggctccacctcgacgcccccggcccgcgccagcccgcccagcgccagcgccagcagcagcccccggtcggggccccgggccccgagtccccacattgccgcctgc

SEQ ID NO: 28538 - DNA, 793 bp, Homo sapiens
  SIMILAR (231)..(115): 901254mologous to Oryctolagus cuniculus Na+/H+ exchanger homolog,accession number S82498,Smith-Waterman Score=171.
attggcctcatgtccagaactgaatcagccaggagccaccacagccctgtctgtgactctcagctcccgaggctgggctcttccccagggaagctgcatgaccatggccacatacaggaggtaggagacagaggcctccacggtggacgatcgtggcgtgaagtccacgttgaccacgttgtcggtgctgggggagcggatgaaggccagggacccgcggcgctctccctgtggtcaggaagcagcccggagaccctaaaactccattggcctcatgtccagaactgaatcagccagtgcccgagcctgctgcagccccgacccggcagagcaagcggctctgctacctcagccacgtagctgatggcatccttcaggttcaagctcgtggaagacattcaggatccggtctccgaagacttctgggccgaccgtctcatgaaggaccctggctgaagggaacttcctgtcgaagtgggaccacctgtagggacagaccttgggtgtgagcctcagtgaccctgtaggcgcgtttaaaatgagggaagcagcccctgccacacgcccaggccgtccgccgatctcccgactgtcctgtttgaaggaggccgttaaacgcatataaaactgcatgccgcctcctccagagggtggctcaggacacgcctaacggaattagagtattcgctggttatccggatcagaagggacggtggcctggccggacttacaggaaactctggggcacaaggaggtgatgcctgtcacttggacatgggtgcagcccgcacag

SEQ ID NO: 28539 - DNA, 2281 bp, Homo sapiens
  SIMILAR (728)..(1579): 991254mologous to Escherichia coli K12 putative ATP-binding component of a transport system,accession number AE000302,Smith- Waterman Score=1428.
gtggtcccacttcgacaggaagttcctcagcagggtcctcatgagacggtcggcccagaagtctcgagaccggatcctgaatgtcttccacgagctgaacctgaaggatgccatcagctacgtggctgagcaaactaatgcaggaacagaaaaccaaacattgcatgttctcacttatcagtgggagctgacaatgcaaaccatggaccccggaggggaccacacaattgtggcctgtaatggagtgtggtggacagcgcaggcatccgaaactcccagaagggccacacccactagagcttccaacccagtggccctacttctgcctgagctctgccggaagttagtagcagaccagactgtttcccgccttcatgaacctccctctctggcgccagaaacacccagtaagcccccacacaacatagctcagcaaagtaccaggacaggtgggcacaaggatgtcaatggcgtaatagtacacacacataaaggggtggagttaccgctggcgttaccggtatttctgcgcagcctgcgggtggtgatggtgcaaactgtaggtatggcggtgattgcggcgttaatcggcgcaggcggttttggtgcgctggttttccaggggctgctaagcagcgccattgatttagtgttgctgggggtgatcccggtaattgttctggcggtgcttaccgacgcgctgttcgatttgcttatcgcactgctgaaggaagggagtttttcggtgctgattggcacatctggctccggcaaatccaccaccctgaaaatgattaaccgcctggtggagcatgacagcggagagatccgctttgccggagaagaaattcgctcgctgccagtactggagttgcgccgccggatgggctatgccattcaatctattggcctgttcccccactggagcgtggcgcaaaacatcgctaccgtgccgcaattacaaaaatggtcgcgggcgcggattgacgatcgtatcgacgaattaatggcgctactggggctggagtcaaatttgcgtgagcgttatccgcatcagctttccggtggtcagcagcaacgtgtgggagtggcgcgtgcactggctgccgatccgcaagtcttactaatggatgaaccttttggcgcactggacccggtaacgcgcggcgcgttgcaacaagagatgacgcgcattcaccgtttgctggggcgtaccattgtgctggtcactcatgatattgatgaggcgctacggctggcagaacatctggtattgatggatcacggtgaagtagtgcagcagggcaatccgctgacgatgctgactcgtccggcgaatgattttgtccgccagttttttggacgtagtgaactgggtgtgcgcctgctttcgttacgtagtgtggcggattacgtgcgtcgcgaagaacgagcagatggtgaggcactggcagaagagatgacgctacgcgatgcgctctctctgtttgttgcgcggggatgcgaggtgctgccggtggtgaacatgcagggccagccttgcggcacgctgcattttcaggatctgctggtggaggcgtaagcgtatgaagatgttgcgcgatccgctggactggcatcattgctgtggttgcggcgctgattttctgggtgccttacagccagccgctgtttgctgccttgttcccacaactgccacgacccgtttatcagcaagaaagttttgcagctctggcactggctcatttctggctggtgggaatttcgagtttgtttgcggtgatcattggcactggtgccggaattgctgtcactcgcccgtggggcgcggaatttccgccccttggtgaaacttattgccggcggtggacagacttttccgcccgtcgcagtgctggcgatcgccgttccggtgatcggctttggtctgcaaccagcgattatcgccttgatcctttacggtgtgctgcccgtcctgcaggcgacacttgccgggctgggagcgattgatgccagcgtgacagaagttgcgaaaggtatgggaatgagtcgtggtcagcgagtgcgtaaggtcgagctaccgctggcggctccggtgattctggcgggcgtgcgaacttcggtgattatcaacattggtacggcgacgatcgcctcaacggtaggggccagcacgctgggtacgcccatcatcatcgggcttagcggatttaataccgcgtatgtgatccagggggcgttactggtggcactggcgcgatcatccagaccgcctgtttaa

SEQ ID NO: 28540 - DNA, 352 bp, Homo sapiens
  SIMILAR (352)..(116): 691254mologous to Escherichia coli K12 putative peptidase,accession number AE000379,Smith-Waterman Score=260.
cgttgacgcctggctgcaggattatatcagcggtatgaccgaactctatgcgtgggatgaataccgacgtctgatggccgtagacaattaccaagattttgtaaagacgaacactaattttttccctttggcgaaacttattttggaaatcaggggataacagcatctgcaaaaccggattcgggtaactgtgacccactgtggagaggccgtgaaactccgccatttgttggcgcagcatgattgggtaacgccaaatcaccacattcaaaaaactgccgatgatcaatcctccgacggttgccaggacgggcatcgccgtggggtattgctgaaaaacatcaaaaagcat

SEQ ID NO: 28541 - DNA, 534 bp, Homo sapiens
  SIMILAR (145)..(531): 701254mologous to Escherichia coli K12 putative transcriptional regulator,accession number AE000413,Smith-Waterman Score=473.
atgatccaacgcgcgaattgtcgaacagtacaacaggcattcagcgcccactggaaacagcaaactggtgataacgtggtgatcgtcagtcacacggtggctcaggtgaaggtggtcagctttcctctggggccaagccctggactggtttccccatcccttgtcagttccctgccctgtccacaagcccttaagctctcttctcagttataccacaggagccgctgtttattgatagttcatggatcccgctgtcgcgttgatcctgactttgatgagatttacgtcgaaggaagctccacctatcagttatttcaggagcgttttgacacgcgagtggtcagcgacaaaaagaccatcgatatctttgccgccacccgcccgcaggcaaaatggctgaaatgcgaactgggcgaaccgttgtttcgcatcagcaaaatcgcctttgatcagaatgacaaaccggtgcacgtctccgaactcttctgccgcgccaatcgcatcaccttaactattgataataaaagacattaa

SEQ ID NO: 28542 - DNA, 1440 bp, Homo sapiens
  SIMILAR (31)..(612): 961254mologous to Escherichia coli K12 putative membrane / transport protein,accession number AE000448,Smith-Waterman Score= 923.
atgtctggcaggtgtaatcgatgccggcatgatgtgcactacaatggcatcgtttctgcgccgccgagcgtaatgacagttgtgggtcatgtagatttagccgggtcgtttaacctcgggctggcaggggtgattttctctttcatgttggtcaacttgtttgactcctccggtacgctgattggcgtgaccgataaagcaggtctggcggatgagaaggggaaattcccgcgcatgaagcaggcgctgtatgtcgacagtatctcttccgtgaccggttcgtttatcggtacttcttccgttacggcttatattgagtcctcttccggcgtatcggttggcggtcgtaccggtctgacggcagtggttgttggtctgctgttcctgctggttatctttctgtcgccgctggcggggatggtgccaggctacgctgcagctggtgcgctgatttacgttggcgtgctgatgacttccagtctggcacgcgtgaactggcaggatcttactgaatctggttcggcgtttattaccgccgtgatgatgccggtcgccttctcgattaccgaaggtatcgcgctgggctttatctactactgcgtgatgagtatactcatccggttccggggatctctagagtcgtggtatcccggtcggcggctattggcattgggtttgatcacaatattcggtttggtaaatggcatgacgttattgccggaagaaaaggtgctcgacgtcccgaccgatccaacttatggcgtgctgtcgcgtcaggatctcgaccagctgcaggcaggcgcgcgcgttgacgtggtcgacgacaaacgcaacccaatggacttcgttctgtggaagatgtcgaaagagggcgaaccgagctggccgtctccccggacgctcgataacgatacgagatacggacgctttagccagttccttagtcaggtactgacctgtacgtccgcaagacagattctacaacgtgtcgacactcttcctctttatttacatgcttatgcctttcatttaaatatgcggctggaaagagtgttgcctgctgatttacttgatatcgcaagtgaaaataatctacgtggcgtcaaaatccatgttctcgatggcgagcgtttttctcttggtaatatggacgataaagaactctctgcctttggggataaagcccgccgtctgaaccttgatattcatattgaaaccagcgcctcagataaggcatctattgacgaagccgtcgccatcgcgttgaaaactggggcatcgtccgtacgtttttatccacgttatgaaggtaatttgcgcgacgtattatcgattatcgctaacgacattgcctatgtacgggaaacgtatcaggacagcggcctgacttttacgatcgagcagcatgaagatttaaaaagtcatgagctggtgtcgctg

SEQ ID NO: 28543 - DNA, 648 bp, Homo sapiens
  SIMILAR (648)..(478): 1001254mologous to Escherichia coli dipeptidyl carboxypeptidase,accession number X57947,Smith-Waterman Score=292.
cctggagcaggccatccgctcactgatgcgggaaatggagctggaagggcgcggtattgtcagccatctcgaatggcgaatcgatgaatcagcgttaagcgaaaagtcgtagagcatcggtgcttcgtcgatttcaccttcaccaatgacgatggtgccgtcaatgttgaccgccgcgccgtccgcggtgtttttatcgccgcgtcctaaccatttgtagccagccagcgccgctgattcggtgacgcgggaaaattcgatggcaagttctcgtctcatagcaaactgctcagtggtttcgatgcctggacggaactcgcgctcaatcaccgctttctcttgcagctcgtcgaggttctgccagaagccaaccgccagcttcgccagtcgggcgcaggcgatggtggtcagcaggccgttttctgatttcaccgctttctcgccagtgttcatcagcataaagcagccagtgcttctccgccgtacctgttccgcataaaatgcccagtcccacggctgcgcgctaaacccgccctgctgcttatcgataaccgcctgtatggaggctaattcatcgctcgcacgttgacgcgccgctggaacaatttcccgcataaagttaagtgctgcttcaggtgtttttgccat

SEQ ID NO: 28544 - DNA, 3537 bp, Homo sapiens
  SIMILAR (229)..(861): 991254mologous to Escherichia coli RtoA protein,accession number D90778,Smith-Waterman Score=1043.
atgtctcattgcatcggcggccccattatgagctccggcaacaatagcatccatatcataaccgaactgacggtacggctggtgcaggtgatgcgggttctcctcattaagctggttgccccattcatcatactccccgcgccaagccgtatagccgtcttcgctgatgagcgccagcggcaggccccggtggtcgcagtggtaaaaatgaacttttcgcgccgttgctccaacacgctggcggcaaaagatctaaaagtggtcgggcagaaagcgacgggcataaacgtttctggcgatgcgaatacagtgaatatcactggtaacgttctggttgataaggataaaaccgcagacaatgcggcggaatatttcttcgatccatccgtgggtatcaacgtttacggcagtgataataacgtgacgctggatggaaagttaactgttgtatcagacagtgaggttacttctcgtcagagtaatttatttgatggcagcgcagagaaaacgtcaggtctggttgtgattggcgatggcaataccgttaatatgaatggtggacttgaactgattggagagaaaaacgcgcttgcagatgggtcgcaggttacttccttgcgcacaggatatagttataccagcgttattgtcgttagtggtgagtcgtcggtatatctgaatggagatacgacaatcagcggagaattccctctggggtttgccggggttattcgggtacaggataaagctttgctggaaattggcagtggcgctacgctaacaatgcaggatattgacagttttgaacatcatgggacaagaaccctggatttgcccctatatttccagacatctgttatgtggcggtttacgaagcggtcccaaggatattgtctggcgatagcgggtttttaccgtgcaacgcatagtgccggtgaatggttcgcgatcgacccagtgcaactgctgggcaatcaacccgacagacatcagccgcgggtgttcatggccctgagcgacaaccagaatgttgttttcgacgtctttgtccaccacataccacggttcttcggtaccttctttggtgccaccgatacccagacctttacgctgaccgagagtgtgatacatcagcccctggtgctcaccaatttcatcgccatcgacggtaatgattttgcccggttgcgccgggagataacggcccaggaactcgcggaatttacgttcgccaatgaagcaaatgccggtagagtcttttttcttcgcggtgaccagaccaagatcttcagcaatcttacgcacctgcggtttttccagttcgccgaccgggaacaggctttgcgcaatctgctcatggctgagcgtataaaggaagtagctctggtctttattgctgtccagaccacgcagcaggcggctcttgccatcgacatcggcccgacgtacgtaatgaccgaatatccggattcggcgtgcgaccggctttatattcgggaaggaacagttcgtccagcagcggggactcaggatgaaaaagagaagatgcctcacctggatgaggacccagctcctccattctggcgtttggggcatttgatggcgtgccgctggagctgtaggacagagagagagacacagtcagatttcgggcagttccctaacgtccaattccctgaatccccacaaattcagctccacgttcccgtggccctttcgattcgaagtggccacaggaacctcggagctcatgcagatgagagttggaaaactctccttgggtgtgaggagctggagaaagatgttgagatcccggatcgagcggggcacacaatagtggtaccgtcctgctggtttgcggtggaacgccgcttcggccacgatcttccgtcgtctccagtggagtggctgacggataatggttcatgctaccgggctaatgaaacacgccagttcgcccggatgttgggacttgaaccgaagaacacggcggtgcggagtccggagagtaacggaatagcagagagcttcgtgaaaacgataaagcgtgactacatcagtatcatgcccaaaccagacgggttaacggcagcaaagaaccttgcagaggcgttcgagcattataacgaatggcatccgcatagggcaaatccagttatcatcattggttgtgcgtcagcttatgccgttgaattcaacaaagatttaatcgaagccgaagatcgtgaaaacgttaacctttcccaatttgaaactgatggccaattacccgtcggcaaatattcactaagcactctgattaataataagaggacgccaatccaccttgacctccaatggatgcttcatcccatagctttgcaggtcagcaatgacaagtttggcggcaagaattactgtgctgaatccaacggtaacgcagcggacacgctgatgctgtgtgcctcctgggtcgcccagacggatctttcggagttctttaagaaatggaatccgggcgcgaatgcttaccagctgccgggggcgagcgagatgagcttcgagggcggtgtgagccagtcggcttacaacacgctcgcgtcactcgatctgccgaaaccggaacagggaccggaaaccattaatcagcaataccccacggcgatgcccgtcctggcaaccgtcggaggattgatcatcggcagttttttgaatgtggtgatttggcgttacccaatcatgctgcgccaacaaatggcggagtttcacggtgaaatgtcgagtgcgcagtcaaaaataagccttgcgctaccgcgttcgcactggccacattgtcagcagagcatccggatacgtgaacatattccggctgggcatgagcgcaacggcggcaacctgacgctacgcctggatgacgccgatatcgcaccatatcacgacaatttccaccaacaaccgcgctatatcccgctcagccagcccatgcctttactggcaaatacaccgtttattgtcaccggctcgggcaaattcttccgtaacgtccagcttgatcctgcggctaacttaggcatcgtaaaagtcgacagcgacggcgcgggctaccacattctttgggggttaaccaacgaagccgtccccacttccgaacttccggctcacttcctttcccactgcgagcgcattaaagccaccaacggcaaagatcgggtgatcatgcactgccacgccaccaacctgatcgccctcacctatgtacttgaaaacgacaccgcggtcttcactcgccaactgtgggaaggcagcaccgagtgtctggtgagcatcccagaactggaaaaacagttcgaaggcaagatgtatggtcatctgaaaggtgaagtggctgatgccgtttccggtatgctgactgaattgcaggaacgctatcaccgtttccgcaacgatgaagccttcctgcaacaggtgatgaaagatggcgcggaaaaagccagcgcgcacgcttcccgtacgctaaaagcggtgtacgaagcgattggttttgtggcgaagccgtaa

SEQ ID NO: 28545 - DNA, 2442 bp, Homo sapiens
  SIMILAR (742)..(1122): 991254mologous to Escherichia coli glycine acetyltransferase,accession number U00039,Smith-Waterman Score=651.
ctacttaggaatccacttgaagccatccgaaagcgtcagcagcagctgcgaggagccaaaatagataaacagcaccaccagaatttctggcaggccacgcagaatggttaccagcgctgaacctgcccacgcgacaggacgccattttgccgactcccataccgcaaagaacatcgccagcgccagcccgacaatcaatgcacaaacggcaaggccgacggtcatcccggcggcgcttgcccgtctctccctctcccgcagcagaagcagccaatgggtcacacttgagatgtctccttcaccctggggttctgagcaggtcccaggggccaaagtggggagggggaccgggaaggagaaacgggctacaatcttgcccatcgcacgaacaaagccgtagccctgcttcagcaaaagtgtcgtttgtttgcccgcgccaattgcgggatggcgggcgcggaactggctgattttctgccagtgcgcgacgctggcggcagatttaccgctaacatcctgccagttcatatccgaacgtgtaccttgcacagctgtggttttctcctccgaattcagagcatcaggtatcacgggaatccagctatgagtcgacctcgtaaaacgcctatgatcaaaagcgggtaatagtgctgcagcttccacaattgtgtcgcagtcagaaacattgtggacgatgaccagggcatttttgtcatgtgctattacaaacgccccgatctgtctgcgcagcaagcagatatcactgtggctgatggaagccacgtcattaatttttgtgccaacaactatctcgggctggcgaatcatcctgatctgattgcggcggcaaaggcgggaatggattctcacggtttcggcatggcttcggtgcgttttatttgcggcactcaggacagccataaagagcttgaacaaaaactggcggccttcctggggatggaagatgcgattctctactcttcctgctttgatgccaacggtggcctgtttgaaacgcttctgggtgcggaagacgccattatctccgacgcactgaaccacgcgtctattattgatggtgtgcgtctgtgcaaagctacacgctatcgctatgccaacaacggtgacgggcttagcggcccgacgtcgcggccgtgcagcctcggccgactccctgcgccccccggggttacgggtcggccgtgggaggatcatggcagacttcagcgccgtaggcggtttattgctgctggcaaccggattacgcatctgtggcattaaaatgttcggggtggtcaacatgcttccaggactccttctggcaatgcacaacttgattttccccatcgcagccggagatgtgtgcgtggctgcttgagctagcttctgatcaacctgcgcagtactcgagtcgccgacaaaactgacgattaacgtttgtttcacgccattttcaagggtgacttcaaccgtgttgtcttcctgcttactacttttcagatcaaaagtcgccagaccattaacatccgtttttgcggtgttttgattgttgaaggaagttgccgatccgcttaataccgcaaacgtgacggtatgatcattgaattggttgctggtacctccagcgtcaaacatggtggcatcggtcgccatgtcatcaataacttgtttaatattttcgaaagccattggcgtactttcgttattcaggtctttaccttcgccctgacgaacgactttgataaccggtttattagtcgctgcatcaatcagctcaccttcaaaatagaggcgagtatccatggtacggtggcctgtagccatttgcgtccccgcaaccactaatgcaacaggaaccacttcatagaattgcagcccttctttgctggtatctacaccggtaatggccccacggaaaatcagactacgcggcccagcggtggtaaccagtggtttacgctgcgctatcgcttctttcatttcggtgttggtatagttcaaaattttatccagaactttctgccctacctgggtcgacggtttcggtaccggataataagtgattgggttccagacgatgctgtcatatttgctttgatcaaaactcgggtctacccaacgtaaaacaggtttacgtgccagcatcgtggcgaaacgcagtttaatacgattaccgttggcgtcggtgcggtgcagctcgccgacgtcttcattgtatttcaccctctcccagccttcgtaatatagacgtaccttttgtgaccccgctgttgtcgtcctcatgtgcgctttatctcgtgttccacgtctcgaggtttttgccctaggtgagttttcgttttgttctgtctgtgggtgccgggcttctcgtgagcttttggcgttatccttggtccaatgttcgtgctcgtccggtggtccgtgcgagtgcttgcctaacat

SEQ ID NO: 28546 - DNA, 3363 bp, Homo sapiens
  SIMILAR (2067)..(1264): 971254mologous to Escherichia coli Bacteriophage n4 adsorption inner membrane protein NfrB,accession number D90699,Smith-Waterman Score=1361.
ctaaacgccatagtccatcaagcgttgatccagttttcccatatatttcggcgtaatgtcggcaatggcatgttgttcgccgccgcgcaccgcatgaacgtcatctttgctgaccggtaattgcttgatgtattcagaacggtccggactcagggccacttccggattgacgtgaacgtcgcgccattcggtgtacatatcagacaccgagttaaagccacggaaatcatcaaagccaacgttctgcggctgcgactctttgttttcccccatatgccattttccgatggcctgagtgacgtagccctgatcgtgcagcaactgcggcagcgtggttaacccttgcagcccgcccggttgcccgtacattggcggcatcagaatgccgtggtggatggagtattgtccggtgagaatggtggcgcgggttggggaagagcttggttgagaatacgccgaagttaaaatcagcccctggctggcaacggcgtcgatatctggtgtagggttacccaccgccacgccgccaccgttaaaaccgacgtccatccagcccacatcgtccagcaagaaaacaaccacattcggtttcttaccggtttttttctcaagttctgccagcttctgctgggtttctttatcctgcgccggatgctgcattactggcatcatattgtcggcaatagtggtcgccggtttaaccagatactggtttgggtgatcgtatccggcaaagcctttgcgtgcggtggcagttgacggggtatctgctgcgttggccccagcggcgcgggtaaaagctcgctgctgcgtgtactcaatctgcttgagatgccgcgctccggtacgctcaacattgcaagcaaccatttcgatttcaccaaaacaccctctgacaaagcgattcgcgatttgcgtcgtaacgttggcatggtgtttcagcaatacaacccgctgcatctttctggtgtcaagcagcagcgtgttgctattgcccgtgcgttgatgatgaacccgcaggtactgctgttcgatgaaccgaccgccgcactgaccccggaaattacggcacaaatcgtcagcatcattcgtgagctggcagaaacgaatattacccaggtgatcgtcacccacgaagttgaagtggcgcgtaaaaccgccagccgagtggtgtatatggaaaatggtcatatcgtagaacaaggcgacgcgagctgctttaccgagccgcaaaccgaagcatttaaaaactatctctctcacgccaaggcgtagaccttcgacgcgattacgcagtgctgtatcgagttgttcttcagtgatgacctgattttccagcagaatttgacctaacgggcgcaacgagcgggtatcgccagtcacgctggggaagtcatgcgttgttttatcccacgccacgcgacgtggatcgccgtgttgaagtacctgttttagcgcgcgccagttggccatgaagttaatcaggttgccccagaaaagacgcaggacggaaagcagcccctgcgtcaggccgtagtagccagtaacgaaaatcacccgctgcacgatgcggttaaccatcaaaccaaagtttagccacagcagggtcattaaccatgcgctgccgctgaaaatagaaaggaaatgccaggcatcgggccacaaactttcatacgccagcaacagcaaaagctggatcatcaccagcatcgcgaggaagctgacaaagttactgattgcccctttgcggtcgcgccagagaaagtagttcagcgtcaggctggaggtccatttatgggttttaaagccttggaaaacaatgccgatgatccagcgggatttttgtcgaaccgcagtcgaaaaggtatcggggaaatattcgcgcacgcagatcatgtttgatgtccgcgcgtgctgtaaaaatttacgctgctcgcgttctttggcttcgtccaccaccggaaaacggacaaaaatttccgtcatacctttttctttcaggcggaagccaatgtcgtaatcttcagtaatactctgcacggtgcaagcaatacggccttcacacagtggatcatcagcattaaagacacctcgctgtttattgtgatcggcgtggcggaactgacccgtcaggggcaagaaattattgccggtaacttccgcgcccttgagatctggagcgccgtggcggtgttctatctgattattaccctggtgctgagctttattctgcgtcgttttggcccaacccaggtgctgcacaatatcgatttgaacattgcccagggcgaagtcgtggtgattatcgggccgtccggttccggtaaatcgaccctgctgcgctgcatcaacaaactggaagaaatcacctccggcgatctgattgtcgatggcctgaaggttaacgatccgaaagttgacgagcgcctgattcgccaggaagcaggtatggtgttccagcagttttacctcttcccgcatctgacagcgctggaaaacgtcatgtttggcccgcaaattgctccaccgatgtggtggttttcgtgatcgattatcccgtgcgaaatattgcgcgatacatatatcgaccgccgtgtgacgtgctcgtgcatggatcagctcgataccggaacgaataggggcatagtagtcagctaccgccgccgtacgcgtaaagcgaggatcgatcacaatcagcttcgcgccgttgtgaattttggcttccatcgcccagcggaacccgaccgggtgagcttcagcggcgttaccgcccatcaccacgacgaggttggcgttcttgatgtcgacccagtggttggtcatcgcaccgcgaccaaatgttggagcaagacttgccagcgcgcgggagaatttttgcgttaaatagccggtttcgttactcgacgcggaagcacacagcatcccggtggagagccagcggttaacagtcacgccttcggcgttttgcgcaatgtagttagcatcgcggtcttctttcatcagtttggcgatgcgatcaaacgcctcttcccaactgatttgctgccatttatcagaacctggcgcacggtattccggaaacttcagacggctttcggagtggatgaaatccaccaggccagcgcctttcggacaaagtgcaccgcggttgaccgggtgatccggatcgccttcgatatggaagatagatgctttggcgttttttgctccgtcaccgaggctgtacatcaacagcccacagcctacggaacaataggtgcaggtattacgggtttcgcgggtgcgcagcagtttatactgccgggtttccgcgagtgctacgctgggtgcaaaacccagtgccgctgccgtggtgcctgccat

SEQ ID NO: 28547 - DNA, 4381 bp, Homo sapiens
  SIMILAR (2295)..(3188): 831254mologous to Escherichia coli transfer RNA-Cys synthetase,accession number M59381,Smith-Waterman Score=1286.
tgattgcggcggcaaaggcgggaatggattctcacggtttcggcatggcttcggtgcgttttatttgcggcactcaggacagccataaagagcttgaacaaaaactggcggccttcctggggatggaagatgcgattctctactcttcctgctttgatgctaacggtggcctcgtttgaaacgcttcttgggtgcggaagacgccattatctccgacgcactgaaccacgcgtctattattgatggtgtgcgtctgtgcaagagctaaacgctatcgctatgccagcaacgatatgcaggagctggaagcacgtctgaaagaagcgcgtgaagccggtgcgcgtcatgtgctgatcgccaccgatggtgtgttctcaatggacggcgtgattgccaacctgaagggcgtttgcgatctggcagataaatatgatgccctggtgatggtagacgactcccacgcggtcggttttgtcggtgaaaatggtcgtggttcccatgaatactgcgatgtgatgggccgggtcgatattatcaccggcctggcggttggcttctggcagaacctcgacgagctgcaagagaaagcggtgattgagcgcgagttccgtccaggcatcgaaaccactgagcagtttgctatgagacgagaacttgccatcgaattttcccgcgtcaccgaatcagcggcgctggctggctacaaatggttaggacgcggcgatgaaaacaccgcggacggcgcggcggtaaacgccatgcgtattatgctcaaccaggtcaacattgacggcaccatcgtcattggtgaaggtgaaatcgacgaagcaccgatgctctacattggtgaaaaagtcggtactggtcgcggcgacgcggtagatattgctgttgatccgattgaaggcacgcgcatgacggcgatgggccaggctaacgcgctgtcggtgctggcagtaggcgataaaggctgcttcctcaatgcgccggatatgtatatggagaagctgattgtcggtccgggagccaaaggcaccattgatctgaacctgccgctggcggataacctgcgcaatgtagcggcggcgctcggcaaaccgttgagcgaactgacggtaacgattctggctaaaccacgccacgatgccgttatcgctgaaatgcagcaactcggcgtacgcgtatttgctattccggacggcgacgttgcggcctcaattctcacctgtatgccagacagcgaagttgacgtgctgtacggtattggtggcgcgccggaaggcgtagtttctgcggcggtgatccagcgcattagatggcgacatgaacggtcgtctgctggcgcagtcatgacgtcaaagtgcgacaacgaagagaatcgtcgcattggcgtagcaggtagctggcacgctgcaaagcgatgggcatcgaagccggtaagtattgcgcctgaagcatatggcgccagcgatacgtctcggtaccaatattccctgatacttttcgactgcggttcgacaaaaatcccgctggatcatcggcatgttttccaaggctttaaaacccataaatggacctccagcctgacgctgaactactttctctggcgcgaccgcaaaggggcaatcagtaactttgtcagcttcctcgcgatgctggtgatgatccagcttttgctgttgctggcgtatgaaagtttgtggcccgatgcctggcatttcctttctattttcagcggcagcgcatggttaatgaccctgctgtggctaaactttggtttgatggttaaccgcatcgtgcagcgggtgattttcgttactggctactacggcctgacgcaggggctgctttccgtcctgcgtcttttctggggcaacctgattaacttcatggccaactggcgcgcgctaaaacaggtacttcaacacggcgatccacgtcgcgtggcgtgggataaaacaacgcatgacttccccagcgtgactggcgatacccgctcgttgcgcccgttaggtcaaattctgctggaaaatcaggtcatcactgaagaacaactcgatacagcactgcgtaatcgcgtcgaaggtctacgcctgggcggttcaatgctgatgcaggggctgattagcgccgagcagctggcacaggcgctggcagagcaaaacggccatgattgggtaacgccaaatcaccacattcaaaaaactgccgatgatcaatcctccgacggttgccacgacgggcatccgccgtgggtattgctgagctatacatatcgaatcgagctcggtacccaacgcgccaatgaaaatggcgaaagctttgtggcgatggtggatcgcatgatcgccgaaatgcacaaagattttgatgctttgaacattctgcgcccggatatggagccgcgcgcgacgcaccatatcgcagaaattattgaactcactgaacaactgatcgccaaaggtcacgcttatgtggcggacaacggcgacgtgatgttcgacgtcccgaccgatccaacttatggcgtgctgtcgcgtcaggatctcgaccagctgcaggcaggcgcgcgcgttgacgtggtcgacgacaaacgcaacccaatggacttcgttctgtggaagatgtcgaaagagggcgaaccgagctggccgtctccgtggggcgcgggtcgtcctggctggcacattgaatgttcggcaatgaactgcaagcagctgggtaaccactttgatatccacggcggcggttcagacctgatgttcccgcaccacgaaaacgaaatcgcgcagtccacctgtgcccatgatggtcagtatgtgaactactggatgcactcggggatggtgatggttgaccgcgagaagatgtccaaatcgctgggtaacttctttaccgtgcgcgatgtgctgaaatactacgacgcggaaaccgtgcgttacttcctgatgtcgggccactatcgcagccagttgaactacagcgaagagaacctgaagcaggcgcctggtacccatcagcactactgccagattctccagcatcgaaaacgccactgcgccgggcaaggtttccggtttacccgcaatcgccagatccgcttcaccagtgaccaccttttccatcgcatctgccgcatcaccagtagtaagtttaatctccaccgacgggtgttccgcgcggaagcgatccagaatcggcggcagatggctcacatcgcgcccattttttccctcaacatcctgttcctgttcgtctttaataccaccacgccgctgcagtggctgatggcttctgacgtggtggactacgaggagagccgcagcggtcgccgcctcgacgggctggtgttctccacctacctgttcagcctgaagattggcctggcgattggcggggcggctagtgggctggatcctggcgtacgtcaactattccgccagcagcagcgtgcagccggttgaggtgctcaccaccatcaaaattctgttctgcgtggtgccggtggtgctctacgcggcgcatgttcatcatgctgtcgctctacaagcctcaccgcatgcccgcgctggcaggcgcatcacggaccgcaggcacctcacctcaccacttcgccccacacatcgcacccgtatccgcacgctcgcgctctcacaccgctgccgcccgccgacatataaggaagataagaaagttctttttcgttcccgcctgacaactgccagcggcgggtattatcagaacttcgctaacaatctcaaccgcttctttctcaatctgcttgcgatgttcttcaccgaggaagctttcgcagtagatcttatatgcgtcttccgtgcctgacggacgcgcggcgaaccagccgttgtcagtcatcactttcagaccgccaatagaagcaccgttgcccggagcagcagtcaggcgcgcggtgatcgggtcacctgcacagctgaacatccccggaaacagcgaagtgttccatctctgccgggtgatgtatctcgataaagagccgctgtttattgatagttcatggatcccgctgtcgcgttatcctgactttgatgagatttacgtcgaaggaagctccacctatcagttatttcaggagcgttttgacacgcgagtggtcagcgacaaaaagaccatcgatatctttgccgccacccgcccgcaggcaaaatggctgaaatgcgaactgggcgaaccgttgtttcgcatcagcaaaatcgcctttgatcagaatgacaaccggtgcacgtctccgaactcttctgccgcgccaatcgcgccgtccttctattccacccgccttggcctcccaaaatgctgcgatcacagacgtgaaccaccgcgcttgccctgtactgcagattaa

SEQ ID NO: 28548 - DNA, 2916 bp, Homo sapiens
  SIMILAR (937)..(1497): 991254mologous to Escherichia coli K12 modulator of drug activity B,accession number AE000385,Smith-Waterman Score=1011.
  misc_feature (1)...(2916): n = a,t,c or g
atgatgttacggatgtattgcgcgttaaccggaagcggtcgatattcgagcgcactttctgccgcacgaacggaagacagcgcatacgttgcacaatcatccatgcatcgcgcggatcgcggtttttcacgatctcttccagtgccgcggcccacagtggggttacccccgcgggaaaaagggcccacaaagtggccttttcccgaaacgacgccattttcgatttcgcaatcgatgcgtaaatgcccctcaatacgggttaccggatcaatagtatctctggctcatgcttgctcgcctcatgacgattatgatcgttgttttaaaggaccatctgcggtcgcgataattgcctgtcctttgctgcctgcgatatcaatccccttgttgcccccctcagaagcgccaaaggtttcgatcactttgccctcagtcggccagcgccaggtggagataggcgtactggttgatgtactgctgacagtcggctcggttgtgcttgctgttggtaccgttacaggcgctgtgaccgtggtcgcagttggcttgttgttcggcaacattttgttagcactctgttcacccgaagactcagaatacgtaattgtcggttgcgacgcaacagcaacggtggaattttgtgcaggcttgatcacaactccttgctctgctgcgtcggcctggcgcatccagtatctcttgcgcccggtcatcgtgacaggagaggaaatagccttagctacgcaaaccacgtccacgttggatcagcgaccaacagatcaaataaaacgccacaataaagaccaccagtacgccaaaggtagtgaccagcggaacatcattgataccgaggaagccgtagcggaaaccactgatcatataaacgattgggttcaggtgcgacaggccctgccagaaacggggcaacaaaannggatccccaacggcgcgaaaaaattcgcccactccaatggtcaactgaacgacaccctgaccgaagtcgcggatggcacactgcgcgaccttgggcatgatgtccgcatcgttcgcgccgacagcgactacgatgtcaaagcggaagtacaaaactttctctgggctgatgtggtgatctggcagatgccaggctggtggatgggcgcgccgtggacagtgaaaaaatacattgatgatgtattcaccgaaggtcacgggacgctgtatgccagcgatggtcgtacccgcaaagatccgtcgaaaaaatacggttccggcggcctggtacagggcaaaaaatatatgctttctctgacctggaacgcaccaatggaagccttcaccgaaaaagatcagttcttccacggcgttggcgttgacggtgtgtatctgccgttccataaagcaaaccaattcctcggtatggaaccgctgccgacatttatcgctaatgacgtgataaaaatgcctgatgttccccgctatactgaagaatatcgcaagcatcttgtggaaatttttgaaatccgtactcgtcctggtcaacatcaccgtcaggcggtattggatcagtttgctaaaatcgttccaaccgtactgaaagaagaaggttgccacggctatgcgccaatggtggattgcgcagctggcgtgagtttccagtctatggcaccggattctatcgtgatgattgagcagtgggaaagcatcgcgcatcttgaagcgcatctgcaaaccccgcacatgaaggcgtatagcgaagccgtaaaaggtgacgtgctggagatgaatatcnctgcgggatctccgagcgttcttgttgtcctgcccccggcgaaacgtacaccggggtgttttcagacccgtacgtctattttgtgttccctatggtttaagtacgcccgagggaaatttacccaccggggagcgggtgctggcgcggcttttcaaccgaccggattcgtggtcgatgacgccatcgtggtgatcgaaaacatttcccgctatatcgaaaaaggcgaaaaaccgttggcggcggcgctcaagggcgcaggagggatgatgcgccatttacgcaatatttttaatctgggtatcaaagagttgcgcagtctgctcggtgataaagcgatgctgacgctgattgtcttctcgtttacggtgtcggtgtattcgtcagcgaccgttacgccaggatcgttgaacctcgcgccgatcgccattgccgatatggatcaatcgcagttatcgaaccggatcgttaacagcttctatcgtccgtggtttttgccaccggagatgatcaccgccgatgagatggatgccggactggacgccggacgctataccttcgcgataaatattccgcctaattttcagcgtgatgtcctcgccggacgccagccggatattcaggtgaacgtcgatgccacgcgcatgagccaggcatttaccggcaatgggagcatgaggctgctcgtccgtcgccgcaacaccagtaccaaccgccttatgcgtctgcgcagccgcgtcaaccggtccagcagccgcctgaagcgcaggtaccgccgcaacatgctccgcatccagcgcagccgcattcaacaagcgggcttcatttttggcgatatgaatatttaccatcgtcatcttagcccggatggcagcggcccggcgttattcagcctggcgaatatggtgaaaccgggaacctttgatcctgaaatgaaggatttcactactccgggtgtcactatctttatgcaggtaccgtcttacggtgacgagctgcagaacttcaagctgatgctgcaatctgcgcagcatattgccgatgaagtgggcggtgtcgtgcttgacgatcagcgccgtatgatgactccgcagaaattgcgcgagtaccaggacatcatccgcgaagtcaaagacgccaacgcctga

SEQ ID NO: 28549 - DNA, 484 bp, Homo sapiens
  SIMILAR (321)..(1): 761254mologous to Escherichia coli pot. PBP 1A,accession number X02164,Smith-Waterman Score=417.
  misc_feature (1)...(484): n = a,t,c or g
atgaccgagattacgacggtgatcatcaaagccaatccagaccgaggtcacaacgcccggaccgtaacccgagaaccacgcatctttcgaactgttagtggtcccggttttcccgccgatatcgcgacgctgcaannnnctaattatacgccagccagtaccctgccagcctggctcaccaaagatattggtgttcaaagcactcttaatcaggaatgccagcggagtgtagatgacgtgcggtgtcatacggttctggaacctgttaaaaccagctgtgcttttccaaagcaccccattaggcttaaaaaggttcgggactttccccaaggcggtggtcccaggccggcaaaggaagtttggcccaaagcgggtttccggccccaggttacgggcccatccttttcaaaatcccacagccaccaatttcccccccgaggagtttcccggcctggaggtctggcaaggttggcttttgccaaag

SEQ ID NO: 28550 - DNA, 1524 bp, Homo sapiens
  SIMILAR (1)..(501): 991254mologous to Escherichia coli gcvHP,accession number L20872,Smith-Waterman Score=899.
atgatcccaatcacctggccgaaatttgccgaactgcacccgttctgcccgccggagcaggctgaaggttatcagcagatgattgcgcagctggctgactggctggtgaaactgaccggttacgacgccgtttgtatgcagccgaactctggcgcacagggcgaatacgcgggcctgctggcgattcgtcattatcatgaaagccgcaacgaagggcatcgcgatatctgcctgatcccggcttctgcgcacggaactaaccccgcttctgcacatatggcaggaatgcaggtggtggttgtggcgtgtgataaaaacggcaacatcgatctgactgatctgcgcgcgaaagcggaacaggcgggcgataacctctcctgtatcatggtgacttatccttctacccacggcgtgtatgaagaaacgatccgtgaagtgtgtgaagtcgtgcatcagttcggcggtcaggtttaccttgatggcgcgaacatgaacgcccagcgtcgcgatatcggcgggaaaaccgggaccactaacagttcgaaagatgcgtggttctcgggttacggtccgggcgttgtgacctcggtctggattggctttgatgatcaccgtcgtaatctcggtcatacaacggcttccggagcgattaaagatcagatctcaggttacgaaggcggtgccaagagtgcccagcctgcatgggacgcttatatgaaagccgttcttgaaggtgtgccggagcagccgctgacgccgccaccgggtattgtgacggtgaatatcgatcgcagcaccgggcagttagctaatggtggcaacagccgcgaagagtatttcatcgaagtcaacgaaattgtggtgaacccgaatgcgaccctcgattggcaactggcattacgccaggcagcaggaaaaaccgatttagcgcgcgatatgctgcaaatgttactcgatttcctgcctgaagttcgcaacaaagttgaggaacagctggttggagaaaacccggaaggcctggttgatttgattcataaactgcatggcagttgcggctatagcggtgtgccacgtatgaagaatctctgccaactgatcgaacaacagctacgtagcggtactaaagaagaagatttggaaccggagctgctggaactgttggacgagatggataatgtcgcgcgcgaagccagcaaaattctcgggggccatgataacgggggaaatgctcttttgcacaaggctctccccccgggaaatgttggaaaatgggccatggccccaattccccccccttttccccaaccaggaaagtctgtaaccatctgttggaaacccgcgtcgtcagaaaaccggtcaaatctgcttgaaatcttcctgcgtgagcttatctctaacgcctccgatgcggcggacaagctgcgtttccgtgcgctctctaacccggacctgtacgaaggtgatggcgaactacgcgttcgtgttgatgaagtactgagcccagcttccgttccctatagttaa

SEQ ID NO: 28551 - DNA, 1279 bp, Homo sapiens
  SIMILAR (610)..(1278): 971254mologous to Escherichia coli alcohol dehydrogenase (adhE),accession number M33504,Smith-Waterman Score=1084.
atgagtgaattacagcgactggaaaaaccgtataagcggatcatgctggttggtggcggtaatatcggtgcagggctggcgcgtcgtctggaaaaagattacagcgttaaactcatcgaacgtaatcagcagcgcgctgccgaactggcggaaaagttacagaatacgatcgtcttttttggtgatgcgtcggatcaagaactactggccgaagaacatatcgatcaagttgatctgtttattgccgtcaccaacgatgacgaggccaatatcatgtccgccatgcttgccaaacgtatgggtgcgaaaaaggtgatggtattgatccagcgtcgcgcttatgtggatctggttcaggggagcgttatcgatattgcgatttcaccacaacaagcaactatttctgcgttgcttagccatgcacaacaagcatcaacaataaggattaaagctatgggttttctttccggtaagcgcattctggtaaccggtgttgccagcaaactatccatcgcctacggtatcgctcaggcgatgcaccgcgaaggagctgaactggcattcacctaccagaacgacaaactgaaaggccgcgtagaagaatttgccgctcaattgggttctgacatcgttctgcgtgtaaaaaaagcccagcgtgaatatgccagtttcactcaagagcaagtagacaaaatcttccgcgccgccgctctggctgctgcagatgctcgaatcccactcgcgaaaatggccgttgccgaatccggcatgggtatcgtcgaagataaagtgatcaaaaaccactttgcttctgaatatatctacaacgcctataaagatgaaaaaacctgtggtgttctgtctgaagacgacacttttggtaccatcactatcgctgaaccaatcggtattatttgcggtatcgttccgaccactaacccgacttcaactgctatcttcaaatcgctgatcagtctgaagacccgtaacgccattatcttctccccgcacccgcgtgcaaaagatgccaccaacaaagcggctgatatcgttctgcaggctgctatcgctgccggtgctccgaaagatctgatcggctggatcgatcaaccttctgttgaactgtctaacgcactgatgcaccacccagacatcaacctgatcctcgcgactggtggtccgggcatggttaaagccgcatacagctccggtaaaccagctatcggtgtaggcgcgggcaacactccagttgttatcgatgaaactgctgatatcaaac

SEQ ID NO: 28552 - DNA, 1093 bp, Homo sapiens
  SIMILAR (3)..(437): 951254mologous to Escherichia coli transmembrane protein,accession number M93239,Smith-Waterman Score=679.
atgtcatcacgggcttgtcgctgttgttattattcgtcgcgcttgctcatgccattggctggcctgcggaccgcggtatgctcaccatctggctggcgcatgtcactttttgtacggcttatgtggcggtcgttatttcttcaagattgcgggaactggatcgctcgatcgaagaagcagcgatggatctcggtgcgacgccgctgaaagtgtttttcgtcattacgctaccgatgatcatgcccgcgatcatttctggctggttactggcttttactttgtcgcttgatgatctggtgatcgccagctttgtttccgggccgggagccaccacgttaccgatgctggtcttttccagcgtgcggatgggggtgaatccggaaatcaacgccctggcatcattgatcctgggcccgcattcggtctggattggctttgatgatcaccgtcgtaatctcggtcatacaacggcttccggagcgattaaagatcagatctcaggttacgaaggcggtgccaagagtgcccagcctgcatgggacgcttatatgaaagccgttcttgaaggtgtgccggagcagccgctgacgccgccaccgggtattgtgacggtgaatatcgatcgcagcaccgggcagttagctaatggtggcaacagccgcgaagagtatttcatcgaaggtacgcagccgacacaacaggcagtgcacgaggtgggaacgaccattatcgataatggcgaggcacaggaattgttctgattaaaaaggcgcttcggcgccttttcagtttgctgacaaagtgcacttgtttatgccggatacggcgtgaacgcgttatccggctaacaaaatcgtgaaaactcaataaattgcagaaaccccataagcctgataaacattgtgcatcaggcaaacttcacgcatttacactcgcccctgccctttcaaccattcgcgcacgaggaacagcgcactgacattgcgcgcttcattgaagtcagggtcttccagcaaatccatcatatgcgccagcggccagcgcacctgtggtagcggctctggctcatcgccttccagtgattccgggtaga

SEQ ID NO: 28553 - DNA, 1472 bp, Homo sapiens
  SIMILAR (388)..(1077): 921254mologous to Escherichia coli K12 putative receptor protein,accession number AE000449,Smith-Waterman Score=1125.
atgacgcaggatgaattgaaaaaagcagtaggatgggcggcacttcagtatgttcagcccggcaccattgttggtgtaggtacaggttccaccgccgcacactttattgacgcgctcggtacaatgaaaggccagattgaaggggccgtttccagttcagatgcttccactgaaaaactgaaaagcctcggcattcacgtttttgatctcaacgaagtcgacagccttggcatctacgttgatggcgcagatgaaatctggcaaacttgtaaggcccagaggtgccaaagcccctgttcaaagaccttaggtgcacagcctgagaacccagatctatcacagataagcagatttccacaggacgagagaaggatatccaattgctcatcagggaaggccgcaaaccctgtgctgtactggtcaaaaattgaagagaaaattgccagtgagccagcctcgatttattctcccatgactctgaaggatttcagtaaatttgtgaaagatgaaattggctttagttacaccggctattcccgttctggtggggggaccgcctctcatggttcacctaaatcatgggcgattggttctctgggccgctttggtaacgaatactccggctggtttgatttgcagttaaaacaacgtgtctacaacgaaaacggcaaacgggttgatgccgttgtgatgatggatggtaacgttggtcagcagtactctaccggctggtttggcgataacgccggtggcgagaactatatgcagttctccgatatgtacgttaccaccaaaggtttcctgccctttgcgccagaggctgatttctgggtgggtaaacacggtgcgccgaaaattgaaatccagatgcttgactggaaaacgcagcgtactgatgccgcagcgggtgtaggtctggaaaactggaaagtcggtccgggtaaaattgatatcgcgctggttcgcgaagatgtcgatgattacgatcgcagcctgcaaaacaaacagcagattaataccaataccattgatttacgctataaagatatcccgttatgggataaagccaccttaatgccgcgtatcccgactcaacggtatggtctggcaaaagcgttcttgaagcggacgtcgctatatgccaacgcgatgggtccggaaggtgtgcgtgttaacgccatctctgctggtcaaacacgtactctggcggctcccggtatcaaaagactcccgcaaaaatgctggctcattgcgagcccgttaccccgattcgccgtaccgttactattgaagatgtgggtaactctgcggcattcctgtgctccgatctctctgccggtatctccggtgaagtggtccacgttgacggcggtttcagcattgctgcaatgaacgaacgtgacccgttcacagaccttcaccggtaccggatgaatctgaacatgatgaattatggtgctcaaaggaacatg

SEQ ID NO: 28554 - DNA, 419 bp, Homo sapiens
  SIMILAR (1)..(75): 441254mologous to Haliotis rufescens lustrin A,accession number AF023459,Smith-Waterman Score=46.
gcggccgcggccgcgcccgcgtcacatgctccaggggactcaccgccagcgccacctccatgccgggccgggtgtcgcgcgccggcgctggggcggaatggctcggagagccgcgcgcggacggccccgcctgcggctctgcatcttctcccggagccgccagctcgggctccggctccgcttcctcagcagcactgtgaatgaaggggaccaggtgaagaccgtggctgaggtcaggccatttctgtggaggactgtcatccttctccttctcctcttccttctcctcggggaagaaaagaccttccaattccccaggctcaatgaggctgggctcacctccatccggtgctggtagggcagggggcattgtcactgttgcctgctgagccagactctccacctgcaataccaagcag

SEQ ID NO: 28555 - DNA, 2806 bp, Homo sapiens
  SIMILAR (2018)..(2803): 1001254mologous to Escherichia coli envM,accession number M97219,Smith-Waterman Score=1322.
  misc_feature (1)...(2806): n = a,t,c or g
cccagcggttggaaaacctcggggcccaaattgaagggtagtgaaaagcaggtgtgggacagtgaagaacccatctttctccctctactcacggaatttctgtctattaaggtgacagaactgaagggcctggccaaccatgtggttgtgggcagtgtctcctgtgagaccaaggacctgtttgccgccctgccccaggttgtggctgtggatatcaatgaccttggtaccatcaagctcagcctggaagtcacatggagccccttcgacaaggatgaccagccctcagctgcttcttctgtcaacaaggcctccacagtccccaagcgcttctccacctatagccagagcccaccggacacaccctcacttcgggaacaggctttcttattaacatgctgcgacggcaggagggagctgggagaatggggacagcatggtccctgttcatctggatttttcagacggattcttccagcccacagctctcaggcactgcccgccactcaccagcccctaggcccctggtgcagcagcccgagccccttcccatccaagttgccttccgcaggcctgagacccccagctctgggcccttggaatgaaggaaggggcccgtggcccaagtccctggcaaaatgggcatgcaccctacagtcggactctgagccacatcaagtgaggctagtgtagatgctgccttggctgaggcttcaagttgngaagcgttggcccagaaagcctagcctggggacctagcccacctacacacccagctcccacccatggagagcaccccagtcctgttcctcctgccctggaccctggccactctgccacaagctctaccctcggtacaacaggctctgtccccacatctacagaccctgccccatctgcacacctagactcagttcataagtccacagactctggcccttcagaactgccaggccccactcacaccagggactgtcggaaaggccttaagtcagccacaagtggcttccaccaaggaactccccaagccattcagaagtcccagtcctattcgtatgcacagcagcagaatgtttctgtaccaatgccgcagctggagcaggcaaatcaggcgttagtggcgaagactggcgcgcaggagtacgcaccgcacgtcatcaacactccgctggcattcctgattaagagtgctttgaacaccaatatctttggtgagccaggctggcagggtactggctggcgtgcaggtcgtgatttgcagcgtcgcgatatcggcgggaaaaccgggaccactaacagttcgaaagatgcgtggttctcgggttacggtccgggcgttgtgacctcggtctggattggctttgatgatcaccgtcgtaatctcggtcatacaacggcttccggagcgattaaagatcagatctcaggttacgaaggcggtgccaagagtgcccagcctgcatgggacgcttatatgaaagccgttcttgaaggtgtgccggagcagccgctgacgccgccaccgggtattgtgacggtgaatatcgatcgcagcaccgggcagttagctaatggtggcaacagccgcgaagagtatttcatcgaaggtacgcagccgacacaacaagcagtgcacgatgtgggaacgaccattatcgataatggcgaagccctgactatcaatcgcagagaccttggcagagagcattgtggctcaagctttggcaggcctgagtgcagcccgggatcagctgcccagggctatttcagggtccccttagttagcatcaatgggatcatggctgaggccctacctgccatctttggctgcttggtattgcaggtggagagtctggctcagcaggcaacagtgacaatgccccctgccctaccagcaccggatggaggtgagcccagcctccttgagcctggggaattggaaggtcttttcttccccgaggagaaggaagaggagaaggagaaggcacaacaagcatcaacaataaggattaaagctatgggttttctttccggtaagcgcattctggtaaccggtgttgccagcaaactatccatcgcctacggtatcgctcaagcgatgcaccgcgaaggagctgaactggcattcacctaccagaacgacaaactgaaaggccgcgtagaagaatttgccgctcaattgggttctgacatcgttctgcagtgcgatgttgcagaagatgccagcatcgacaccatgttcgctgaactggggaaagtttggccgaaatttgacggtttcgtacactctattggttttgcacctggcgatcagctggatggtgactatgttaacgccgttacccgtgaaggcttcaaaattgcccacgacatcagctcctacagcttcgttgcaatggcaaaagcttgccgctccatgctgaatccgggttctgccctgctgaccctttcctaccttggcgctgagcgcgctatcccgaactacaacgttatgggtctggcaaaagcgtctctggaagcgaacgtgcgctatatggcgaacgcgatgggtccggaaggtgtgcgtgttaacgccatctctgctggtccgatccgtactctggcggcctccggtatcaaagacttccgcaaaatgctggctcattgcgaagccgttaccccgattcgccgtaccgttactattgaagatgtgggtaactctgcggcattcctgtgctccgatctctctgccggtatctccggtgaagtggtccacgttgacggcggtttcagcattgctgcaatgaacgaactcgaactgaaataa

SEQ ID NO: 28556 - DNA, 1353 bp, Homo sapiens
  SIMILAR (502)..(296): 491254mologous to Escherichia coli alternate gene name yibF,accession number U00039,Smith-Waterman Score=128.
tcaccggacgcaggcgctctgcgctctttcgtcaaccgggcatgacttcttgcgcccagttttcacaccacgcggcagcgtctggctgccacgaatcacttctcgcgcttcgtcgagcatctggcgcaacgcggcggaaattgagatatccgacggccaggcaatggcgatagtcgccagattgaccgtatcggttttgagtgtgcatcgaccagatatccttccagcacatccagactgcggttgattttctccgctggcgtaacaattcatcttcagactgctgcgccgctggacgcgcccgcaacgactccagcggatcgcgcggcaacatcgccgagcgacattcattaattcaatatattcagcgatgatcggcgaatcaaacagcattcgccctcttcggtcaccagcaccggcacttttcctaacgggtaaattgcgccacgccgttgtccgcgttatagggcagttcattaataaatcgaaagttatgcccttttctgggctcttcgacttacaagtgatgacaactaagacccagaagggcaggtcactcgctagagttgagtccaggttctctggttctccccagcagtttgtcctctggttgctgtggcttaagaacctggtagtcaggcctttggaactgtgaagtaagacgtgagagagggagacagagacccttttatgattaaggtacatagttgtgtgttcgttgatttcgcaaaaaccatgcacgatggcgcttggtttcactacgcggtaatttgatttctcacaaaggagaggaccgttactttttcgcgataagagcggtgaaattaatgtcgttattcctgcggccgttttgatggacgagaagttcagccggaccagatgatcaacattagtggcatcgccgataaactgccggtcatcgcaccaacgaacgcaaccagcaaactcaaactcgccagccaaccagaagacgactctgaaatttatgatgggtgcaacggtgcgcagcctggcgattattggttcgcagcgtttgtttccggtatgttttcccgctggctggcgaaaaccatactctctcgccacatactcagcgtaactatccggagctgcaaaaacggtgaatggctggctgtcggcggcgctgaaaacggcgcgtattctgacagtcgcgtggcggtaatgttgctgttgagcgcatggggattgttcgatttctgaactggctgcaaaacggcgcggggcagaaaaccgtagatatcctgatcctatcgcactcattcttttcttctcggcggttggctggacggtgctcgccgtttgatcgaaaaccggctggcttcggatattcat

SEQ ID NO: 28557 - DNA, 627 bp, Homo sapiens
atgcaaataaaatcggcgctatacgatggcttcagtcagttagtatcgataaagcgagcggccctcccgctgcgttggtctaacaatacgcgcccagacatcaaaccacgagaggtgtggcgcacctactacagacaccgctacgtactgcagcggacggcaacaccttgggtgtaccagcacggcacacaaaaggcgagcgcacgaaatcggcgctatacgatggcagtagtcagtagcacttttagttttcgtttcttcttcgatccaaccccgaattggatcatcacagatgaccaggtcggtttaatacaggatgcagcgccaccgccgcctcatgcaatagaagatggctatcgcggaaccgatgatgcaaaaaaaatgaccgttgatttcgcaaaaaccatgcacgatggcgcttcggtttcactacgcggtaatttgatttctcacaaaggagaggaccgttacgtttttcgcgataagagcggtgaaattaatgtcgttattcctgcggccgtctttgatggacgagaagttcagccggaccagatgatcaacattagtggcagtctggataagaaaagcgcgccggccgtcgttcgggtcactcatttgcagaaataa

SEQ ID NO: 28558 - DNA, 1284 bp, Homo sapiens
  SIMILAR (694)..(1281): 1001254mologous to Escherichia coli Sucrose phosphorylase (EC 2.4.1.7) (Sucrose glucosyltransferase),accession number D90769,Smith-Waterman Score=1030.
atgaatatattcgatcactatcgccagcgatatgaagctgccaaggacgaagagttcacactgcaggagtttcttaccacttgtcggcaagatcgcagtgcttatgccaacgcggctgagcggctattgatggctatcggtgagcctgtcatggtcgatacagcccaggaacccagactttctcgactcttttctaaccgggtcattgcacgttatccggcgtttgaagagttttacggcatggaagacgcgattgaacagattgtctcttatctgaaacacgcggctcaggggctggaagagaagaaacaaatcctgtatctgctggggcctgtgggtgggggtaaatcatcgcttgctgagcgactgaaatcattaatgcagctcgtaccgatttatgtattgagcgcgaacgccctgcacacctttggatcagaacacactcaacgatgcagacacctgctggttcttcccgaggcagctcagcggttctgggattccgtggtcggcaatgaactctcaagcagcaaaggcaaagtacagaagataaataagagcaagctggccggtgcgtgcgactggatggacaacatctttacccacatgtctgcatcagctctgcgttgttcaccgacaaatcccgtgtctggaagagtcctggcaggctgcacgggctggagagagagcgagctggaaggtgcattagtaaactggaaaaataatcccgacggtacacgcagtccgtatgaaataaatgtgacctatatggatgcgttaagccgccgtgagagtagcgatgaagaacgttgcgccaggtttatccttgcccatgcgattttgttaagtttccccggtgtgccagcgatatatattcaaagtattcttggctcgcgtaatgattacgcaggtgtcgaaaaactcggatataaccgtgcgattaaccgtaaaaaatatcacagtaaagagataacccgagaactgaacgatgaagctacattaaggcatgcggtatatcatgagttgtcgcgtttaattacacttcgtcgcagccataacgagtttcatccggataataattttaccattgatacgattaattcatccgtaatgcgtattccaagaagtaacgctgatggtaattgtctgactggattgtttaatgtcagtaaaaatattcagcatgtaaatattactaatctgcatggtcgggatctgattagtgaagttgatatattgggtaatgaaataacgctgcgcccctggcaggttatgtggattaaataa

SEQ ID NO: 28559 - DNA, 1590 bp, Homo sapiens
  SIMILAR (1)..(738): 951254mologous to Escherichia coli IS5 39.3kDa protein,accession number U70214,Smith-Waterman Score=1247.
atgctacgcattcactgcatgcagcattggtacaacctgagcgatggcgcgatggaagatgctctgtacgaaatcgcctccatgcgtctgtttgcccggttatccctggatagcgccttgccggaccgcaccaccatcatgaatttccgccacctgctggagcagcatcaactggcccgtcaattgttcaagaccatcaatcgctggctggccgaagcaggcgtcatgatgacccaaggcactttggtcgatgccaccatcattgaggcacccagctctaccaagaacaaagagcagcaacgcgatccggagatgcatcagaccaagaaaggcaatcagtggcactttggcatgaaggcccacattggtgtcgatgccaagagtggcctgacccacagcctggtcaccaccgcggccaacgagcatgacctcaatcagctgggtaatctgctgcatggagaggagcaatttgtctcagccgatgccggctaccaaggggcgccacagcgcgaggagctggccgaggtggatgtggactggctgatcgccgagcgccccggcaagaacaaaacggccatcaacatcgaatacatgaaagccagcatccgtgccagggtggagcacccgtttcgcatcatcaagcggcagttcggcttcgtgaaagccagatacaaggggctgctgaaaaacgataaccaactggcgatgttattcaccctggccaacctgtttcggagtgccaacgcccgttcgggcccgaacaaacgcccgctgtcgtcgatgtcgccgaccattgtggtgaaagacggtaaaacctggctggttaccggtagcccaggcggtagccggatcatcactacagtgctgcaaatggtggtgaatagcatcgattatggcttgaacgtcgccgaagcgaccaatgcgccgcgtttccaccatcagtggttgccggacgagctgcgtgtcgaaaaagggtttagcccggatacgctcaagctgctggaagcaaaaggtcagaaagtggcgctgaaagaggcgatgggcagtacacaaagcattatggttgggccggacgcgcgcgtcggcggcgaagagtttggcgtcttgctgacggacatcgatactgaacgtgcgaaagctttagcggaaaggattcgggaaaatgttgagcgtttaactggcgataatcctgaatacgctataccactaaaagtgacgattagtattggcgctgttgtgactcaggaaaatgcgttaaacccaaatgagatctatcgactggctgataacgcactttacgaggcgaaagagaccgggcgtaataaggtggttgtgagggatgtggtgaatttttgcattatcgtagcagcacctttgagctatgctggcaggctaacggggtttataccggttctcgccctgacggtaacgggcgccctgcgttttaatcgttcggtcctccgggaacatcaaggatggcggttccacccattcggctacgcgcttaacgctttggcgcgcaaagcattgaagcaaacagcgtgctgtcgtttcccatttttagcaaatgcggttaaccgtcaggcatga

SEQ ID NO: 28560 - DNA, 2130 bp, Homo sapiens
  SIMILAR (969)..(280): 951254mologous to Escherichia coli xylose isomerase,accession number K01996,Smith-Waterman Score=1155.
tcagagaaaatatgtctgaatttgcacgttgccattatgggtatatacaacatccgatgcgatagcatccggtgcgccgttattatcaatgacgtcatctgccacggcaaggcgggcttcgcgcgttgcctgagcagcaaggatttgttcgacatgctcgcgagttacatcatcgcgctgcatggtgcgcttaagttgcgtttctgggcgtgagcatttaggcttgtgccaggcgtccgcggttgtcatgacccaggacgatcttcctttgggcggtgcgcgatgcgttagtcgcagctcgccatcttcggtcatgcgcgctgcgagtttcggcgccagtgccgtggtatccatcgcgccgatatgaccgtaggacagatcatatttatcagtactttgacgacgtactttggcatcgaagttcagaccaccggtggtgaaaccgcctgctttgagaatttcatacatcaccagcgcattctcttccacactgttcgggaactggtcggtgtcccagcccagttgcgcatcgccacggttggcgtcgacagaaccgaacaggccaagcgcaatggcggtggctatttcatgatggaaagagtgacctgccagcgtcgcgtggttagcttcaatgttcagtttaatctctttttccagaccaaactgtttcaggaagccatagaccgtcgcggcatcgtaatcatattgatgtttggtcggttcttgcggtttcggttcgataagcaacgtgccctggaaaccgattttatgtttatgctcaaccaccatctgcataaagcggcccagttgttcacgctcctgacgcaagtcggtatttaacagcgtttcgtaaccttcacgaccgccccacaggacatagttttcaccgcccaatttatgggttgcttccatcgctgtaacaacttgcgttgccgcccagctgaagacttcaggatctgggttcgtcgccgggatcctgtcagcggcgttgatgatgccggaaatgccattgatgttcgcgatccgcttagcgataaaattcgcgaacttgttgcgggcagcagcagtgaacaacgcgtaaccgccctgctttccctgcgtgaagttttcggtgatgatctgccagataacccgcattttgtgcaggccatcgaacaagcctttacgtaccgctttcagctccagaacttccgcctgcagcaggatagcgtccagcagttcatcgataccggtacccgctttcgcagatacgtgtacgaactggctttcaccgccccactcgccacctggtacgaaaaagacgatatgaacacctcggatatgcatccgtttattcatccgctttgcgcggtcgatccggcgtggaatcacgcagcgactgcttgtgtatccaccaccggttgatacgccacgtaaaattggttcgcgcttgatggcggtcatgatttctctgccggggcgcatacgtacgctcatcaggtaatagcagagcaggccaacgacagttccactcatgccgcccagtaaaaatgcgtaccacacatcgttccatgtccagtcatctgcataaagccgaacggtcagaggaatgcccgcaattttaggttgtgcacgtgagctgggggccagttgttcctggttagatgtcgcggtcgcagatgaacagaatgtttttttatctttcaccagcacaacgttcggacattcatgctcaacgctgcgcgggcggtcagttcgggttagcttgctggcagtatctaagtcagcggtccctggtaaaagatcagcgtgataatcgccggcaggatagcggaacggaacaggcccgtcagctatcccgtccagaaactgacgtacgcgcggatcaggattcgcctgcaacgcctgggcactgccatgagcgacaatttttttgtccgccaggatccaggcgtgatccgcaatacttaacacttccggcacatcgtgagaaaccaccacacaagtcacgcccagcgcgctgttcagctcagaaatcagcttcaccagtacgcccatggtgatgggatcttgcccaacaaaaggttcatcaaacatgatgagatccggctccagcgcaatcgcacgcgccagcgctgcacgccgcgccat

SEQ ID NO: 28561 - DNA, 3405 bp, Homo sapiens
  SIMILAR (2449)..(3402): 991254mologous to Escherichia coli K12 putative oxidoreductase,accession number AE000497,Smith-Waterman Score=1661.
atgggaacagtaatcttttttactggttctgcgtcttctctgttagcgaacacgaggcaagaaaaggaagttcggtatgccatgattcatgacgagtcacggtgcaatggctgtaatatttgcgcccgcgcatgccgtagaactaaccacgtccccgctcaggtaagccgtttatcgatagcacacattccagtcaccgataacgacaacgaaacgcagtatcacttttttcgccagtcatgtcagcactgcgaagatgctccgtgcatcgacgtttgcccgacgggggcgtcgtggcgtgatgagcaggggatcgtgcgggtagaaaaatcgcagtgcatcggctgcagttattgcattggcgcttgtccgtaccaggttcgctaccttaaccctgtcactaaagtggcagataaatgtgatttctgcgctgagtcccgactggcaaaaggctttccgcccatttgcgtcagcgcctgcccggaacacgcattgatctttggtcgcgaagatagcccagaaattcaggcgtggttgcagcaaaataaatactatcaatatcagctacctggtgccgggaaaccgcatctgtatcgccggttcggtcaacatttgattaaaaaggaaaatccatcaccgcaacaccgcgaaggggtgaaagatgtgatgcgctttaacgagccgatgtacaaggttggagagcagaacagcgtctgtatgtcctgtcatctgccggaacagttgcaaaaagcgttctggccgcacgatgtccactttctcaccggcgtcggcgtgctggcagccgtcagcggcaccgcagggcgcgtggtggcgaaaacgttgaatatcaatggggtgcgttacggcatggtgcatgacgagtcgttatgcatcggctgtaccgcctgtatggatgcttgtcgggaagtgaacaaggtgccggaaggcgtctcgcgcctgacgattattcgtagcgagccgcagggcgaatttcctgatgtgaaatatcgcttcttccgtaagtcttgccagcactgcgatcatgcgccgtgcgttgacgtctgcccgaccggtgcgtcttttcgcgatgctgccagtgggattgtcgatgttaatccggatctctgcgtcggttgtcagtactgcatcgccgcctgtccgtaccgcgtgcgctttatccatccggtcacgaagacggcggacaaatgcgatttctgccgtaagaccaatttgcaggccggtaagttgcccgcgtgcgttgaagcttgcccgaccaaggcgctgacgtttggcaatctggacgatcccaacagtgagatttcgcaactgctgcgccagaagcccacttaccgctacaagctggcgctgggaaccaaaccgaagctgtaccgcgtaccgtttaaatacggggaggtcattacccctgtaggattcattggttatggtcaagtcaaatggaatatctcagaatttggatataatatagtatcagtgctggaacgttcagacaggaaagttgtcatattaatggataagctagatgaggcaaggcgatattttagacttgtgaaggcgttacagcaggaaggtgcattagtaaactggaaaaataatcccgacggtacacgcagtccgtatgaaataaatgtgacctatatggatgcgttaagccgccgtgagagtagcgatgaagaacgttgcgccaggtttatccttgcccatgcgattttgttaagtttccccggtgtgccagcgatatatattcaaagtattcttggctcgcgtaatgattacgcaggtgtcgaaaaactcggatataaccgtgcgattaaccgtaaaaaatatcacagtaaagagataacccgagaactgaacgatgaagctacattaaggcatgcggtatatcatgagttgtcgcgtttaattacacttcgtcgcagccataacgagtttcatccggataataattttaccattgatacgattaattcatccgtaatgcgtattccaagaagtaacgctgatggtaattgtctgactggattgtttaatgtcagtaaaaatattcagcatgtaaatagtactaatctgcatggtcgggatctgattagtgaagttgatatattgggtaatgaaataacgctgcgcccctggcagaaaaccctggcatgcaccgttaagcaagtgcccgtggaagaagatgcctataacactaaagtgcattactctttcaccggttcgctgccggaagtgatcgaaaccagccatgactacgccaaatggatggacaaagagcagcttatcgatcgcaaagcggttgccacagtcatcagcaacgttgctgaaggcgcgttttacgatggcgtactgcgtattgtgcgtaccgaagatggtagcgcatggaccggtgttcctgtcagcgcctggattgccgcaccccgccctgccatgctctacacttcccaaacaacaccagagaaggaccaaaaaatgtcgatgataaaaagctatgccgcaaaagaagcgggcggcgaactggaagtttatgagtacgatcccggtgagctgaggccacaagatgttgaagtgcaggtggattactgcgggatctgccattccgatctgtcgatgatcgataacgaatggggattttcacaatatccgctggttgccgggcatgaggtgattgggcgcgtggtggcactcgggagcgccgcgcaggataaaggtttgcaggtcggtcagcgtgtcgggattggctggacggcgcgtagctgtggtcactgcgacgcctgtattagcggtaatcagatcaactgcgagcaaggtgcggtgccgacgattatgaatcgcggtggctttgccgagaagttgcgtgcggactggcaatgggtgattccactgccagaaaatattgatatcgagtccgccgggccgctgttgtgcggcggtatcacggtctttaaaccactgttgatgcaccatatcactgctaccagccgcgttggggtaattggtattggcgggctggggcatatcgctataaaacttctgcacgcaatgggatgcgaggtgacagcctttagttctaatccggcgaaagagcaggaagtgctggcgatgggtgccgataaagtggtgaatagccgcgatccgcaggcactgaaagcactggcggggcagtttgatctcattatcaacaccgtcaacgtcagcctcgactggcagccctattttgaggcgctgacctatggcggtaatttccatacggtcggtgcggttctcacgccgctgtctgttccggcctttacgttaattgcgggcgatcgcagcgtctctggttctgctaccggcacgccttatgagctgcgtaagctgatgcgttttggccgccgcagcaagtaa

SEQ ID NO: 28562 - DNA, 2469 bp, Homo sapiens
  SIMILAR (1)..(1257): 881254mologous to Escherichia coli similar to arylsulfatases,accession number L10328,Smith-Waterman Score=2005.
atggtcggttgctatagcggtaaaccgctgaatacgcaaaatattgatagtctggcggcggaaggtattcgctttaattccgcctacacctgttcaccggtttgtacgcctgcacgggccggactatttaccggtatctacgctaaccagtccggcccgtggaccaacaacgtcgcgccaggcaaaaacatctccactatggggcgctactttaaggatgccggctatcacacctgttacatcggcaaatggcatctcgacggtcatgactatttcggcactggcgagtgtccgccggagtgggacgctgattactggttcgatggggcgaactatcttagcgaactgacggaaaaagagattagcctgtggcgcaatggcctaaacagcgtcgaagatttacaggcgaaccatatcgacgaaaccttcacctgggcgcatcgtatcagcaatcgggcggtggattttctgcaacagcctgcgcgcgcagacgagcctttcctgatggtggtttcgtatgatgagccgcatcacccgttcacctgtccggtggagtatttagagaaatacgctgatttttactacgagctgggcgagaaagcacaggatgacctggctaacaaaccggaacatcaccgcttatgggcgcaggcgatgccatcgccagtcggtgatgacgggctttatcaccatccgctctattttgcctgtaatgactttgttgatgaccaaatcggacgggtcatcaatgccttaacgccagagcaacgtgaaaatacgtgggttatttatacctccgatcacggcgaaatgatgggcgcacataagctgatcagtaaaggggcggcgatgtatgacgacatcacccgcattccgctgatcatccgttcgccgcaaggggagcggcgacaggtcgatacgccagtcagtcatatcgatttactgccgacaatgatggcgctggcagatattgaaaaaccagagattctgccgggggaaaatatccttgccgtgaaagagccacgcggcgtgatggtggaatttaaccgctacgagattgagcatgacagctttggcggttttattccgcgtcgtttcgtggcccaacggctctccggcgagatgatttttcaggctggcgacatcggtttccgtcgtcacctgcggcatgttaaggcgattttccgtaatgcggatcgttttgatcccatccggcagatcgttcatcacgatccgattcgcacggatgatcccttcgcgcgaatcacgatatttcacctgctcgccggtgctgagtatgtccgcctggatgccgttggctttatgtggaaagagccgggaacaagctgcatccatctggaaaaaacacatctgattatcaaactgttacggtcgattattgataacgttgcgccaggtacagtgatcattaccgagaccaatgttccgcataaagacaacattgcttactttggcgcaggcgatgacgaagcacatatggtgtaccagttctcgctgccgccactggtgctgcatgcggtgcaaaaacagaacgttgaggcgctttgtgcgtgggcgcaaaacctgacactaccttccagcaacaccacctggtttaacttcctcgcctctcacgatggcatcgggctaaacccgctacggggcttgttgcctgaaagcgaaatattagagctggtcgaggcgttacagcaggaaggtgcattagtaaactggaaaaataatcccgacggtacacgcagtccgtatgaaataaatgtgacctatatggatgcgttaagccgccgtgagagtagcgatgaagaacgttgcgccaggtttatccttgcccatgcgattttgttaagtttccccgaaaaagacaaccctggcatcaccgttaagcaagtgcccgtggaagaagatgcctataacactaaagtcattactctttcacgtagcggttcgctgacggaagtgatcgaaacaagacatgactacgccaaagtgatggacaaagagcacccacagaaggacactagcctgtgcacgcgcgcaacaaaaatacaacaaaggggcccgctagtgaagagcacaaccaccagcctaactaacccccgcaaccacaaacaccaagagaaccgaactagagagcccatagaacaaactcagccgcgaacacacccccagaatcggcggaacatccatagccaagcagaacaacgcacaaccctgaagaaaccactagacacgccaaaaacccagacgaccacaaatcacgcaaacgacgcaacaaacaccacagaacacacaacccacaaccacaactacaacaagcaccccagacaacaaaccaacacaaccacaaacaagaccacaaagacaccgaaccaccaaaacgacaaccatacaatctatgctcggtaccctgttgaacagtcatttacggcaataacttcaatgttctcataa

SEQ ID NO: 28563 - DNA, 921 bp, Homo sapiens
  SIMILAR (921)..(280): 751254mologous to Escherichia coli D-mannonate oxidoreductase (EC 1.1.1.57) (Fructuronate reductase),accession number D90849,Smith-Waterman Score=810.
ttaagcccacagggaatcgtcgccatgcgcgaacgggtagcgcaaattattgcagaacgcgaatacctgattgccgcactgaaagagatcccatgcgtagagcaggttttcgactctgaaaccaactacattctggcgcgctttaaagcctccagtgcggtgtttaaatctttgtgggatcagggcattatgtgcggagcaagtttgatgagtcagaagtatctttttatcgatcgcgatggaaccctgattagcgaaccgccgagtgattttcaggtggaccgttttgataaactcgcctttgaaccgggcgtgatcccggaactgctgaagctgcaaaaagcgggctacaagctggtgatgatcactaatcaggatggtcttggaacacaaagtttcccacaggcggatttcgatggcccgcacaacctggtaccgagctagaatcgtctcaaccgaggtgactcgtaatgccagcaacgaccagtccgtttcgcgcccttgatgtatgcgaatacctgccagcatgcgttgcggtaatttctggctgccatccatcgcgatttgccaggtcttatgtttcagcgccggattagcaaaacgtgcaattaacttatccgcatattgtgttaaatcgacatctttaatttgcagtgtcggcgcttgctcatccagcattaatgttctggcggcatggcgaaatgcgcgatcctgcatgcaatcactgatatgggcgaatcctgagaggtaacccagataagcgagaaaagagtggctgccattaagcatccgcagtttcatctcttcccatggcaggacatcattcaccatttgtacacctgcgacttcccaggcaggacgcccagcgacgaagttatcttccaccacccactggataaacggttcgcagctaatcgcgca

SEQ ID NO: 28564 - DNA, 2238 bp, Homo sapiens
  SIMILAR (751)..(1824): 961254mologous to Escherichia coli Sucrose phosphorylase (EC 2.4.1.7) (Sucrose glucosyltransferase),accession number D90769,Smith-Waterman Score=1782.
atggtgaatgatgtcctgccatgggaagagatgaaactgcggatgcttaatggcagccactcttttctcgcttatctgggttacctctcaggattcgcccatatcagtgattgcatgcaggatcgcgcatttcgccatgccgccagaacattaatgctggatgagcaagcgccgacactgcaaattaaagatgtcgatttaacacaatatgcggataagttaattgcacgttttgctaatccggcgctgaaacataagacctggcaaatcgcgatggatggcagccagaaattaccgcaacgcatgctggcaggtattcgcatacatcaggggcgcgaaacggactggtcgttgctggcattaggcgttgcaggctggatgcgttacgtcagcggcgttgatgatgccggaaatgccattgatgttcgcgatccgcttagcgataaaattcgcgaacttgttgcgggcagcagcagtgaacaacgcgtaaccgccctgctttccctgcgtgaagttttcggtgatgatctgccagataacccgcattttgtgcaggccatcgaacaagcctggcaacaaatcgcgaagatgagtttttccgttgatgtgctggcgaatatcgccatcgaattgcagcgtgggattggtcaccaggatcgttttcagcgcctgatcaccacgctacgtcagtcgctactggtacgtctcgcgctcgtcgcgcagatgccggtcattcactgctccagctctaatatggccagccctgaagtgttgctggcgatggtggatgttttactctgttaccttgcgaaaggtgctgagtatgtccgcctggatgccgttggctttatgtggaaagagccgggaacaagctgcatccatctggaaaaaacacatctgattatcaaactgttacggtcgattattgataacgttgcgccaggtacagtgatcattaccgagaccaatgttccgcataaagacaacattgcttactttggcgcaggcgatgacgaagcacatatggtgtaccagttctcgctgccgccactggtgctgcatgcggtgcaaaaacagaacgttgaggcgctttgtgcgtgggcgcaaaacctgacactaccttccagcaacaccacctggtttaacttcctcgcctctcacgatggcatcgggctaaacccgctacggggcttgttgcctgaaagcgaaatattagagctggtcgaggcgttacagcaggaaggtgcattagtaaactggaaaaataatcccgacggtacacgcagtccgtatgaaataaatgtgacctatatggatgcgttaagccgccgtgagagtagcgatgaagaacgttgcgccaggtttatccttgcccatgcgattttgttaagtttccccggtgtgccagcgatatatattcaaagtattcttggctcgcgtaatgattacgcaggtgtcgaaaaactcggatataaccgtgcgattaaccgtaaaaaatatcacagtaaagagataacccgagaactgaacgatgaagctacattaaggcatgcggtatatcatgagttgtcgcgtttaattacacttcgtcgcagccataacgagtttcatccggataataattttaccattgatacgattaattcatccgtaatgcgtattccaagaagtaacgctgatggtaattgtctgactggattgtttaatgtcagtaaaaatattcagcatgtaaatattactaatctgcatggtcgggatctgattagtgaagttgatatattggttcaatcagcatcagcccaaaaaacgccttattgcgtcatgattatggatatcgaccacttcaaaaaagtcaacgacacctgggggcatccggttggcgatcaggtgataaaaacagtggtgaatatcattgggaaaagcatacgaccagatgaccttttagcgcgcgtcggcggcgaagagtttggcgtcttgctgacggacatcgatactgaacgtgcgaaagctttagcggaaaggattcgggaaaatgttgagcgtttaactggcgataatcctgaatacgctataccacaaaaagtgacgattagtattggcgctgttgtgactcaggaaaatgcgttaaacccaaatgagatctatcgactggctgataacgcactttacgaggcgaaagagaccgggcgtaataaggtggttgtgagggatgtggtgaatttttgtgagtcaccataa

SEQ ID NO: 28565 - DNA, 378 bp, Homo sapiens
  SIMILAR (374)..(3): 921254mologous to Escherichia coli gyrase B (AA 1- 804),accession number X04341,Smith-Waterman Score=595.
agcggatagtcagtatccacaccgtgggtacgcacgcgaacaatcggctcgaacaggttttgctcagcattggtgtgaacatcaaacttccactggctgccgtgctgttctttgtcgttcagttcgctgaccagcgcgttcacccagcgggtaacggtctgctcatcagaaaggtcagcttccgtcaacgtcggctgatagataagctctttcagcattgctttcggataacgacgctccatacgattgatcattttctgcgtcgcgttgtactcagataccagtttctctaacgcttcgccagccaatcccggtgcattggcgttggtgcgcatcattgcgctgtccagagcgatatacctgtggtactgatctcga

SEQ ID NO: 28566 - DNA, 963 bp, Homo sapiens
  SIMILAR (963)..(268): 871254mologous to Escherichia coli No definition line found,accession number U00039,Smith-Waterman Score=991.
ggttctttctgcgtgacgctggttgcgattctgctgatgccgaaactgggtctgaccgatgcgccaaatgcacagttccttggtgtctacctgggtctgtggggcgtatttacgctgtttatgttcttcggcacgctgaaaggcgcacgcgttctgcaattcgttttctttagcctgaccgtgctgtttgccctgctggcgatcggtaacattgccggtaacgccgcaatcatccactttgccggctggattgggctgatctgcggtgccagcgcaatctatctggcgatgggtgaagtactgaacgagcagtttggtcgcaccgttctgccgattggtgaatcccactaattgttttgagatcccccgcagtttaccgctggtcatctcgacctgtggctgtaaccaaatagcaaactgatgattttccagtgcattaaggatatcgctctcttccgtcaaccgcttctgggcggcttccatctgctgcggatcaaagaactgaatctgattcttgcctttatggcgagcggtaaatgccgcagaaatagcgcgactgtaaagctgttcggcggtgagatcgccgtagaacatcgccacgccaatgctacagtgcggacggagttgaatacgttcaatcggcaggcgctcgctcatgatagtgagcacttgctgacctaaggtgattgcgtgccacggttcctgtacaccgttggcaatgacagcaaagtcataaccgctaatctgcgcgaggatcatacgtggcgacagtaccgatttgagtttttccaccagcgtcagcagcagaatttctcgttgcgcctctttcagcacgcccgcagtatcacgcagggtttcacaggtgatgatcatcagcgcggtggtttgtttacgcgcgacaacctgctccagcatctccatcagcaaggctttgttcggcaaatccgacaccgggaagcgcat

SEQ ID NO: 28567 - DNA, 943 bp, Homo sapiens
  SIMILAR (751)..(2): 791254mologous to Escherichia coli O157:H7 putative transport protein,accession number AE005497,Smith-Waterman Score=938.
tcaggcgattgcgcgcatcaggatgtatcgataaattaccgtctggttagtgatatgcacgccctgcacggtgagatccagcaccaggattccgataatcaacgccagtacggaagtgtgaccaaaccagatcgccagccatgaaagtaatagcagcagcagaccgaaagttgtggtgtggtgcgatttgccccttatcggcaaaaccgcccgccggacgagcgcccaacgctccggcagctcccgcaagtccaaacagaccaatgacaccatcgctgtagttaaaaggtggagcggcaagcaaaaaggccattgaggtccagagaatgctgaaattggcaaaggtcaggcagcccagcaacgcgcgggtacgcagaattttatcgctgataaacatactgaaaacggaacccaacaactgtgggtagttgaggtgggtttctgatttcatttgtggcagaccacgccataatgccagcgccatcagtgccattaacaccgaagcaacccaaaagacggtgcgccagccgccgagattcgccagcaatccggcaactgtccgtgccagcaagatccccaacagcagaccgctcataatagtgccaaccactttgccgcgtttatccggtgaagccagcgtcgctgccagcggaaccagaatttgtgccacgactgagaataaaccggttaatgccgtaccgaggatcatcatcgccagcgactgactgctggcggtaatcaacatgccgccagtaaggtcttcgagatagcgatcggcaggcgtcagcgcatcagaggcaggcagcccttcaatcatctcgggttccggttctgcctcgatcatctcatccagttttaattcatacgggtccagctcatagcagagatcgacttcgatcatcagttcgtctggattagggttttgaattttctgattgagcat

SEQ ID NO: 28568 - DNA, 525 bp, Homo sapiens
  SIMILAR (523)..(335): 981254mologous to Escherichia coli GlgS,accession number Z11885,Smith-Waterman Score=337.
gggtgcggcctgttctgagcagtttaatattttagggagttttttcactacggatattttgagtgattatagccatctggatataggtaatggtctgctattgaagatatttcataacgatggaacagcaacggaatttaaccgcttctcacaatttgcttctttttcatcgtctagtgcgccttcggtcaccgcaccattcagggcagaactgagtgcgaacccggcagaaacggttgttgagggaccgtttagtaaagacgtaatcctgaaaatcacctataactagtatctaatacaaacactaaaacgggccatcaggcccgttatatcagtgctctaactccagctctcttgcctgcatcatctgttgacaataccaggcataacgtgcgcaaaaccaggttctatgttcttcatccatgttaccagtaacggccagaatatcgaccgggcgaccttctgcgtgcattctggcaaaactacccgccaggaaatcgaaattatttaaagaattaagactat

SEQ ID NO: 28569 - DNA, 1665 bp, Homo sapiens
  SIMILAR (988)..(1647): 961254mologous to Escherichia coli similar to B. stearothermophilus N-carbamyl-L-amino acid amidohydrolase,accession number U82664,Smith-Waterman Score=1122.
atgcaagctttggcgcagacccagcccttgtttgtcctgaacgggcagatcaacatccctgaagggcgcttccatgcctatggtcaggatctgatctatgacgactatcgtttcctggaaaaactctctcgcgaagtcggttctcatttccacgccctggaccgcaccacgctgtacaccgccaaccgtgatatcagctactacacggtgcatgaatccttcgttgccaccattccgctggtgttctgcgaagcggagaaaatggaccccaatacccagttcctgaaagtgatgatgattgatgaacccgccatcctcgaccaggctatcgcgcgtattccgcaggaagtgaaagagaaatataccgtgctgaaaagtgcgccgtacttcctcgaaatcctcgataaacgcgttaacaaaggtacgggggtgaaatcactggccgacgtgttaggtattaaaccggaagaaatcatggcgattggcgatcaggaaaacgatatcgcaatgattgaatatgcaggcgtcggtgtggcgatggataacgctattccttcagtgaaagaagtggcgaactttgtcaccaaatctaaccttgaagatggcgtggcgtttgctattgagaagcctgataagcgtagcgcatcaggcacgctcgcatggttagcgccattaaatatcgatattcgccgctttcagggcgttctcttcaataaacgcacggcgcggttcaacggcgtcgcccatcagcgtggtgaacaactggtcggcagcaatcgcatctttaacgttaaaaatgtgaactccgtcattacacaaaaagtgtcatctggcgttacactttatgcggatactaaaacaggaggttttatgaacagaacgattcttgtccctatcgatatttccgattcagaattaactcaacgcgtgattagccacgttgaggaagaggcaaagattgatgatgcagaggttcatttcctgacggatattaaagcctttgttgaactgcatattgaacagggctgtgtgctggaaagtaatgggcaatcaattggcgtggtgaatgcaattgtcgggcagcgtcgttatacggtaacgctgaacggcgaatcaaaccatgcaggcaccacgccgatgggttatcgtcgtgatacagtttacgctttcagtcgcatttgccatcagtcggtcgaaaaagcgaaaaggatgggcgatccgctggttctgacctttggcaaagtagagccgcgcccgaatacggtaaatgtggtgccgggtaaaaccacgttcaccattgattgtcgtcataccgacgctgccgtgctgcgcgatttcacccaacagttagaaaacgacatgcgggcgatttgcgatgaaatggacattggtattgatatcgatttatggatggacgaagaacccgtgccgatgaataaggagctggtcgccaccctgacagaattgtgtgaaagagaaaaactgaattaccgggtgatgcacagtggtgccgggcacgacgcgcaaattttcgcgcctcgcgtaccaacctgcatgatttttatccccagcatcaacgggatcagccataacccggcggaacgcaccaatattaccgacttgggtaccgagatcgagtgtgtatcaaatgacttcaggagttaa

SEQ ID NO: 28570 - DNA, 2637 bp, Homo sapiens
  SIMILAR (688)..(1164): 981254mologous to Escherichia coli K12 putative epimerase,accession number AE000500,Smith-Waterman Score=829.
tccgcccttttcttatacctttttgccggatgcggcgtgaacgccttatgcggcctacaaaatcatgaaaattcaatacattggaagaatttcgcaggcctgataagcgtagcgcatgacgcacgctcgcatggttagcgccattaaatatcgatattcgccgctttcagggcgttatcttcaataaacgcacggcgcggttcaacggcgtggcccataaacgtggggaacaactgggcggcagcaatcgcatctttaacggggacgcgcagcatacgacgactttccgggtccatagaggtttcccacagatgttccggggtcatctcgcccagacctttataacgctggatggagaggccgcgacgggactctttcaccaaccagtccatcgcctgctcgaagctggctaccggctgacgacgctcgccacgttcgataaacgcatcttctttcagcaagccacgcaggtactcacccagggggcagatacgacgatattcgccaccgggggataaactcgtgatccagcggatagtcagtatccacaccgtgggtacgcacgcgaacaatcggctcgaacaggttttgctcagcattggtgtgaacatcaaacttccactggctgccgtgctgttctttgtcgttcagttcgctgaccagcgcgttcacccagcgggtaaccgtccttctctcgccagcgcaaatcctctgcactatggacgtgagctgacggcattggacaatctggattttgggagcctgcatctggatattgaggacagcagcttcattaacaacattacgtttgggatgaaaacggtgcaggccgtcgccagacagacgcctcatcccttgtcctttcatttcatgcttgcccggccacagcgctggtttaacgcgctggctgaaatcagacccgcgtggatcttcgttcatgcagaaacgctggactatccttcggaaacgttaactgagatccgccataccggcgcacgagccggactggtatttaatccggcaaccccgatcgacgcctggcgatatctggcgtctgagctggacggagtgatggtgatgaccagtgagcccgatgggcagggtcaacggtttattccctccatgtgcgagaacatccaaaaagtacgcccggcttttccgcagaaaccggtagatgaaaaccgctggtgcattaaccgcctgattttgcatccgttacgcaatattgctcgcgaacttaacgccatcccagccaaggagcttgttggtcaccaactggcattaccgcgtctgcatcaggacgatgaaatcggtatgttggtgcgcagttacaacctcaaccagcaattgctgcagcgccattatgaagaacagaacgaaaatgcgatgcgcttcccggtgtcggatttgccgaacaaagccttgctgatggagatgctggagcagattggctacaaaaagcccgcagtctgtagtggcggtcctgaaccgcaattatcagtaacttttccagtacgagtgcagctatatattaagctagctaaaaatgccaataaagtaaataaaaaacttgtattacctgacgaatatatagcacttgaatttaaaggtatgagcggagcaggtgctatagaagtagataaaaatctgaccttcaggattcgcggattaaataacattcatgtccttgactgctttgttaatgttgatctggaaccagctgatggcgttgtcgactttggtaaaataaattcccgaacaattaaaaataccagcgtgagtgagacgtttagcgtagtcatgaccaaagatccgggtgcggcctgtactgagcagtttaatattttagggagttttttcactacggatattttgagtgattatagccatctggatataggtaatggtctgctattgaagatatttcataacgatggaacagcaacggaatttaaccgcttctcacaatttgcttctttttcatcgtctagtgcgccttcggtctccgcaccattcagggcagaactgagtgcgaacccggcagaaacggttgttgagggaccgtttagtaaagacttaaaaggtggagcggcaagcaaaaaggccattgaggtccagagaatgctgaaattggcaaaggtcaggcagcccagcaacgcgcggttgaggtgggtttctgatttcatttgtggcagaccacgccataatgccagcgccatcagtgccattatttcctatgcgatgaacttctccgctgatgcgtttatgcgccagatcagccgtgcgcgtacgttcggtttcatgcgtgatatcgaatatctgcagtcccgtggtttgtgcctgggcggcagcttcgattgtgccatcgttgttgacgattatcgcgtactgaacgaagacggcctgcgttttgaagacgaatttgtgcgtcacaaaatgctcgatgcgatcggtgacttgttcatgtgtggtcacaatattattggtgcatttaccgcttataaatccggtcatgcactgaataacaaactgctgcaggctgtcctggcgaaacaggaagcctgggaatatgtgaccttccaggacgacgcagaactgccgttggccttcaaagcgccttcagctgtactggcataa

SEQ ID NO: 28571 - DNA, 1052 bp, Homo sapiens
  SIMILAR (146)..(952): 1001254mologous to Escherichia coli similar to,accession number D90863,Smith-Waterman Score=1350.
ctttaccgccatcaggcgatggttgcggggcagaactgcaaagctggtttgaacctccaaaaccgggaacaacaaagcctgagaagaagacaccgcctccgttgccgccttcctgccaggcgctactggatgagcacgtgatctaatggaaacgtttaatagcctgtttatggtttccccgctgttgctgggagttctcttttttgtcgccatgctggcgggatttatcgactcgattgccggtggcggtgggttactcaccattccggcattgatggcagcggggatgtctcccgctaatgcgctggcaaccaataaactgcaagcctgcggcggctctatttccgctactatctactttattcgccgcaaagtggttagtttaagcgatcagaaactcaatatcgccatgacctttgtcggctcaatgagcggcgcactgctggtgcaatacgttcaggctgatgtcttacggcagattttgcccattctggtaatttgtatcggcctctatttcttgctgatgccaaagctaggtgaagaagaccgccagcgccggatgtacggtttacccttcgcgttaatagccggtggctgcgtcggtttttatgatggattctttggcccggctgccgggtcgttttacgcgctggccttcgttacgctgtgcggatttaacctcgccaaagccacggctcacgccaaattactcaacgcaacgtcaaacatcggcggtttactgctgtttattctcggcggcaaagtgatttgggcgacgggctttgtcatgctggtggggcagttcctcggcgcgcgcatgggttcacgactggtgttgagcaaaggacaaaagctgatccgcccgatgattgttatcgtctcggcggtgatgagtgccaaattactttacgacagccacggacaggagatcctccactggttggggatgaactaatgaacagtacacaccactacgagcagttgattgaaatttttaatagctgctttgccgatgattttaatacccgtcagattaaaggcgacgacgaacc

SEQ ID NO: 28572 - DNA, 1611 bp, Homo sapiens
  SIMILAR (1045)..(1380): 991254mologous to Cloning vector pZC320 SopA,accession number U26464,Smith-Waterman Score=571.
ctagaggatcccctcttcagcacgtcgcaatcgcgtaccaaacacatcacgcatatgattaatttgttcaattgtataaccaacacgttgctcaacccgtcctcgaatttccatatccgggtgcggtagtcgccctgctttctcggcatctctgatagcctgagaagaaaccccaactaaatccgctgcttcacctattctccagcgccgggttattttcctcgcttccgggctgtcatcattaaactggagagaaagtgtatgacgacaaaggaagactgaaggaactaggccccaaacagaaagcttagcatcccgaggatctagaggatcccttcttttatttctcaacaagatggtgaattgactagtgggtagatccacaggacgggtgtggtcgccatgatcgcgtagtcgatagtggctccaagtagcgaagggacaggactgggcggcggcaaagctgtcggacagtgctccgagaacgggtgcgcatagaaattgcatcaacgcatatagcgctacatgcacgccatagtgactggcgatgctgtcggaatggacgatatcccgcaagaggcccggcagtaccggcataaccaagcctatgcctacagcatccagggtgacggtgccgaggatgacgatgagcgcattgttagatttcatacacggtgcctgacgtcgacagcgacacacttgcatcggatgcagcccggttaacgtgccggcacgggctgggtaaccaggtattttgtccacataaccgtgcgcaaaatgttgtggataagcaggacacagcagcaatccacagcaggcatacaaccgcacaccgaggttactccgttgctggatagtctgatcgacaatacaagtgggaccgtggtccagaccgataatcagaccgacaacacgagtgggatcgtggtccagactaataatcagaccgacgatacgagtgggaccgtggtcagaactaataatcagaccgacgatacgagtggggacgttggttcccctgcaggtcgactctagaggatcccctttgatgaaggtaaactgcccaccgatccacacctgatgctccgactggccattgaaactgatgctcatgactatgatgtcatagttattgacagcgcgcctaacctgggtatcggcacgattaatgtcgtatgtgctgctgatgtgctgattgttcccacgcctgctgagttgtttgactacacctccgcactgcagtttttcgatatgcttcgtgatctgctcaagaacgttgatcttaaagggttcgagcctgatgtacgtattttgcttaccaaatacagcaatagtaatggctctcagtccccgtggatggaggagcaaattcgggatgccggttgaagatacttcgttatcgacaccagctgccccgatggtggattcgttaattgcgcgcgtaggagtaatggctcgcggtaatgccattactttgcctgtatgtggtcgggatgtgaagtctactcttgaagtgctccggggtgatagtgttgagaagacctctcgggtatggtcaggtaatgaacgtgaccaggagctgcttactgaggacgcactggatgatctcat

SEQ ID NO: 28573 - DNA, 589 bp, Homo sapiens
  SIMILAR (98)..(589): 501254mologous to Drosophila melanogaster BcDNA.GH03108,accession number AF145613,Smith-Waterman Score=455.
  misc_feature (1)...(589): n = a,t,c or g
cggccgcccgcccggtcgggcgatgaagtgtcactatgaggcgctgggggtgcggcgcgacgccagcgaggaggagctcaagaaggcctatcggaagctggccctgaaatggcacccggataaaaatctggataatgccgcagaagcagctgaacaatttaaattaatccaagcagcatatgatgtgttgagtgaccctcaggaaagagcatggtatgataatcatagagaggccctacttaaaggtgggtttgatggcgaatatcaagatgacagcttagatttgctacgctatttcaccgttacctgttattctggttatggagacgatgaaaagggattttacacggtgtatcgtaatgtttttgaaatgattgccaaggaagaactanaatctgtgttanangaagaggttgatgatttcccaacttttggagactcccagagtgactatgatacggtagtccatcctttctacggttattggcagagtttctacactcaaaagaattttgcatggaaggaagaatatgatacacgacaggcttcaaaccgctgggaaaaacgagccatggaaaaaaaaaaaaaa

SEQ ID NO: 28574 - DNA, 804 bp, Homo sapiens
  SIMILAR (1)..(564): 1001254mologous to Homo sapiens cell cycle checkpoint protein,accession number AJ004974,Smith-Waterman Score=965.
atgccccttctgacccaacagatccaagacgaggatgatcagtacagccttgtggccagccttgacaacgttaggaatctctccactatcttgaaagctattcatttccgagaacatgccacgtgtttcgcaactaaaaatggtatcaaagtaacagtggaaaatgcaaagtgtgtgcaagcaaatgcttttattcaggctggaatatttcaggagtttaaagttcaggaagagtctgttacttttcgaattaatttaactgtccttttagactgtttatctatttttggatcaagtcctatgccagggactttaactgcacttcgaatgtgttaccaaggttatggttaccctttgatgctgttcctggaagaaggaggagtggtgacagtctgcaaaatcaatacacaggaacctgaggagaccctggactttgatttctgcagcaccaatgttattaataaaattattctgcagtcagaggggctccgtgaagcattttctgaattggatatgacgagtgaagtcctacaaattaccatgtctcctgacaagccttatttcagtgttcctaaacccaaaggaaagaaaaccaaagatatgaaaaaacctgtcagagtacctgctgaaccacaaacaatgagtgttcttatcagctgtacaacctgccatagtgaatttccatctcggaataaactttttgaccatctaaaggccacaggtcatgcaagagcaccttcatcatcgtctttaaacagcgcaacaagtagtcaaagcaagaaagagaaacgtaaaaacagatag

SEQ ID NO: 28575 - DNA, 499 bp, Homo sapiens
  SIMILAR (1)..(30): 1001254mologous to Homo sapiens cell cycle checkpoint protein,accession number AJ004974,Smith-Waterman Score=52.
atccaagacgaggatgatcagtacagcctgtggccagcctgacaacgttaggaatctctccactatcttgaaagctattcatttccgagaacatgccacgtgtttcgcaactaaaaatggtatcaaagtaacagtggaaaatgcaaagtgtgtgcaagcaaatgcttttattcagatcatagaagaagatgctgctcttgtagaaataggacctcgttttgtcttaaatctcataaagattttccagggaagttttggaggactagctttatatgaaaatcctcactaccagtccccaaacatggtagtccatcctttctacgcttattggcagagtttctgcactcaaaagaattttgcatggaaggaagaatatgatacacgacaggcttcaaaccgctgggaaaaacgagccatggaaaaagaaaacaaaagattcgggacaaagcaaggaaagagaagaatgagcttgtccgtcagctgtagctttcattcgtaa

SEQ ID NO: 28576 - DNA, 917 bp, Homo sapiens
  SIMILAR (93)..(332): 1001254mologous to Homo sapiens Human secreted protein, SEQ ID NO: 6891,accession number G02810,Smith-Waterman Score=409.
cttttttgcagaggcttcaaaagccaagaattcgggctcctagcaatgaaagtccagtgagtgtagtcaacgagtttccggaagaggtgagcatgaagaatcacgagaagtcaaagaagcatcgggaaatggtggccttgctaaaacaacagctggaggaggaagaagaaaatttttcaagacctcaaattgatgaaaatccattagatgacaattctgaggaagaaatggaagatgcaccaaaacaaaaagtcaagtatttgacatttcgatttatatttgctcttaggctttctaaaaaacagaagaaaaagaaacagaaaccagcacagaattatgatgacaatttcaatgtaaatggacctggagaaggagtaaaggttgatccagaagatactaacttaaatcaagacagtgccaaagaattggaagatagtccccaggaaaatgtcagtgtcacagagatcattaaaccatgtgatgatccaaaaagtgaagctaaaagggatgctattcagtcatgtgacaccaagaatgccatgcatgctgaccacttccaactctctttttttgtcccaggcccaccttctgtgagtacctttctccagatccacacacacagggctgcctactgcatatgtgcaaaagacactgacgtggaccctgcagattcccttttaagaaaggacttgttgccccagcagcaggcggtagacaatctactggccacagcagctgctgtcacattcttctacagtgtttgtaacaaggggactggccagtctctgactgtacactcgctggtacagggagctaaccacatcctgataccgattccattgttggatggaacggttgggaattctgcttcacaatatgctgagataactgtaacctttggactcacaaaagtatga

SEQ ID NO: 28577 - DNA, 590 bp, Homo sapiens
  SIMILAR (3)..(416): 711254mologous to Homo sapiens cell cycle checkpoint protein,accession number AJ004974,Smith-Waterman Score=462.
ggactttaactgcacttcgaatgtgttaccaaggttatggttaccctttgatgctgttcctggaagaaggaggagtggtgacagtctgcaaaatcaatacacaggaacctgaggagaccctggactttgatttctgcagcaccaatgttattaataaaattattctgcagtcagaggggctccgtgaagcattttctgaattggatatgacgagtgaagtcctacaaattaccatgtctcctgacaagccttatttcaggtatgataatcatagagaggccctacttaaaggtgggtttgatggcgaatatcaagatgacagcttagatttgctacgctatttcaccgttacctgttattctggttatggagatgatgaaaaggtagacaatctactgcccacagcagctgctgtcacattcttctacagtgtttgtaacaaggggactggccagtctctgactgtacactcgctggtacagggagctaaccacatcctgataccgattccattgttggatggaacggttgggaattctgcttcacaatatgctgagataactgtaacctttggactcacaaaagtatga

SEQ ID NO: 28578 - DNA, 1930 bp, Homo sapiens
  SIMILAR (211)..(1632): 391254mologous to Drosophila melanogaster BcDNA.GH03108,accession number AF145613,Smith-Waterman Score=830.
atgaagtgtcactatgaggcgctgggggtgcggcgcgacgccagcgaggaggagctcaagaaggcctatcggaagctggccctgaaatggcacccggaggagtttggactggatcgtagaggaatgcaatttggaaaagtgaactcaacagtatggaggatagcatggtggaggacaaaagatgttccgggggacagtttgactgaaggtgataaaaatctggataatgccgcagaagcagctgaacaatttaaattaatccaagcagcatatgatgtgttgagtgaccctcaggaaagagcatggtatgataatcatagagaggccctacttaaaggtgggtttgatggcgaatatcaagatgacagcttagatttgctacgctatttcaccgttacctgttattctggttatggagatgatgaaaagggattttacacggtgtatcgtaatgtttttgaaatgattgccaaggaagaactagaatctgtgttagaggaagaggttgatgatttcccaacttttggagactcccagagtgactatgatacggtagtccatcctttctacgcttattggcagagtttctgcactcaaaagaattttgcatggaaggaagaatatgatacacgacaggcttcaaaccgctgggaaaaacgagccatggaaaaagaaaacaaaaagattcgggacaaagcaaggaaagagaagaatgagcttgtccgtcagctggtagctttcattcgtaaaagagataaaagagtgcaggcgcatcgaaaacttgtggaagaacagaatgcagagaaggcgaggaaagccgaagatatgaggcggcagcagaagctaaagcaggccaaactggtggagcagtacagagaacagagctggatgactatggccaatttggagaaagagctccaggagatggaggcacggtacgagaaggagtttggagatggatcggatgaaaatgaaatggaagaacatgaactcaaagatgaggaggatggtaaagacagtgatgaggccgaggacgctgagctctatgatgacctttactgcccagcatgtgacaaatcgttcaagacagaaaaggccatgaagaatcacgagaagtcaaagaagcatcgggaaatggtggccttgctaaaacaacagctggaggaggaagaagaaaatttttcaagacctcaaattgatgaaaatccattagatgacaattctgaggaagaaatggaagatgcaccaaaacaaaagctttctaaaaaacagaagaaaaagaaacagaaaccagcacagaattatgatgacaatttcaatgtaaatggacctggagaaggagtaaaggttgatccagaagatactaacttaaatcaagacagtgccaaagaattggaagatagtccccaggaaaatgtcagtgtcacagagatcattaaaccatgtgatgatccaaaaagtgaagctaaaagtgttcctaaacccaaaggaaagaaaaccaaagatatgaaaaaacctgtcagagtacctgctgaaccacaaacaatgagtgttcttatcagctgtacaaccttgcatagtgaatttccatctcggaataaactttttgaccatctaaaggccacaggtcatgcaagagcaccttcatccatcgtctttaaacagcgcaacaagtagtcaaagcaagaaagagaaacgtaaaaacagatagagattctgcctgtgcttttgtttgactgtctctagattttgaaaccaaaaaactgaactgaaatcatctaaagagttaaaatttcagtgatctgcaattaattacattgtggaagattattttttatcttgtaaaaacacttttttggtttaatatatatttttaaaacatttcactagtgattgaattctacttttgccatctgaattgacttgaatg

SEQ ID NO: 28579 - DNA, 525 bp, Homo sapiens
  SIMILAR (40)..(282): 971254mologous to Escherichia coli nirD,accession number U18997,Smith-Waterman Score=407.
atgcctctggatacggggatctctgattatgagtccgaacttagtgacgagcaggtcgcgatttgccgcccgtatcacagcgatcaggtgtttgcgatcagcaacatcgacccgttcttcgagtccagcgtgctgtcacgcggactgattgcggaacaccagggcgagctgtgggtcgccagcccgctgaaaaaacagcgttttcgcttaagcgacggcttgtgcatggaagacgaacagttttccgtcaaacattacgaagcgcgagtgaaagacggcgtggataatcaaatgtttacagacactattaataagtgtgcggctaacgctgcgcgcattgcacgcctgtcggcaaataacccgctcggcttttgggtcagctccgccatggcgggcgcgtatgtgggtcttgggatcatcctgattttcacgctcggtaatttgctcgatccatccgtacgccctcttggtgatgggcgcgacctttggtatcgccttaacgctggtgattatcgccggttctga

SEQ ID NO: 28580 - DNA, 3114 bp, Homo sapiens
  SIMILAR (1278)..(226): 931254mologous to Escherichia coli rpoC,accession number V00339,Smith-Waterman Score=1734.
ttatggataattggttggttggttggttggtttgaagtcaggatctagctctggcccccaagttgtgttggtagacatcatcagcgcacgcgcttccagctgggcttccagcgtcagcggtacgtgaacagccatctggtcaccatcgaagtcggcgttatatgccgcacaaaccagcgggtgcagctggatagctttaccttcgatcattaccggttcaaatgccattttcttcgcagctttaatggtggtagcaagaccacgcagttccagcttgccgtagatgaacggtttgaacagctccagtgccattttcttcggcagaccgcactgatgcagacgcaggtatggaccgagcaggttctgacggaaacgaccctgtttacctttgatcatgtcggccaaagatttcagaggacgcttgttagaaccggtgatcgcacgaccgcgacgaccgttatccagcagggcgtctaccgcttcctgcagcatacgtttttcgttacgtacgatgatgtccggcgcagccagatccagcagacgtttcagacggttgttacggttaatgacgcgacgatacagatcgttcaggtcagaagtcgcgaaacgaccaccatccagcggaaccagcggacgcagatctggcggcagtaccggcagaacggtcaggatcatccactctggtttgttaccagactgaacgaacgcttccagcagtttgatacgcttggtcagctttttacgcttggtttcggagttggtttcgttcagctcttcacgcagctgttcgcactcttgctccagatccatgctcttcagcagagcctggattgttccgcccccatcgaactcttccagcgcgtccagatactgctcttcagtcaggatctgctgacgttccaggttggtcataccgccttcgataaccacataggattcaaagtacagtacgcgttcgatatcgcgcagcggcatatcgagcagcagaccgatacgggacggcagcgatttcaggaaccagatgtgcgcagtcggggaagccagttcgatgtggcccatacgctcacggcgtactttagtctgggtcacttcaacgccgcacttctcacagatgacgccacggtgtttcaggcgcttgtacttaccgcacaggcactcgtaatcttttaccggcccaaagatacgggcgcagaaaaggccgtcacgttctggtttgaacgtacggtagttgatggtttccggctttttaacttcaccgaaagaccatgaacggatcatagttgcgaagccagagcaattttggaagctacggcaagttatgtttatggcgatcgtaatcagtttaccgacgattggcgaacgtttttccccatttctcttgaagagtcccttgattaggcccagcaggtgcggtacaacagattttatctccggattaaccgcgcgaccggaattttcgcagtcgagaatggtactgatagcagcttcgacgataacatcgttgatgtgcgccggatcgtttttgccaatccgcccattggcatcgatttgcagcttaaacgccaccacatcctgatagctgccgttttccagcggtagagattcatcgaggaaacgccgaacccaggcgataacctgctcaccgcgttgcggatcgtagccgctgaccatcgccccttcctgcgggatgatgtcgctgccgtataacgcatcgtacagtgagccccagcgagcgttcgccgcgttcagcgcgtagcgggcgttcattgccggaaccaccagctgcggccccgcctggctggtgatttcgctgtcaatgcccgtggtttccaccgtcacgcgctccggttgcggcaccaggtagcccagttcacgcaggaaagatttataggccgctttatcttttaccggccccggattgctgcgatgccactcatcaagcgctgcctgaatgcgatcgcgttctgccagcaactgacgattttctggtgccagatcatgaacgatctcatcaaaattgcgccagaacgccgcagcgtccagccctgttcccggtaaaacttcttcatccacaaaacgtttaaaattggcgtcaatgcgtaaacggctctgcgcatcctgtgctccggttaaaccagaaacgcccacggcaccaataatttgcccatccacaacaaccggtacgccgccttccagcgacgttaataacggcgcagtcacgaacgcggtacgtccgttgttcaccatctcttcatagcccttagtttcacgacgctccagcgcggcggtaccgcttttctcctggctgtcgagcagttttgctgcccgtccagagcgatatcgtcgagcaggatttggcggcgccaatcgccacggtgggataatccgccagtcgctcaacatgccgtgccagctgttccagccctgcggtgcagaaggcatctgtttggtttgcgtcgggaacacatgtcccagcgcgatataagaggggcgtgctgccagcgcgacgtcgatttccatatcgtcatgtgtcgaaacgcccagccgcaggcctgccgcgcggatggcattgagatcggtggcttgcaaatcttcctgccccaaatggacgccatacgcctgatgcttgatcgccagccgccagtaatcgttgataaacaatcgcgcgttatagcggcggcccagcgcaattgccgccacgacatcggcttccacctcttcatcgcgccgatctttgatgcgtagctggagagtacgtacgcctgcatccaacagacgttcgatccactgtacgctgtccaccaccgggtacagtcgcaggtagatttctccgcctctggcacggaagttctccgacatatccgccattcccatttcaatagtttgcgtggcggcgtaatcacgcacttcctggctgattttcatcgagcagaatttcggcccacacatggagcaaaaatggcgactttcatcggttcgttccccatccccgggcaataagggcgcgtgcgctatccacttttttgcccgtccatattcaacggcttctttgaggagttcattttccatcgttttcttgccgagcaggcgctggagttctttaatctgcttcat

SEQ ID NO: 28581 - DNA, 230 bp, Homo sapiens; identical to SEQ ID NO: 18638
  SIMILAR (73)..(165): 381254mologous to Proteus vulgaris frdB (AA 1-245),accession number X06144,Smith-Waterman Score=70.

SEQ ID NO: 28582 - DNA, 1086 bp, Homo sapiens
  SIMILAR (412)..(1077): 1001254mologous to Escherichia coli NADH dehydrogenase I chain nuoL,accession number D90859,Smith-Waterman Score=1125.
atgccggtgatgtttctggcgagtctaagcggaaaacatcagggtcatcactttccgaaaggagaaaggggaaaatttaagataaaggagaggggtaccgtggctacagaagaccgacggtcaggtgatagtacattctacgccatacagcctacgcggcggcagaagcgagtatacggccttgcgctgctgctgcaacttcaccgtcgtcgccagaacctgaacatcgattcagtaagctctgtgggcctggcggcgctggtaaccgcctttatcggcgttgatttcttcgctaacggcgagcagacatacagccagccgctgtggacgtggatgtcggtaggcgactttaacatcggttttaacctggtgctggacggcctgtcgctgaccatgctctcggtggtcactgagggctactctcgcttcttcgcttacaccaacctgttcatcgccagcatggtggttctggtgcttgccgacaacctgctgctgatgtacctcggctgggaaggcgtgggcctgtgctcctatctgctgatcgggttctattacaccgatccgaagaatggcgcagcggcaatgaaagcgttcgtcgtgacccgtgtgggtgacgtgttcctcgctttcgcactgttcattctttacaacgaactgggcaccctgaacttccgcgaaatggtggaactggcaccagcgcactttgctgacggcaataacatgctgatgtgggcgacgctgatgctgctgggcggtgcggtcggtaaatctgcgcagttgccgttgcagacatggcttgccgacgcgatggcgggcccgacgcctgtctccgcgctgatccacgccgcaaccatggtaaccgcgggtgtctacctgatcgcccgtacccacggcctgttcctgatgacgccggaagttctgcatctggtgggtattgtcggggcggttacgctgctgctggccggttttgccgcgctggtacagaccgacatcaaacgtgttctcgcttactctaccatgagccagattggctacatgttcctcgcgcttggcgtgcaggcatgggatgcggcgatttccacttga

SEQ ID NO: 28583 - DNA, 1574 bp, Homo sapiens
  SIMILAR (283)..(969): 1001254mologous to Homo sapiens 07-JUN-1995 Human AL-1 cDNA,accession number T18897_cd1,Smith-Waterman Score=1235.
gcttctctccatcttgtgattcctttttcctcctgaaccctccagtgggggtgcgagtttgtctttatcaccccccatcccaccgccttcttttcttctcgctctcctacccctccccagcttggtgggcgcctctttcctttctcgccccctttcatttttatttattcatatttatttggcgcccgctctctctctgtccctttgcctgcctccctccctccggatccccgctctctccccggagtggcgcgtcgggggctccgccgctggccaggcgtgatgttgcacgtggagatgttgacgctggtgtttctggtgctctggatgtgtgtgttcagccaggacccgggctccaaggccgtcgccgaccgctacgctgtctactggaacagcagcaaccccagattccagaggggtgactaccatattgatgtctgtatcaatgactacctggatgttttctgccctcactatgaggactccgtcccagaagataagactgagcgctatgtcctctacatggtgaactttgatggctacagtgcctgcgaccacacttccaaagggttcaagagatgggaatgtaaccggcctcactctccaaatggaccgctgaagttctctgaaaaattccagctcttcactcccttttctctaggatttgaattcaggccaggccgagaatatttctacatctcctctgcaatcccagataatggaagaaggtcctgtctaaagctcaaagtctttgtgagaccaacaaatagctgtatgaaaactataggtgttcatgatcgtgttttcgatgttaacgacaaagtagaaaattcattagaaccagcagatgacaccgtacatgagtcagccgagccatcccgcggcgagaacgcggcacaaacaccaaggatacccagccgccttttggcaatcctactgttcctcctggcgatgcttttgacattatagcacagtctcctcccatcacttgtcacagaaaacatcagggtcttggaacaccagagatccacctaactgctcatcctaagaagggacttgttattgggttttggcagatgtcagatttttgttttctttctttcagcctgaattctaagcaacaacttcaggttgggggcctaaacttgttcctgcctccctcaccccaccccgccccacccccagccctggcccttggcttctctcacccctcccaaattaaatggactccagatgaaaatgccaaattgtcatagtgacaccagtggttcgtcagctcctgtgcattctcctctaagaactcacctccgttagcgcactgtgtcagcgggctatggacaaggaagaatagtggcagatgcagccagcgctggctagggctgggagggttttgctctcctatgcaatatttatgccttctcattcagaactgtaagatgatcgcgcagggcatcatgtcaccatgtcaggtccggaggggaggtattaagaatagatacgatattacaccatttcctataggagtatgtaaatgaacaggcttctaaaaggttgagacactggttttttttttt

SEQ ID NO: 28584 - DNA, 969 bp, Homo sapiens
  SIMILAR (352)..(918): 991254mologous to Escherichia coli yjdB,accession number U14003,Smith-Waterman Score=1035.
atgcggacgacctgtttgacggcagcggttacgctgacgagacgggctggaatcacgcggcagagtctgcagcttgagaacagcgttccaacgatcttcgtcggaagcgttcacatcagacctgcaggcagcagagttgcaaaatcgagcttcgaatcgcccggccagaataggacacgctcatttggtcattttcccggtccagagttcttggatgtagagaaaactagcttctcccaggaacaatcttgtgattccgcaggagaaggctctgaaagaatacatcaagattgggaatctggtgatgagcttagcagcagctccactgaacagataaggtctcttaaagagtggaatgacaacgatggcggctgtaaaggtgcctgcgaccgcgtgcctcaccagaacgtcaccgcgctgaatctacgtgatcagtgcatcaacggcgaatgctatgacgaagtgctgttccacgggcttgaagagtacatcaataacctgcaaggtgatggcgtgattgtcttacacaccatcggcagccacggtccgacctattacaaccgctatccgcctcagttcaggaaatttaccccaacctgcgacaccaatgagatccagacctgtaccaaagagcaactggtgaacacttacgacaacacgctggtttacgtcgactatattgttgataaagcgattaatctgctgaaagaacatcaggataaatttaccaccagcctggtttatctttctgaccacggtgaatcgttaggtgaaaatggcatctatctgcacggtctgccttatgccatcgccccggatagccaaaaacaggtgccgatgctgctgtggctgtcggaggattatcaaaaacggtatcaggttgaccagaactgcctgcaaaaacaggcgcaaacgcaaaaagattgtgtcttattgatctttgccaaacaaccctttgacaacagataa

SEQ ID NO: 28585 - DNA, 2874 bp, Homo sapiens; identical to SEQ ID NO: 18094
  SIMILAR (2874)..(2200): 961254mologous to Escherichia coli K12 putative EC 3.5. amidase-type enzyme,accession number AE000130,Smith-Waterman Score= 1163.

SEQ ID NO: 28586 - DNA, 1245 bp, Homo sapiens
  SIMILAR (555)..(4): 1001254mologous to synthetic construct chloramphenicol acetyltransferase,accession number A02739,Smith-Waterman Score= 1014.
ttacgccccgccctgccactcatcgcagtactgttgtaattcattaagcattctgccgacatggaagccatcacaaacggcatgatgaacctgaatcgccagcggcatcagcaccttgtcgccttgcgtataatatttgcccatggtgaaaacgggggcgaagaagttgtccatattggccacgtttaaatcaaaactggtgaaactcacccagggattggctgagacgaaaaacatattctcaataaaccctttagggaaataggccaggttttcaccgtaacacgccacatcttgcgaatatatgtgtagaaactgccggaaatcgtcgtggtattcactccagagcgatgaaaacgtttcagtttgctcatggaaaacggtgtaacaagggtgaacactatcccatatcaccagctcaccgtctttcattgccatacggaactccggatgagcattcatcaggcgggccagaatgtgaataaaggccggataaaacttgtgcttatttttctttacggtctttaaaaaggccgtaatatccagctgaacggtcagatgcagaacttccggcgtcatcaggaacaggccgtgggtacgagcgatcaggtagacacccgcggttaccatggttgcggcgtggatcagcgcggagacaggcgtcgggcccgccatcgcgtcggcaagccatgtctgcaacggcaactgcgcagatttaccgaccgcaccgcccagcagcatcagcgtcgcccacatcagcatgttattgccgtcagcaaagtgcgctggtgccagttccaccatttcgcggaagttcagggtgcccagttcgttgtaaagaatgaacagtgcgaaagcgaggaacacgtcacccacacgggtcacgacgaacgctttcattgccgctgcgccattcttcggatcggtgtaatagaacccgatcagcagataggagcacaggcccacgccttcccagccgaggtacatcagcagcaggttgtcggcaagcaccagaaccaccatgccagtgaccaccgagagcatggtcagcgacaggccgtccagcaccaggttaaaaccgatgttaaagtcgcctaccgacatccacgtccacagcggctggctgtatgtctgctcgccggtagcgaaaaaatcaacgccgatgaaggcgggtaccaccgccggcaggcccacagagcctacgccgacgatcgcgacttcaggcttgaatgcccttttgggcga

SEQ ID NO: 28587 - DNA, 1179 bp, Homo sapiens
  SIMILAR (1083)..(319): 991254mologous to Escherichia coli NADH dehydrogenase I chain nuoL,accession number D90859,Smith-Waterman Score=1305.
ttaggctcttacaaggcactcagcttccacagccaccctggaacctgcgtaacaccagccactgccaccagtgatgcagggtaatctggcagctgcagctagcagctggacgtcacatgtggtaccccgggtaggtaattcacatccacaggccagggcagcacagacctccaccttcagtgagtgccccttcaaaccaacgagaccaacagttgtaggcagagcgagaggttctggtgccctgctacttgtgcagtctggtaagcactggaggagctggcctgctgtccctgttgcatgtctagggctagggccacgcgcggcaaaaccggccagcagcagcgtaaccgccccgacaatacccaccagatgcagaacttccggcgtcatcaggaacaggccgtgggtacgggcgatcaggtagacacccgcggttaccatggttgcggcgtggatcagcgcggagacaggcgtcgggcccgccatcgcgtcggcaagccatgtctgcaacggcaactgcgcagatttaccgaccgcaccgcccagcagcatcagcgtcgcccacatcagcatgttattgccgtcagcaaagtgcgctggtgccagttccaccatttcgcggaagttcagggtgcccagttcgttgtaaagaatgaacagtgcgaaagcgaggaacacgtcacccacacgggtcacgacgaacgctttcattgccgctgcgccattcttcggatcggtgtaatagaacccgatcagcagataggagcacaggcccacgccttcccagccgaggtacatcagcagcaggttgtcggcaagcaccagaaccaccatgctggcgatgaacaggttggtgtaagcgaagaagcgagagtagccctcttcaccgcgcatataccaggaggcgtacatgtgaataaggaaacccacaccagtgaccaccgagagcatggtcagcgacaggccgtccagcaccaggttaaaaccgatgttaaagtcgcctaccgacatccacgtccacagcggctggctgtatgtctgctcgccgttagcgaagaaatcaacgccgataaggggggtaacagcgccgcagggccacagagcagggctgtccacccaagcgttactcaggcagctgcacaggcatggttcttgaccagcccttggggcagtcaacat

SEQ ID NO: 28588 - DNA, 921 bp, Homo sapiens
  SIMILAR (37)..(159): 971254mologous to Homo sapiens LERK-7 precursor,accession number U26403,Smith-Waterman Score=217.
tggcgggtcgggggctccggcgctgggccaggcgtgatgttgcacgtggagatgttcacgctggtgtttctggtgctctggatgtgtgtgttcagccaggacccgggctccaaggccgtcgccgaccgttacgctgtctactggaacagcagcaaccccagtgggttcaaggtgccagaaagtttgatctaatgccgggttacgtcatgtgtgcagaacaagctgccagagttggccgagccaggaggtgggagcccttcgcccgcggcctggcgatgtgctgccggaggaacgcgcgcgattacctggaaccgatttgtaggcgtcccgaagcccgccgggtatgcgggagactagaggtgggcgccgggggcggtcatagtgcgcgtgctggacaccggccagtcgcagacgtcccgtgttttcggaccctggaagtggagtggggaggttatccagagtgcccggcggggtcctccgggtctggagcagttccgaacctttattgcttcccggcctgtgcacagaagtcggccccgctaggcccataccgcactgctttctctgggacagaggctagcttccagctgtgtgccggtctcggtgccctcctagcctcccctcagcatgcaggcaagagagggattccctgcttgaataatgtcagcgcagatgaagatgggaagatttccccacaagcagtccgccggttacagaaccaggagggagttccccctatcccgctagtccaagatagtcttactcaggtagccgcccaagtcctaaatgaaccgctgaacaggagtggagatattcctgaaagtttggttcaaaaaacaagagtctcctggagctgtcatgtcggattacacactctcttgggtctcctaagtgccttggcatccctggggcatcagatgg

SEQ ID NO: 28589 - DNA, 3117 bp, Homo sapiens; identical to SEQ ID NO: 23127
  SIMILAR (1141)..(2049): 921254mologous to Escherichia coli yjdB,accession number U14003,Smith-Waterman Score=1413.

SEQ ID NO: 28590 - DNA, 3222 bp, Homo sapiens
  SIMILAR (1423)..(2622): 901254mologous to Escherichia coli RNA polymerase (rpoC),accession number M38305,Smith-Waterman Score=1779.
atgagtcatgatccacaaccgctgggcggcaaaatcatcagtaaaccggtcatgatttttggaccgttaatcgtcatctgtatgctcctgattgtgaagcgtctggtgttcggtctgggctctgtctctgacctgaacggcggcttcccgtggggcgtgtggatcgcgtttgacctgctgattggcaccggctttgcctgtggcggctgggcgctggcgtgggcggtatacgtctttaaccgtgggcaataccatccgctggtgcgtccggcgctgttggcgagtctgtttggttactcactgggtggcttgtcgatcactatcgacgtgggtcgctactggaacctgccgtacttctacattccgggtcacttcaacgtgaactcggtactgttcgagacggcggtctgtatgaccatctatatcggcgtgatggcactggagtttgctccggcactgtttgaacgtctggggtggaaggtgtcgctacagcgactaaacaaggtgatgttcttcatcatcgcgctcggtgcgctgctgccgaccatgcaccagtcttcaatggggtcgctgatgatctcggcgggctacaaggtgcatccgttgtggcagagctatgaaatgttgccgctgttctcgctgctgacggcgttcatcatgggcttctcgattgtcatctttgaagggtcgctggtgcaggcgggtctgcgtggcaacggtccggatgaaaagagtctgcaccggctgggctgcaggctgttcaccggtcagatcgctaaccgaggcttgtgccgggctggcaacgccatccacggtttgcggctgaggttgttcagctacgtctgcggcaggtgcggcagctacctgagctgccactggctgagtgccgatatttttcgccgcttcaaagccttgctgaatagtgcgaccaaataccgctgcctggccattcagtggcaacagcagggcgattttgttggtcgaggctggtttaaacgcttttacgttaaccaactgcgttggcagcattttcgcgcccggattgttcggataacgtttctgccagtcggcgatcccggctttcatcatgtcgggatcgttacggttatcaaaccagacgcgctgcagatccagccagccttgcagaatattttcgtcggcgttgatcaccagcgtattcgcctgttcctgagtcatggaggagagcgcctgccagcggttcctgagcaattaacgcgcgcagtaaatcaatggaaggacgccctggctggcatcgatttctcgcctgccagtaacgcgcttgctgtttttgttctaaatcggacaggtcgtattttctgccagcacgtttgctgcgccagctatatctttctgcgccagttaatcttagccggtaccgactggaacgatctgtatcgtcgcgtcattaaccgtaacaaccgtctgaaacgtctgctggatctggctgcgccggacatcatcgtacgtaacgaaaaacgtatgctgcaggaagcgcgtcctctgaaatctttggccgacatgatcaaaggtaaacagggtcgtttccgtcagaacctgctcggtaagcgtgttgactactccggtcgttctgtaatcaccgtaggtccatacctgcgtctgcatcagtgcggtctgccgaagaaaatggcactggagctgttcaaaccgttcatctacggcaagctggaactgcgtggtcttgctaccaccattaaagctgcgaagaaaatggttgagcgcgaagaagctgtcgtttgggatatcctggacgaagttatccgcgaacacccggtactgctgaaccgtgcaccgactctgcaccgtctgggtatccaggcatttgaaccggtactgatcgaaggtaaagctatccagctgcacccgctggtttgtgcggcatataacgccgacttcgatggtgaccagatggctgttcacgtaccgctgacgctggaagcccagctggaagcgcgtgcgctgatgatgtctaccaacaacatcctgtccccggcgaacggcgaaccaatcatcgttccgtctcaggacgttgtactgggtctgtactacatgacccgtgactgtgttaacgccaaaggcgaaggcatggtgctgactggcccgaaagaagcagaacgtctgtatcgctctggtctggcttctctgcatgcgcgcgttaaagtgcgtatcaccgagtatgaaaaagatgctaacggtgaattagtagcgaaaaccagcctgaaagacacgactgttggccgtgccattctgtggatgattgtaccgaaaggtctgccttactccatcgtcaaccaggcgctgggtaaaaaagcaatctccaaaatgctgaacacctgctaccgcattctcggtctgaaaccgaccgttatttttgcggaccagatcatgtacaccggcttcgcctatgcagcgcgttctggtgcatctgttggtatcgatgacatggtcatcccggagaagaaacacgaaatcatctccgaggcagaagcagaagttgctgaaattcaggagcagttccagtctgaaagctcgccagagaaagcagggtttaacgtcgaacggcttaaccagatggatcgctggattagccagcaagttgatgtcggttatcccagcgtaaacctgctgatcattaaagataatcagattgtgtatcgcaaagcctggggagcggcgaaaaagtacgatggcagcgtgttgatggaacagcctgtcaaagccaccaccgggacgctgtatgacctggcctcaaacaccaaaatgtacgccacgaacttcgccctgcaaaagctgatgagcgaaggcaaactgcatcctgacgatcggattgcgaaatatattccggggtttgccgatagtccaaatgacaccattaaaggcaaaaacaccctgcggatttctgacctgctgcatcacagcggcggtttcccggcagatccgcaatacccgaataaagcggtcgcgggcgcgttatattcccaggataaaggccagacgctggagatgatcaagcgcacgccgctggaatatcagcccggcagcaaacatatctacagcgatgtcgattatatgctgcttggatttatcgtcgagtcggttaccggtcagccgcttgaccgctatgttgacgagtcgatttatcggccgctcggactgacacatacagtattatacccgtgctga

SEQ ID NO: 28591 - DNA, 1605 bp, Homo sapiens
  SIMILAR (1272)..(1586): 281254mologous to Homo sapiens salivary proline-rich protein precursor,accession number K03208,Smith-Waterman Score=93.
atgggtcaggcaaccccatgggtgctgaaggatctggacagcataggaggcctgggaaggtggctgctcattcctcatggccagagccagaactcagggcagcaatgcctgatcccaggacaaggcccaggccactgccaggactctcacagggacatccctacgcagaggcatcctacatcagaggactggcccttctcccttccctcttaccactgtggaagcctgggacccaacaggcttgaaatgagagctgaagagattgaatttgatgactgtgagatagagaaagatgtgggtgctcgctgtcatgtcggattacacactctcttgggtctcctaagtgccttggcatccctggggcatcagatggcctggcagcaccaggaacctgtgttcccaagaaatggaagaggccagcagggaagcacccatgggtctgctccaagcccttcctgggcagggcttcccggcagagttacacaacagctgatacatctgtgcacactcccggagcctccactccgacaggagctaaattcatccatcagtgagaaaacaaaacagatatatatgaaagagtcaaatgatggtttaagaagaagagtcacaacgaatgatcagaaaataaagccccagacagcagaagttaccatgaagaagggttttggaggcaatgggacccagcagggctgcaaaggtgctgagtgtctgtgtaagaagccggattggcccattaatttgttctcaacgccatccagcaacgagcaagacaaaaccacagggacgcccccccggcgaacaggggacgcccagggacaacccaaggagaaacaaccggccggccagaagcgcaacaccgcgaggggcacgcaaggagcacccccacgacccggggaggagccaaacgccccacagaccatcgacaagggcccccccagccccccgagccgcgggcacacgagacggctagcgagaagcgggaaccaaccgccagaaagacacacaccagccgcaggcggaaagacacgatatgttagacaaagtgtcctgcatagagcaagaggtggggaacccgtgagaatgcccaggttaccgagaattgctgaggcacagctccagatcgagttgaatgtttctgagttgttcagagcccagctagagaaatgcacagctgccaggcagacagcatgtgtcctgtttggtagggaagaatatggagatcggcagggagttgctaaagtagatcagaaaaaattcttgtatggatccctcaatctggactccaggcacatgcgtgcccctctgaagcgcataaaatgccggggaatcccagagatgggggggcggggatttgcaaatcttcgccgggcggaaagggtgagcggcgaaaagtggagggggggtccaccacccgcgcggggaccagcagagacagcgtgtcaaagaggcacgcaaacacgatgggagaacaggcacaaggtgagaaacacccgagagggacggtgtagaaaacaaaacgacggggaccaaagggccaaacccgaggcacaaaagcgccggaagaagaaacgagccgagaaccaccatgcacgggacccataa

SEQ ID NO: 28592 - DNA, 1714 bp, Homo sapiens
  SIMILAR (191)..(1078): 981254mologous to Escherichia coli NADH dehydrogenase I chain nuoL,accession number D90859,Smith-Waterman Score=1490.
ctgcgccaatcagctcagggattgtttggtaataccgactatcacggggctggtgcgtttagtggtcgctggtgcaaatggggatcgcctggggcaacctgttactggcgctgatgtaaggctttcgcgatgccgcaaggtaatgccgtcacgttcagtagagatggggttggtaccgagctcgagtgtaatagtaactgttttgccattgattggcttcgtcctgctggcattctcccgtgggcgctggtctgaaaacgtctcggcgatcgtcggcgtaggctctgtgggcctggcggcgctggtaaccgcctttatcggcgttgatttcttcgctaacggcgagcagacatacagccagccgctgtggacgtggatgtcggtaggcgactttaacatcggttttaacctggtgctggacggcctgtcgctgaccatgctctcggtggtcactggtgtgggtttccttattcacatgtacgcctcctggtatatgcgcggtgaagagggctactctcgcttcttcgcttacaccaacctgttcatcgccagcatggtggttctggtgcttgccgacaacctgctgctgatgtacctcggctgggaaggcgtgggcctgtgctcctatctgctgatcgggttctattacaccgatccgaagaatggcgcagcggcaatgaaagcgttcgtcgtgacccgtgtgggtgacgtgttcctcgctttcgcactgttcattctttacaacgaactgggcaccctgaacttccgcgaaatggtggaactggcaccagcgcactttgctgacggcaataacatgctgatgtgggcgacgctgatgctgctgggcggtgcggtcggtaaatctgcgcagttgccgttgcagacatggcttgccgacgcgatggcgggcccgacgcctgtctccgcgctgatccacgccgcaaccatggtaaccgcgggtgtctacctgatcgcccgtacccacggcctgttcctgatgacgccggaagttctgcatctggtgggtattgtcggggcggttacgctgctgctggccggttttgccgcgctgtaacaataaaaatgacatcctcgccaccccaagcatcgtaacgctggataataaactcgcgtccttcaacgtggggcaggatgtgccggtgctatccgggtcacagaccacttcaggggataacgtctttaataccgtcgaacgcaaaacggtggggacaaaactcaaagttactccgcaggtcaatgaaggcgacgcggtgttgctcgaaatagagcaggaagtctccagcgttgactcttcctctaactcgacgctcggcccgacgtttaatacccgtactattcaaaacgccgtgctggtcaaaaccggtgaaacggtggtcctgggcggattgctggatgatttttctaaagagcaagtgtcaaaggttcctctgcttggcgatattcctttagtggggcaactcttccgctatacctccaccgagcgcgctaaacgcaacctgatggtatttatccgtccgacgattatccgtgacgatgatgtttatcgctcactgtcaaaagagaaatacacccgttaccgtcaggagcaacaacagcggatcgacgggaaatcaaaagcgctggttggctcggaagatttgccggtgctggatgaaaacacgttcaacagtcacgcccctgcgccatcgtcacg

SEQ ID NO: 28593 - DNA, 2192 bp, Homo sapiens
  SIMILAR (417)..(2186): 941254mologous to Escherichia coli rpoC,accession number V00339,Smith-Waterman Score=2839.
cttgccgtagcttccaaaattgctctggcttcgcaactatgatccgttcatggtctttcggtgaagttaaaaagccggaaaccatcaactaccgtacgttcaaaccagaacgtgacggccttttctgcgcccgtatctttgggccggtaaaagattacgagtgcctgtgcggtaagtacaagcgcctgaaacaccgtggcgtcatctgtgagaagtgcggcgttgaagtgacccagactaaagtacgccgtgagcgtatgggccacatcgaactggcttccccgactgcgcacatctggttcctgaaatcgctgccgtcccgtatcggtctgctgctcgatatgccgctgcgcgatatcgaacgcgtactgtactttgaatcctatgtggttatcgaaggcggtatgaccaacctggaacgtcagcagatcctgactgaagagcagtatctggacgcgctggaagagttcgatgggggcggaacaatccaggctctgctgaagagcatggatctggagcaagagtgcgaacagctgcgtgaagagctgaacgaaaccaactccgaaaccaagcgtaaaaagctgaccaagcgtatcaaactgctggaagcgttcgttcagtctggtaacaaaccagagtggatgatcctgaccgttctgccggtactgccgccagatctgcgtccgctggttccgctggatggtggtcgtttcgcgacttctgacctgaacgatctgtatcgtcgcgtcattaaccgtaacaaccgtctgaaacgtctgctggatctggctgcgccggacatcatcgtacgtaacgaaaaacgtatgctgcaggaagcggtagacgccctgctggataacggtcgtcgcggtcgtgcgatcaccggttctaacaagcgtcctctgaaatctttggccgacatgatcaaaggtaaacagggtcgtttccgtcagaacctgctcggtccatacctgcgtctgcatcagtgcggtctgccgaagaaaatggcactggagctgttcaaaccgttcatctacggcaagctggaactgcgtggtcttgctaccaccattaaagctgcgaagaaaatggttgagcgcgaagaagctgtcgtttgggatatcctggacgaagttatccgcgaacacccggtactgctgaaccgtgcaccgactctgcaccgtctgggtatccaggcatttgaaccggtactgatcgaaggtaaagctatccagctgcacccgctggtttgtgcggcatataacgccgacttcgatggtgaccagatggctgttcacgtaccgctgacgctggaagcccagctggaagcgcgtgcgctgatgatgtctaccaacaacatcctgtccccggcgaacggcgaaccaatcatcgttccgtctcaggacgttgtactgggtctgtactacatgacccgtgactgtgttaacgccaaaggcgaaggcatggtgctgactggcccgaaagaagcagaacgtctgtatcgctctggtctggcttctctgcatgcgcgcgttaaagtgcgtatcaccgagtatgaaaaagatgctaacggtgaattagtagcgaaaaccagcctgaaagacacgactgttggccgtgccattctgtggatgattgtaccgaaaggtctgccttactccatcgtcaaccaggcgctgggtaaaaaagcaatctcccaaatgctgaacacctgctaccgcattctcggtctgaaaccgaccgttatttttgcggaccagatcatgtacaccggcttcgcctatgcagcgcgttctggtgcatctgttggtatcgatgacatggtcatcccggagaagaaacacgaaatcatctccgaggcagaagcagaagttgctgaaattcaggagcagttccagtctggtctggtaactgcgggcgaacgctacaacaaagttatcgatatctgggctgcggcgaacgatcgtgtatccaaagcgatgatggataacctgcaaactgaaaccgtgattaaccgtgacggtcaggaagagaagcaggtttccttcaacagcatctacatgatggccgactccggtgcgcgtggttctgcggcacagattcgtcagcttgctggtatgcgtggtctgatggcgaagccggatggctccatcatcgaaacgccaatcaccgcgaacttccgtgaagtctga

SEQ ID NO: 28594 - DNA, 2345 bp, Homo sapiens
  SIMILAR (1399)..(2154): 981254mologous to Escherichia coli yjdB,accession number U14003,Smith-Waterman Score=1346.
atgctgccagagcagtgcttccgtctgcgggtgatgcaccgtctgacgctcaccgccagccacgttcgtcatactgccaccgctctgtcgccccgggatatcgtctgggacttccgcctgccgcgtgtgaaatcgatcaataggcaggcagctgtcatccgtagagtgactctagaggatcccatgcaattctgcccggatgcggtgttccgcaagtgtgttatcgaactggacattgccaaaggcaaatttgtcgctaaagcgcgttttcttgctgaagcaggctggcgcacgctgttaggcagcaaagagcgcgatgaagaaaacgacggcacgccactgcctgtggtggcgaaaggcgatgagttgctgtgtgaaaaaggtgaagtggtagagcggcaaacccagccgccgcgccattttaccgatgcaacactgctttcggcgatgaccgggatcgcgcgctttgtgcaggataaagatctgaaaaagatcctccgtgcgaccgatggtctggggacagaggcaacgcgtgccgggattattgaactgttgttcaagcgtggtttcctgaccaaaaaagggcgctatatccactccaccgacgccggaaaagcgctattccattcgctgccggagatggcgacgcgaccggacatgaccgcgcactgggaatcggtgctgacgcaaatcagcgaaaagcagtgtcgctatcaggactttatgcagccgctggtggggacgctatatcagcttattgatcaagccaaacgtacgccggtgcggcagtttcgcggcattgtggctccgggcagtggtggcagtgctgataagaaaaaggctgcaccgcgtaaacgtagtgcgaaaaaaagtccgccagcagatgaagtcggaagcggggcgatagcacaggatgtttctatgactcaaaatatcaggccgttaccccaattcaaatatcatcccaagccactggaaacaggcgcatttgaacaggataaaaccgtagagtgcgattgctgtgaacaacagacgtcagtttattactcgggtcccttttattgcgttgatgaagttgaacatctctgtccgtggtgtattgcggacggttctgctgctgaaaagtttgcaggtagttttcaggatgatgccagcatagaaggtgttgaatttgagtatgatgaagaggacgaatttgccggtattaagaacacatatcctgatgaaatgctgaaagagttggttgaacgcacgccaggttatcatggatggcagcaggaattctggctcgcgcatttggcgaagggtcgcgcttggtgcccatttgactcccccgcagttagccgtgaccggaagttacaagcaggattaccgcgttttcgtgcgtttgcctttgacattgttgccagctgttcatggtactcccatcagcgactggcaaatctgccgctggtgcgaattggtgaagacgcgcaccgcaacccgttaatgcagaacgaaaaacgtaaaaatttgaccatcctgattgtcggcgaaacctcgcgggcggagaacttctccctcaacggctacccgcgtgaaactaacccgcggctggcgaaagataacgtggtctatttccctaataccgcatcttgcggcacggcaacggcagtttcagtaccgtgcatgttctcggatatgccgcgtgagcactacaaagaagagctggcacagcaccaggaaggcgtgctggatatcattcagcgagcgggcatcaacgtgctgtggaatgacaacgatggcggctgtaaaggtgcctgcgaccgcgtgcctcaccagaacgtcaccgcgctgaatctacctgatcagtgcatcaacggcgaatgctatgacgaagtgctgttccacgggcttgaagagtacatcaataacctgcaaggtgatggcgtgattgtcttacacaccatcggcagccacggtccgacctattacaaccgctatccgcctcagttcaggaaatttaccccaacctgcgacaccaatgagatccagacctgtaccaaagagcaactggtgaacacttacgacaacacgctggtttacgtcgactatattgttgataaagcgattaatctgctgaaagaacatcaggataaattttccgactcactcccggttaatggcgctatcccaccgccgccgaccacttcaccctcgctgactatatacttgatacagctcgtcaagattcggatcggcgacggtgtagcctttatcagcggtaagaccgtattcggcggatacctgacgaatgacgcgggcgatagcaggattatcctgcagcgtcaggcgacgcattacag

SEQ ID NO: 28595 - DNA, 5287 bp, Homo sapiens
  SIMILAR (2235)..(3422): 981254mologous to Escherichia coli yjdB,accession number U14003,Smith-Waterman Score=2039.
tcagacaaatgaaagttgagggatttcatcaacgccagacctgtcctccgtgcccctatgaactgtttcttttcctctcgagtctttattggtcatagccctagatttcccatcaaattcaacccggcctgagcggcaggcaatgcccctgctgggtgcggattgcaggcccaccactggagggcgtctggacgcttctaaacagctctgaagcgcctggaaatcccgtctgaggactggaaagcgcaggagggtgaacgtgagatttgattttattgggacccgcgctcgcgccgcccgcccgtcccgcgtcccgcgcaacacgcccgggcggagccccatccccccgccacgtccacgttcacgcgtgcggcctcgcgctctgctgaggctgctgccatgggtcgccgccgctgtcggctttccacgcaagtcattaacgagggggctctgttgctgctgtgcctgccgaagacgcgaagagccaaacttttctttgaggttttcgaggcaagaccgcttcgaaagccggcgcagctgccgcttaaccagttccaggacaccgacaaggctgggttgcggctccggatccccacccttctcggcgcaccgcccggtaccgcagcacttacgactcctctgagatttctgggggtcgccccgccatctgatgccccagggatgccaaggcacttaggagacccaaggagtgtgtaatccgacatgacagctcctggctcggccactctggcagcttgttctgcacacatgacgtaacccggcattagatcaaatttctggcaccttgaacccactggggttgctgctgtccagtagacagcgtagcggtcggcgacggccttggagcccgggtcctggtgaacacacacatccagagcaccagaaacaccagcgtcaacatctccactcggtgggaaggcgtgggcctgtgctcctatctgctgatcgggttctattacacgatccgaagaatggcgcacggcaatgaaagcgttcgtcgtgacccgtggggtgacgtgttcctcgctttcgcactgttcattctttacaacgaactggcaccctgaacttccgcgaaatggtggaactggcaccagcgcatttgcgacggcaataacatgctgatgtgggcgacgctgatgctgctgggcggtccgtcggtaaatctgcgcagttgcacttgcagacatggcttgacgacggcatggcgggccccaacgcctgtctccgcgctgatcaaagccgcaacgcatgtaaccgcgggtgtctacctgatcgcccgtaccaacggcctgttcctgatgacgccggaagttctgcatctggtgggtattgtcggggcggttacgctctgctggccggtttttccgcgcatgagccagattggctacatgttcctcgcgcttggcgtgcaggcatgggatgcggcgattttccacttgatgacccacgcgttctttaaagcgctgctgttcctggcatccggttccgtcattctggcctgccatcacgaacagaacatcttcaagatgggcggtctgcgtaaatctattccgctggtttatctctgcttcctggtgggcggcgcagcactgtcggcactaccgctggtcactgcgggcttcttcagtaaggatgagatcctcgcgggtgcgatggcgaatggtcatatcaatctgatggtggcaggtctggtcggtgcgtttatgacctcgctctacaccttccgtatgattttcatcgtcttccacggaaaagaacaaattcacgctcacgccgtgaaaggggtaactcacagcctgccgctgattgtgctgctgatcctttccaccttcgttggcgcactgattgtaccgccgctgcagggcgtgcttccgcaaacgacggaactggcgcacggcagcatgttgaccctggaaattacctctggcgtggtcgcggtggtcggcattctgctggcagcctggctgtggctgggtaaacgtactctggtgacctccatcgccaacagtgcgccgggccgtctgctgggcacctggtggtacaacgcctggggatttgactggctgtatgacaaagtgttcgtcaagccgttcctgggtattgcctggttgctgaaacgcgatccgctgaactcaatgatgaacatcccggctgtcctttcccgctttgcaggtacaggccggtggttagtgagaacgggtatctgccctgtgttgcaggcgctgccgctggattcgctgcataacgtactggttttcttgtcgatgccggtcgtcgctttcagcgtgattaatattgtcctgacactaagctctttcttatggcttaatcgaccactggcctgcctgtttattctggttggcgcggctgcacaatatttcataatgacttacggcatcgtcatcgaccgctcgatgattgccaatattattgataccactccggcagaaagttatgcgctgatgacaccgcaaatgttattaacgctgggattcagcggcgtgcttgctgcgctgattgcctgctggataaaaatcaaacctgccacctcgcgtctgcgcagtgttcttttccgtggagccaatattctggtttctgtactactgattttgctggtcgccgcactgttttataaagactacgcctcgttgttccgcaataacaaagagctggtgaaatccttaagcccctctaacagcattgttgccagctggtcatggtactcccatcagcgactggcaaatctgccgctggtgcgaattggtgaagacgcgcaccgcaacccgttaatgcagaacgaaaaacgtaaaaatttgaccatcctgattgtcggcgaaacctcgcgggcggagaacttctccctcaacggctacccgcgtgaaactaacccgcggctggcgaaagataacgtggtctatttccctaataccgcatcttgcggcacggcaacggcagtttcagtaccgtgcatgttctcggatatgccgcgtgagcactacaaagaagagctggcacagcaccaggaaggcgtgctggatatcattcagcgagcgggcatcaacgtgctgtggaatgacaacgatggcggctgtaaaggtgcctgcgaccgcgtgcctcaccagaacgtcaccgcgctgaatctacctgatcagtgcatcaacggcgaatgctatgacgaagtgctgttccacgggcttgaagagtacatcaataacctgcaaggtgatggcgtgattgtcttacacaccatcggcagccacggtccgacctattacaaccgctatccgcctcagttcaggaaatttaccccaacctgcgacaccaatgagatccagacctgtaccaaagagcaactggtgaacacttacgacaacacgctgtttacgtcgctatatgtgtggccaggagggccaccacaacgacgatgcaactcagcaccacacgaaacacaacgaccagtacccacacaccacaacaacgcacacaaacaacacacagcaaaaacaacaccacaacacaaactaaactacccgccacaacaacacaaacgacacgagcaacgccacacacgacaacaccacacaacacaccacacaccaactcacacgccagcccaaagacaaccacaaaaagacaccaatccccacgatacaacaaacaaccgcaccaaaaagacacaaacgccagcacgaacacaacaacacacaacccaacacgacaacacaaagacacacacgaacgaaaaaacgcaaaagaaaccgcaagacacaaacacagcgacgtacaacaacagcacacaccgcagacacactacagtcagcaccactccccgcaacaagacaaacagaggcaaacgcacaaaaagcaacacacgaacaagaacccgagaaccacaccaacaagcaacacaaaccagacacacacataacacagacaacccacgacgaccaacgacgaaaaaaaggacgacggacgaccaccaaaacaagacccaaccgaaacacaccatacggaacacgcagacaccacaacgacacacaacacggcgccagtcagcaccagcaccgccaccaccgcaacgcgaaccagacaaccaaacggcacaaacagacataagcaagaaaagaacgcatttctttgttctctcgtgtctgttgtcttctttcctacgacagaaggaaaagaggatgggaagcgagagcagacacaagaagtggacctcgtgttcccttgctctgttttgtattcccgccatattgcggaatgggcgggaaccatgtaacacggacccgttagcccatgttccgaattggcccggacccaggtgccaccaggtaaccagtcagcaccagcgttcgcccttggggcgtaacacagtcacgggtcatgtagtacagacccagtacaacgtcctgagacggaacgatgattgtttcgccgttcgccggggacaggatgttgttggtagacatcatcagcgcacgcgcttccagctgggcttccagcgtcagcggtacgtgaacagccatctggtcaccatcgaagtcggcgttatatgccgcacaaaccagcgggtgcagctggatagctttaccttcgatcagtaccggttcaaatgcctggatacccagacggtgcagagtcggtgcacggttcagcagtaccgggtgttcgcggataacttcgtccaggatatcccaaacgacagcttcttcgcgctcaaccattttcttcgcagctttaatggtggtagcaagaccacgcagttccagcttgccgtaaatgaacggtttgaacagctccagtgccattttcttcggcagaccgcacttgatgcagacgcaggtatggacctacgggggattacagaacgaccgggagtagttcaacacgcttaccgaggcaggtttctgacgggaaacgaccctgtttacctttgatcatgttcggccaaagatttcagagggacgcttgttagaaccggggattcgcacgaccgcgaacgaccgttatccagcagggcggtctaccggttccttgcggcatacgtttttcgttacgtaccaatattgtccggcgcagccagatccagcagacgttcagacgattgttacgggatcctctagagtcacctcagcatgcgctgcctgccccagcccagcaagcagagggctgtgttactgttgacaacatgttttccatgatactgactgttgtcaactgtctgctacctgggcaaaacatgtatttccccagtcactga

SEQ ID NO: 28596 - DNA, 249 bp, Homo sapiens
  SIMILAR (44)..(247): 851254mologous to Homo sapiens NAG13,accession number AF194537,Smith-Waterman Score=292.
ttgttttttgaaaagattaacaaagtagatagaccactagccaataaaaaataataaagggaatatcaccactgaccttccagaaatacaaactaccattagggaatactataaacacctctatgcaaataaactagaaaatctagaagaaatggataaattcctggacacatacaccttccaaagactaaaccaggaagaagtcgaatccctgaatagaccaataacaagttctgaaattgaggcagt

SEQ ID NO: 28597 - DNA, 834 bp, Homo sapiens
  SIMILAR (834)..(184): 581254mologous to Homo sapiens putative p150,accession number U93569,Smith-Waterman Score=612.
tcatgatttggctctctgtttgtctgttattggtgtataagaatgcttgtgatttttgcacatgattttgtatcctgagactttgctgaagttgcctatcagcttaaggagattttgggctgagacgatggggttttctagataaacaatcatgtcatctgcaaacagggacaatttgacttcctcttttactaactgaataccctttatttccttctcctgcctgattgccctggccagaacttccaacactctggtagaattcggctgtgaatccatctggtcctggacttttttggttggtaagctattagttattgcctcaatttcagagcgtgttattggtctattcagggattcaacttcttcctggtttagtcttgggagggtgtatgtgtcaaggaatttatccatttcttctaggttttctagtttatttgcgtagaggtgtttattctctgatggttgtttgtatttccagtagtcattcaggagcaggttgttcagtttccatgtagttgagcggttttgagtgagtttcttaatcgtgagttctagtttgattgcactgtggtctgagagacagtttgttataatttctgttcttttacatttgctgaggagtgccttacttccaactatgtggtcaattttggaataagtgtggtgtggtgctgagaagaatgtatattctgttgatttggggtgaagagttctgtagatgtctattaggtccacttggtacagagctgagttcaactcctggatatccttgttaactttctgtcttgttgatctgtctaatgttgacagtggggtgttaaagtctcccat

SEQ ID NO: 28598 - DNA, 4452 bp, Homo sapiens; identical to SEQ ID NO: 16327
  SIMILAR (2731)..(3558): 851254mologous to Homo sapiens similar to D.melanogaster peroxidasin(U11052),accession number D86983,Smith-Waterman Score= 1178.

SEQ ID NO: 28599 - DNA, 927 bp, Homo sapiens
  SIMILAR (564)..(319): 901254mologous to Homo sapiens NAG13,accession number AF194537,Smith-Waterman Score=384.
tcaaatatctctggaaagtagccgtgttcgttcattgttaatagggcaaggtgcagtgtcatagagggttaatccatgtaaattggcttccacccgtaaagaaattttaattacggcagaaggggaagccaacatcttcttcacaagaaactccaaagactgaaccaggaagacttttgaaaccctgaacagaacaataacaagttctgaaattgaatcagcaataaaaaaccctcttgcttgcaagtcttgtgtaggatgtaccaagaatgcaacatcgagtgataaggaggaactgtacagaacagcccagtcattgtcctcatctctcctctggtagaatttggctgtgaatccgtctggtcctggactttttttggttggtaggctattaattattgcctcaatttcagagcccgttattggtctattcagggattcaacttcttcctggtttagtcttgggagggtgtatgcgtccaggaatttatccatttcttctagattttctagtttatttgcatagaggtgtttatagtattctctgatggtagtttgtatttctttctctctggctgcccttaacattttttctttcatttcagctttggtgaatctgacaattatgtgtcttggagttgctcttctcaaggagtatctttgtggcattctctgtatttcctgaatttgaatgttggcctgctttgctaggttggggaatttctcctggataatatcctgcagagtgttttccaacttggttccactctccgggtcactttcagatacaccaatccgatgtagatttggtttcatttcattcatttgatcttcaatcactgatactctttctcctagttgatcgaatcggctactgaagcttatgcattcatcacgtagttcttgtgtcatgtttttcagctccat

SEQ ID NO: 28600 - DNA, 1212 bp, Homo sapiens
  SIMILAR (626)..(603): 621254mologous to Homo sapiens putative p150,accession number U93563,Smith-Waterman Score=41.
tcacttgctgggatagagttgtagttccccaattactagtagttccactacctcttctaacttgtcaaataatgaggagactttgaaggctaaatccagcagtagctcctctttatttgtgttgctgtctctttccacttttttaatttctccagttcttctcccctcaatctctgcttcctttgtgggcaatgcaagaggctcttttccttccagctggcaaggcattaaggaggtctcctgttgtgtggcctggttcctaacaggccacagagtggtagtggtccagggcctggggactggggatccctgccacggccagatacccctctgagacaaagcttccagaggaatgatcaggcagcaacatttgctgttcagcaatattcgctgttctgcagcctccactgctgatacccaggcaaacagggtctggagtggacctccagcaaactccaacagacctgcagccgagggtcctgaccattccattctgtgtgtcatgctgccgaagcagcacttggaatctagaagtaccaagtgccacaattcgtctccttgtgactcatggcaccagatgacaagcaatcctctgtccttcagcagcaccagaaacagtggaggatccgtgtgggtgttcacagcgttgtgaatagattgagaaggtggcttttgagtaaagaagttagccatgcagacgcttggaggagagttcctatgaggaaatgacttatgccccaagaccataaggacaggggatgcttggtgcgttccaggaaccacaaggaagtcagcatggaagtagggtaaaatctcaggctctttgtcattcttgccagtaagggatgggctctgatagaatttggctgtgaatccgtctggtcctggactctttttggttggtaggctattaatcattgcctcaatttcagagcctgttattgatctattcagggattcaacttcttcctggtttagtcttgggagggtgtatgtgtcgaggaatttatccatttcttctagattttctagttcatttgcgtagaggtgtttatagtattctctaatggtagtttgtatttctatgagtgagaacatgcggtgtttggctttttgtccttgtgatagtttgctgagaatgatggtttccagcttcatccatgtccctgcaaaggacatgaactcatctttcatggctgcatagtattccat

SEQ ID NO: 28601 - DNA, 1341 bp, Homo sapiens; identical to SEQ ID NO: 4926
  SIMILAR (298)..(1164): 891254mologous to Homo sapiens putative p150,accession number U93572,Smith-Waterman Score=1336.

SEQ ID NO: 28602 - DNA, 3228 bp, Homo sapiens
  SIMILAR (1795)..(2790): 841254mologous to Homo sapiens unknown protein,accession number M22333,Smith-Waterman Score=1421.
atgaggaacagtttggaactttctagagacttgttaaattgttgtgaccaaaatgttggtagtgatgtggacaatgaagttcagactgaggaggtctcagatgaaaatgagaaatttattgggaactggaataaaggtcactcttgctatgctttagcaaagagactggtggcattgtgcccctgctctagggatctgtggaactttgaacttgagagagatgatttagggcccagaggcctaggagggaagaatgatttcctgagccaagcccagggccctgctgccctgcagagccttggggcactgctccctgcatcccagacacttcagctccagcagtggctcaaaggggcccaggtacttggactgcagcttcagagggtgcaagctttggtggctccacatgatgttaagcctgcaggcagcccatggctacagaagaagctgctcccagtcacctctggcttggtttggatgggtgaggttgtcccgtttctgcagctccagtcgtggcttaaaggggccaatgtacagctcaggccattgtttcagaaggtgcaagacccaagccttggtggcttccacatgttgggcctttgggtgtgcagaagacaagagttgaactttgggagcctctgcctagatttcaaaggatgtatggaaacacctggatgtccaggcagaagtctgctgcagggacagagccctcgtggagaacctttaccagggcaatgcagaggcagaaatgtgggtttggagcccccacacagagaccccactggggcactgcctagcatagctgtgagaagaaggccaccatcctccagaccacagaatgttaggtacactggcagcttgcactctgtgcttggaaaagtcacaggcattcaacaccagcccatgaaagcagccataggggatttaccctgcagagccacagaggcagagctgcctcaggccatgggagcctaccccttgcatcagtgtgtcctggatgtagaccccaaaacaagactgcatgatacaggagaggataaaggacagagccccgtgacacaccggcagaggccccttacttactgtttggttgataaaaatccagccaatgggctgatcatcaagtccacatcaaccaacctgtctaaaagtagcaaggcatctctgaaagaaaaagcagcagccccagtcaggggtttagagataaaactcccatctccctgggacagagcacctgagggaaggggtgactgtgggcacagcttcagcagacttaaatgttcctgcctgccagctctgaagagagcagctaatcttccagcacagcacttgaactctgctaagggacagactgtctcctcaagtgggtccctgacccccatgtctcctgactgggagacacctcccagcaggggtcaaaagacgccttataaaggagagctctggctggcatctggtgagtgcccgtctgggacaaaacttttagaggaaggaacaggcagcaatctttgctgttctgtagcctctgctggtgatacacagacaaacagggtctggagaggacctccaacaaactccagcagacctgcagcagagggacctgttagaaagaaaactaacaaacagaaacgaatagcatcagcatcaacaaaaacgacatccactcaaaaaccccacccaaatgtcaccatcatcaaagaccaaagatatataaatccacgaagtacaatcaaattagaactcggaattaagaaactcactgaaaactgcacaactacatggaaactgaacaacctgctcctgaatgactgctgggaaaagcaggaaagatctaaaactgacaccctaacatcacaattaaaagaactagagaagccagagaaaacaaattcaaaagctagcagaagacaagaaataactaagatcagagcagaactgaaggagatagggacacgaaaaacccttcaaaaaatcaataaatgcggaagctggttttttgaaaagattaacaaaatagatagatcactagctagactaataaagaagaaaagagagaagaatcaaatagacacaataaaaaatgatgaagcagatatcaccactgatcccatggaaatacaaactaccaacagagaatactataaacacctttatgcaaataaactagaaaatctagaagaaatggataaattcctggacacatacaccctcccaagactaaaccaggaagaagttgaatccctgaatagaccaataacaagttctgaaattgaggcagtaattaatagcttactaaccaaaataagtccaggactagatggattcacagccgaattctaccagaggtacaaagaggagctggtactgtttcttctgaaactattccaaacaatagaaaaagatggactcctccctaactcattttatgaggccagcatcatcctgataccaaaacctggcacagacacaacaaaaaaagaaaatttcaggccaatatccctgatgaacgtcaatgcaaaaatcctcaataaaatactagcaaaccgaatccagcagcacatcaaaaagcttatccatgatgaccaagtcagcttcatccctgggatgcaaggctggttcagcatatgcaaaccaataaacataatccatcacataaacagaaccgatgacaaaaaccacatgattatctcaagagatgcagaaaagtccttcaataaaattcaacagcccttcatgctaaaaactctcaataaactaggtatcagtggaacatatctcaaaatagtgaagatgcacaccatgtcctcctcgcatctcttctacctggcgctgtgcctgctcaccttcaccagctctgccacggctggaccggagacgctctgcggggctgagctggtggatgctcttcagttcgtgtgtggagacaggggcttttatttcatggagcagtgtacgatggctgtttccattcgtggcagagagctgctggggccatcggagcaagagatgcttcacaaagaaagtggaaagcagcgccaaaaggcaaatacaattcctgtcacatccaaaatagttcatttagctctttatgctactctcttactctttgtcatggagcaatttctaggagagtcgcataaaagtagggagatttttagctttgagcagcaaataagtgaactgggcaaggagagcatgaaatttagtgaggaaaaagaaaaagaatga

SEQ ID NO: 28603 - DNA, 1524 bp, Homo sapiens
  SIMILAR (271)..(188): 621254mologous to Homo sapiens putative p150,accession number U93569,Smith-Waterman Score=78.
tcacatctcagggatgaaggcgacttgatcgtggtagataagctttttaatgtgctgctggattcggattgccagtattttaatgaggattttcgcattgatgttcatcagggatattggcctgaaattttctttttttgttgtgtctctgccaggttttggtaacaggatgatgctggcctcataaaatgagttagggaggagtccttctttttctttggtagaatttggctgtgaatctgtctggtcctgggcttttttggttggtaggctattaattactgcctcaatttcagaacttgttattggtctattcaaggattctacttcttcctggtttagtcttgggagggtgtatgtgtccaggaatttatccatttcttctcgatgttctagtttatttgcatagaggtgtttatagtattctctgatggtagtttgtattttggtttcaaataacttatttatttctgccttaattttgttatttacccagtagtcattcaggagcaggttgttcagtttccatgcagttgtggggtttttagtgagtttcttaatcctgagttctagtttgagttcactgtggtctgagagactgtttgttatgatttttgttcttttgcatttgctagggagtactttacttacagttatgtggtcagttttagaataagtgtgaggtgttgctgagaagaatgtatattctgttgatttggggtggagagttctgtagatgtctattaggtccacttgatccagagctgagttcaagtcctgaatatccttgttaattatctgtctctttgatctgtctactattgacagtggggtgttaaattttcccactattattgtgtgggagtcgaggtttctttgtaggtctctaagaacttgctttatgaatctgggtgctcctgtattgggtgcaaatatatttaggatcgttagctcttcttgttgcattgatccctttaccattatgtgatgcccttctttgtcttttttgatctttgttgatttaaagcctgttttatcagagactaggattgcaacccctgcttttttttgctttccatttgcttgataaatcttcctccatctctttattttgagcttatatgtgtctttgcacatgagatgggtcgctgaatacagcacaccgatgggtcttgaccctttatccaatttgccagtctgtgtctgaaaattgtggctttcactgttatcattgacgacaccagtgaagttacaaagctgctcattagtaactgaaattagattttctcttgttgaaggaattttcagtttttcagagaatgagagttgtaatctcacttctattgaacgttgtactgaaggttctgggcctcttgacagcaatttttgctcagttgccagtagactgatatattttttcgtagatagccaaacagcaatgcacatatgttggttaggaagacaatctacttcactgtctgctgcctcagtgcttctcggcatcttttcttcaccacgtgacat

SEQ ID NO: 28604 - DNA, 825 bp, Homo sapiens
  SIMILAR (375)..(124): 911254mologous to Homo sapiens NAG13,accession number AF194537,Smith-Waterman Score=405.
tcatctttctatcaaacatcgattgagtttgagcgagggcgtggaggggttgagcacagtgccaggcactggaagcacgttggtgaacaagacaagcctgggcaatgttcccacagagctcacgatcagctcgtctttgtacctctggtagaatttggctgtgaatccgtctggtcctggactttttttgattggtaggctattaattattgcctcaatttcagagcctgttattggtctattcagggattcaacttcttcctggtttagtcttgggagggtgtatgtgtccaggaatttatccatttcttctagattttctagtttatttgcgtagaggtgtttatagtattctctgatggtagtttgtatttccagccgtcttttctctcgttttgatgaggacatggaaacactgtcatgcctgggcaggtctgcagactggctgtgggaccctggtaaccaccgggtcctcctagtcatcagagatccagcactggttccagggtcagcctcggtggagcagatgtagggtctcaggaaggagacacgaagccagtacagttttgcctttatgcttcttgctaccccaaaatagcagcagcatgcagctgggctgaaatcgcagcatgcctctgtgagtgagtcctctcgaactctcgtgctgtaggaagttactaaacaccaggtttcctccaattttaagatgagggataaggaccgcagcgggcgagcatctagtctgcggaaacatcgacgtgagtagcggtgcaggatgtgaagtcttctggctggcgagtccacttttaggtggaagtggggcat

SEQ ID NO: 28605 - DNA, 1347 bp, Homo sapiens
atggctaaattcctggacacatacaccctcccaagtctaaaccaggaagaagttgaatccctgaatagatcaataacaagttctgaaattgaggcagtaattaatagcctaccaactaaaaaagtcccggaccagatggattcacagccaaattctgccagagttactttaacagttataaagatgttcttcttctcattaaataaggagatggaagatcaaaaagaaccagtgtgtccgtcagcgtcgcttcataaaagcggcatgctggcagtcaaaggtaaatacatcaccatcgaaaataacgatgcgctggcccagcttgctggtcatacgcttgttgtaaggagaccctgtatggctatgtatcagaacatgctcgttgttatcgatcctaaccaggacgaccaaccagcattgcggcgagctgtttatttacatcaacggattggtggcaaaattaaagcctttttgccgatctatgacttctcatacgaaatgaccaccctgctctccccggacgaacgtaccgctatgcgtcagggcgtcatcagccagcgtacagcctggatccacgagcaggcaaaatattatctcaatgctggcgttcccattgaaattaaagtggtctggcataaccgtcctttcgaagccatcattcaggaagtgatcagcggcggacacgatttggtgctaaaaatggcgcaccaacatgaccgtctggaagcggtgatttttacgccaacggactggcatctgttacgcaaatgcccaagcccggtgtggatggtgaaagaccagccgtggccggaaggaggcaaggcgctggtggcggtgaatctcgccagtgaagagccgtatcataatgcgctcaatgaaaaactggtcaaagagacgatcgaactggcagaacaagtcaaccataccgaagttcatctggttggcgcttatccggtaacgccaattaatatcgcgattgaactgccggaatttgacccgagcgtttataacgatgccattcgtgggcaacatttgctggcaatgaaagccctgcggcagaaattcggcattaatgaaaacatgacgcacgtagaaaaaggtctgccagaagaggtgattcctgatttggcggagcacttacaggcggggattgtggttctgggcacgccaccaaccggggccggggaagggaactggtcggttttcgcgctggacgggaattacgcggaagaaaagcagatggaatcggagccctcggccatatcacaacggggaaaacaaggcaacagaagaggacaggaacaagaggccgacatcagggcccacattgccacgacacaggggtga

SEQ ID NO: 28606 - DNA, 2315 bp, Homo sapiens
  SIMILAR (1)..(678): 891254mologous to Homo sapiens putative p150,accession number U93570,Smith-Waterman Score=1031.
atgggtgactttaacgctgcactgtcaacattagacggatcaatgagacagaaagttaataaggatacccaggaattgaactcagctctgcaacaagcagacctaatagacatctacagaactctccaccccatatcaacagaatatacattcttctcagcaccacatcacacttattccaaaactgaccacatagttggaagtaaagctctcctcagcaaatgtaaaagaacagaaattataacaaactgtctctcagaccacagtgcaatcaaactagaactcaggattaagaaactcactcaaaatcgcccaactacatggaaactgaacaacctgcttctgaatgactactgggtacataacgaaatgaaggcagaaataaagatgttctttgaaaccaatgagaacaaagacacaacataccagaatctctgggacacatttaaagcggtgtgtagagggaaatttatgccactaaatgcccacaagagaaagcaggaaagatctaaaattgacaccctaatatcacaattaaaagaactagagaagcaaaagcaaacacattcaagagctagcagaaggcaagaaataactaagatcagagcagaactgaaggagatagagacacaaaaaacccttcaaaaaaaatcaatgaatcccaggagctggtttttttttaaagatcaacaaaattgatagatcactagcaagactaatgaagaagaaaagagagaagaatcaaatagacacaataaaaaaatgataaagggaatatcaccaccgatcccacagaaatacaaactaccatcagagaacactataaacacctctatgcaaataaactagaaaatctagaaggaatggataaattcctggacacatacaccctcccaagattaaaccagaaagaagttgaatccctgaatagaccaataacaagttctgaaattgaggcaataattaatagcctaccaaccaaaaaaagtccaggaccagatggattcacagccgaattctaccagaggtacaaggaggagctggtaccattccttctgaaactattccaatcaatagaaaaagaaggaatcctctctaactcattttatgaggccagcatcatcctgataccaaagcctggcagagacacaacaaaaaagaagaactttagaccaatagccctgatgaacattgatgcaaaaatcctcagtaaaatactggcaaaccgaatccagcagcacatcaaaaagcttatccaccatgatcaagtgggcttcatccctggaatgcaaggctggttcaacatacacaaatcaataaacgtaatccagcatataaacagaaccaaagacaaaaaccacatgattatctcaatagatgcagaaaaggccttcgacaaaattcaacagcccttcatgctaaaaactctcaataaactaggtattgatgggacgtatctcaaaataataagagctatatatgataaacccacagccagtatcatactgaatgggcaaaaactggaagcattccctttgaaaactggcacaagacagggatgctctctctcactattcctattcaacgtagtgttggaagttctggccagggcagtcaggcaagagaaagaaatagagggtattcaattaggaaaagacgaagtcaaattgtccctgtttgcagataacatgattgtatatgtagaaaaccccatcatctcagcccaaaatctccttaagctgataagcaacttcagcaaagtctcaggatacaaaatcaatgtgcaaaaatcgcaagcattcctatacaccaataacagacaaacaaagagccaaatcatgagtgaactcccattcacaattgcttcaaagagaataaaatacctaggaatccaacttacaagggatgtgaaggacctcttcaaggagaactacaaaccactgctcaacgaaataaaagaggacacaaacaaatggaagaacattccatgctcatggataggaagaatcaatattgtgaaaatggccatactgcccaaggtaatttatagattcaatgccatccccatcaagctaccaatgactttcttcacagaattggaaaaaactactttaaagttcatatggaaccaaaaaagagcccgcattgccaagacaatcctaagccaaaagaacaaaactggaggcatcatgctacctgacttcaaactatactacaagcctacagtaaccaaaacaaaatggtactggtaccaaaacagagatatagaccaatggaacagaatagagcccccggaaataatatcacacacctaa

SEQ ID NO: 28607 - DNA, 551 bp, Homo sapiens
  SIMILAR (441)..(256): 351254mologous to Escherichia coli O157:H7 putative beta- lactamase,accession number AE005473,Smith-Waterman Score=62.
ctatgttggattttgccacggtttataccgtggctttttttgtacattgcctgatgcgcttcgcttatcaggcctacatgatctctgcaatattagaatttgcgcgattttcaggaaggatatggtactcatgccgcatccgcatgagtactgcactcttatgcgatataaatcgcatccgctttaaaggtaggcatttcacgccatcacccataaggcagcatcccatcacggtcattactggttgcgacgacgccaaccagaggggttacggcggcgttggagtgagcgctccaggataccagggggccgctgcggcaatgagataccaaataatcggggaaaacgcggggaaagacggcggagataaccagggggccgcacaggacaaattgggggaaggggaggcgagccagtgtgaccgtaggtttgcgggcttgcagcgtgccaaacgtcggcgtcatggtggcattaccattcacgcgccagcgaggccaaaagtggcatcttccttagagctggtggtgaacatcttcacgtttccgcattga

SEQ ID NO: 28608 - DNA, 1992 bp, Homo sapiens; identical to SEQ ID NO: 10731
  SIMILAR (1823)..(1990): 981254mologous to Escherichia coli BETA-LACTAMASE PRECURSOR (EC 3.5.2.6) (CEPHALOSPORINASE),accession number D90872,Smith- Waterman Score=305.
  misc_feature (1)...(1992): n = a,t,c or g

SEQ ID NO: 28609 - DNA, 1566 bp, Homo sapiens
  SIMILAR (922)..(1239): 331254mologous to Human herpesvirus 6 U88,accession number X83413,Smith-Waterman Score=107.
tcactgccatccacgcttccacgtgatatatccggagacacctcccgcgtatgtgggagacaagagcatattcctcgtgaaaattgcccgatcgatcgtagctactagcaaccccaggaggccgttcggtatcaaagtttcggcggttgttttgttaatatccagcagcacaagcccttttagctgccctgcgacatataccggcgtcagcaaactcatcacgttctgtttagtacgctgatcctggtaaatgctcgacaatacggtacgcccggtaaataccttttcaatatctttgcgatcgatgccaatacttcctgactgcaggaaggaccagttattcatcgcaaagtattcaacattaaccggctcataaaaatagacatagcggtcattgagatcgagataatagtgaaatttctcttcggccatcccaagacctgaaccgtaatcatcctggtggcggttgccttccactgcctgatcaaaagcgggtaatagtgctgcagcttccacaattgtgtcgcagtcagtggatgcggtttgtagtgtgccgcgtaagcccgggtatttatgggcagtcaggtttaagccatgggtgttattggcagactcaaaagcctcgcagatggcgcgccgctgttctggcgacacttccgactgctcagcagcgagagcgcgcatcacatgcgcggcaatactctgattctgatacttatcataaagaaaggaggagtctgctttctgcacgatatagcgcagataggcactcattgctctgtcgctggcgacaagttcaaaaataaggaaggaagatgtcagcacaatgacacttgcggcgataaaatgccggagcattctatggtgcaatttcatgataaatggcactccttcggttagtgaaacgagaaaaccagataagtgggactatgcgtgtctgtgtgcgttgtgctgttggtgtcctgcacgtcggtctggctggtagtctgctagtccttgtgctgcgtctcgacaacaacgttgcacttgcatatgagtggtatgttatgctattgatgtgtgcgtgcgtgcacactgtgctagccacgatgcacacatgcaccgtgctaatcactgccatgtgcactgctgggaatgatatggcgcttgcaagtctgtgatgtgcactgtgtgtgtgcgctgacgaacaaaatgtgttgtgcactggacctgttgtgctagccacgacaatgtgcatgctgactgcgtgccctgccctgcagaccgagtagggccgcccagggtattttgtcttcatgacgtagctagcctccatattgcgctgacacgtatatgctagtatcttgacattaagcggccttgtgctcctgtgtcccttacgcgtataaacggaagcatcccttgtgggtgctggtccccggttggttgcttgggcctggttgccccatggatggggcccctgcccgataggaggaagaatgtgcaaccgccagaagtgatggagacctggcccagggtgaaaaagggcccgttggtcccgggttattttgggggaaattttggccc

SEQ ID NO: 28610 - DNA, 687 bp, Homo sapiens
  SIMILAR (645)..(388): 671254mologous to Escherichia coli BETA-LACTAMASE PRECURSOR (EC 3.5.2.6) (CEPHALOSPORINASE),accession number D90872,Smith- Waterman Score=281.
tcaatccctatcttttctcctgtggctttcttcgttctctcgttctctcttcctctctgctttgtcttgtttctttgttgctttgtgtcgtgttctgctttcttcttcttctcggctcttccctttgtctctcgttcttcgtttgttttttctctttcgttgtttcttccttctctgtcgtcgtgtcccttctgtctgtctgtccttttcgcgctgcttgtcttctcgctgctccttcgtgttgtttggctgtcccgtccgtctcttgggtggcgccgtacgggtggagtcgcggactgccggtggaccggtccctggggttgtattcttgtaggtgtgggaccaccggtttgagaacccaaggaacttggtttgaaattggcaaggctgatcaactacccaaccataagttgcaatcggcaactgaccgctttcgaacatattgggattcttttgcggatcggcaaccggcgaatgtggcttgttgcttaacatcacaatcgtcatatgattcaccggatcgataacggtcaccgttccgtccagccagtgtgaccttgccgtgttttgggaagggtccttcaaggggggtcgggagcctgatgcgtaattactgccatgcaaacacaggccagtgttaaccgtttgcctgggcactattgggctggccccgttgggctgcaccat

SEQ ID NO: 28611 - DNA, 415 bp, Homo sapiens
  SIMILAR (155)..(244): 961254mologous to Escherichia coli K12 putative 2-component sensor protein,accession number AE000485,Smith-Waterman Score=142.
aaaaacctcgacgaaaaactattgccagcttccagcagcagctgtcggatatgggctacaagtccagttcatcacctctggcaggtactgaaaaaaatccttttcggctggaaccctacgaaatctccacgctgtttgagcaacgccaggccatgttcagtctatcaaagaaggcgtcgttgccgtggacgatcgcggcgaggtcacgctgatcaacgatgccgcacaagaattgctgaattaccacaatttcattcgctcacgttctttgccggtctttgtattggcatcagcctgtggctcaggcactcgccgccgaagggcaaactaacgcggatgaccgctggttgtcgaagcatcaacgccttcgctttatgcgccacaacaatcgccgatgccgaaattctcgcgtccg

SEQ ID NO: 28612 - DNA, 1086 bp, Homo sapiens
  SIMILAR (730)..(1077): 971254mologous to Homo sapiens putative p150,accession number U93568,Smith-Waterman Score=586.
gtccgacccggacatctgctggatattgacgataccgacatgcccagtcttcgttactcggatcctgaagcccagcgtattggtcagccatttaaaggtgatgacatccttaaagcgctgaatggcgaagaaaatgtcgctatcaatcgcggttttctggcgcaggctttacgcgtatttacccccatctacgatgaaaatcataaacaaattggcgtggtggcgatcggccttgagttaagccgtgtgacccaacagatcaatgacagtcgctggagcattatctggtcggtattatttggcatgctggtcggactgattggcacctgcattctggttaaggtacttttgggaaaatctttggctgaacctacaaatctcagctgtttgagcaacgccaggccatgggtcgactctagaggatccccgtcctctagagtcagaactggccgaagcatccgaggactcagtctgcctccagcttgcactcgagcagagcgacgagaggtggaacgtgttgtggtggatgcactgagtggcctgaagggtgacctggctggacgttactataggctcagtgagatgacagaggctgaacagcagcagcttattgatgtgagggccttaagaggccgaacctgcaggcagcgacacctgacagcggcccaatcaaagcgcgacttctttgcggttccaccaatcagcgaagggcgcgcaccgaggatcctcatcatcctgataccaaagccgggcagaaacacaaccaaaaaagagaattttagaccaatattcttgatgaacattgatgcaaaaatcctcaataaaatactggcaaaccgaatccagcagcacatcaaaaagcttatccaccatgatcaagtgggcttcatccctgggatgcaaggctggttcaatatacgcaaatcaataaatgtaatccagcatataaacagaaccaaagacaaaaaccacatgattatctcaatagatgcagaaaaggcctttgataaaattcaacaacccttcatgctaaaaactctcaataaattaggtattgatgggacgtatctcaaaatcaaaatttga

SEQ ID NO: 28613 - DNA, 1796 bp, Homo sapiens
  SIMILAR (485)..(826): 891254mologous to Escherichia coli K12 putative 2-component sensor protein,accession number AE000485,Smith-Waterman Score=498.
atgtggatcatcagctgcgtcatgaagcggacagcgatgaattgcgtgctgtggcggaagagacggcggaaggtttgcgcgagcatttttactggcaaaaatcgcgcaaaccaaaagcgggacaacgttgaattatttgatgcccgatgccgccctctaaatgatgcggctgataccgttcgctatctcccggtgttgaccgtacagctgctggacaaacagccgcgcttaacggtactgaaaaaaatccttttcggcctggaaccctacgaaatctccacgctgtttgagcaacgccaggccatgttgcagtctatcaaagaaggcgtcgttgccgtggacgatcgcggcgaggtcacgctgatcaacgatgccgcacaagaattgctgaattaccgtaagtcgcaggacgatgagaaactgtcgacgctaagccactcatggtcacaggtggtagatgtctcggaagtgttacgcgacggtaccccgcgccgcgacgaagagattacgattaaagcaccggctattactgatcaccaccgttccggtgcgcagtaatggcgttatcatcggtgccatttcaaccttcagggacaaaactgaagtacgtaaactgatgcagcgactcgacggtctggtcaactatgctgacgcacttcgtgaacgatcccacgaatttatgaataaattgcatgtgattctcggattattgcatctgaagagttataagcagttggaagattacattctcaaaacagccaataactatcaggaagagattggctctctgctgggtaagatcaaatctccggttattcgctggttttttaatcagcaagattaaccgcgcgaccgatttaggccatacgctgattttaaacagtgaaagccagctgccagacagcggcacggctgcttgtgggcagtcgctgaacgttctttaccagcgtatagtgggcgaacgaaaactacacactggatctctcatgtctgccgcaggaaagagcaacccactggcaatcagtggcctggttgtgctcacacttatctggagttatagctggattttcatgaagcaagtcaccagttacatcggtgccttcgactttaccgccttacgctgcattttcggcgctctcgttttattcatcgtccttttattacgtggtcgcggaatgcgcccgacaccgtttaaatacaccttagccattgccctgttacaaacctgcgggatggttggtctggcgcagtgggcgttggtcagcggaggtgcggggaaggtggcgatcctgagctataccatgccgttctgggtggtgattttcgccgcgttgtttctcggtgaacgcctgcgacgtgggcaatatttcgcgattctgattgccgctttcggaatctgtaccgcaacgcaaagaaatcgcctgctgccatgtaaaaaccagccctgcaaagcgaatcagtaccagggaactggcgatgtgctaaatcagttacatattgattttagagcctttagcggtgtcatggttgctggctctaggcaaatatttgctaatgaaatttcgtcaggagcaagtaatgtaggagtagttatattttctactcaggattcggcgaatacattcaatgttcttaatgcttcaggcggatctcgttccgtttatccagtaatgtcggatgacatgaatggttcatcctggaaatttagcacccgaatgcaaaaaatcgatcctgcattgagtgttacatctggtcaacttatgagccatgtgttagtggatatttactacgaataa

SEQ ID NO: 28614 - DNA, 2061 bp, Homo sapiens
  SIMILAR (214)..(1218): 951254mologous to Escherichia coli K12 putative 2-component sensor protein,accession number AE000485,Smith-Waterman Score=1625.
acgagattctctggccgtcgctgtacatcgatgagactgggtataccctggcgatgaccatctttatcggcttagcagcacaaatcttcatacagcactggcagtttccgttgccagagtctcttcccctatatagccaatcattcttactccctttgaattacccgcctcatcagagataatgcttaagaaatttgtcacacaaggaagctgatgagacattcattgccctaccgcatgttacgcaaacgtccgatgaaattgagtaccacagtgatcttaatggtcagtgcggtactgttctcggtgctattggtggtgcatctgatttacttctcgcaaatcagtgatatgacgcgagatgggctagccaacaaggcactggcagtggcgcgtaccctcgccgacttgccggaaattcggcagggcttgcagaaaaaaccgcaggagagtggcatccaggccatcgcggaagccgtacgcaaacgcaacgatctgctgtttattgtcgttaccgatatgcaaagtcttcgctactcgcatcctgaagcccagcgtattggtcagccatttaaaggtgatgacatccttaaagcgctgaatggcgaagaaaatgtcgctatcaatcgcggttttctggcgcaggctttacgcgtatttacccccatctacgatgaaaatcataaacaaattggcgtgatcaatgacagtcgctggagcattatctggtcggtattatttggcatgctggtcggactgattggcacctgcattctggttaaggtactgaaaaaaatccttttcggcctggaaccctacgaaatctccacgctgtttgagcaacgccaggccatgttgcagtctatcaaagaaggcgtcgttgccgtggacgatcgcggcgaggtcacgctgatcaacgatgccgcacaagaattgctgaattaccgtaagtcgcaggacgatgagaaactgtcgacgctaagccactcatggtcacaggtggtagatgtctcggaagtgttacgcgacggtaccccgcgccgcgacgaagagattacgattaaagaccggctattactgatcaacaccgttccggtgcgcagtaatggcgttatcatcggtgccatttcaaccttcagggacaaaactgaagtacgtaaactgatgcagcgactcgacggtctggtcaactatgctgacgcacttcgtgaacgatcccgcttagagcacattctccacaatcaaagagtgccatttatcatgaaattgcaccatagaatgctccggcattttatcgccgcaagtgtcattgtgctgacatcttccttccttatttttgaacttgtcgccagcgacagagcaatgagtgcctatctgcgctatatcgtgcagaaagcagactcctcctttctttatgataagtatcagaatcagagtattgccgcgcatgtgatgcgcgctctcgctgctgagcagtcggaagtgtcgccagaacagcggcgcgccatctgcgaggcttttgagtctgccaataacacccatggcttaaacctgactgcccataaatacccgggcttacgcggcacactacaaaccgcatccactgactgcgacacaattgtggaagctgcagcactattacccgcttttgatcaggcagtggaaggcaaccgccaccaggatgattacggttcaggtcttgggatggccgaagagaaatttcactattatctcgatctctttagagcagtaggagacggccacaactctaaggaagatgccacttttggcctcggctggcgcgtgaatggtaatgccaccatgacgccaacgtttggcacgctggcaagcccgcaaacctacggtcacactggctggaccggaacggtgaccgttatcgatccggtgaatcatatgacgattgtgatgttaagcaacaagccacattcgccggttgccgatccgcaaaagaatcccaatatgttcgaaagcggtcagttgccgattgcaacttatggttgggtagttgatcaggtgtatgcggcgttaaagcagaagtaa

SEQ ID NO: 28615 - DNA, 338 bp, Homo sapiens
  SIMILAR (331)..(14): 891254mologous to Escherichia coli aceF,accession number V01498,Smith-Waterman Score=462.
  misc_feature (1)...(338): n = a,t,c or g
attnnnnttnnggggtggcgatattcggaacgttaacgtcttttgccgccgcagccgctggagctgctgccggagctgcttctttcttctcttctgcctgagcaggtgcagcgtctgctgcaccgtcggcggaatcgaaaatcataatcagtgcgccggtctgggttttatcgccaacagagactttgatctctttaacgatacccgcctgcggagacggaactttcatagaggctttgtcgccttctacggtgatcaacgactgttcggctttaactttgtcgcccactttgaccacgatctcggggaattcaaccttatcatcccccatgggccgg

SEQ ID NO: 28616 - DNA, 1560 bp, Homo sapiens
  SIMILAR (880)..(1557): 981254mologous to Escherichia coli YbiB,accession number L02123,Smith-Waterman Score=1148.
  misc_feature (1)...(1560): n = a,t,c or g
atggctatcggggtcaaattaccagacatcgggggtgatgaagttgaattcaccgagatcctgttcaaagtgggcgacaaatttgaagccgaacagtcgctgatcaccgtagaaagcgacaaatcctctatggaatttccgtctccgcatgcgggtatcgttaaagagatcaaagtctctgttggcgataaaacccagaccggcgcactgattatgattttcgattccgccgactgtgcattatacgctgcacctgctcaggcagaatataataaagaagcatctcccgcaacagcaccatcggctgctgcggcaaaatacgttaacgttccggatatcggcggtgacgaagttgaagtgactgaagtgatggtgaaagtgggcgacaaagttgccgctgaacagtcactgatcaccgtagaaggcgacaaagcttctatggaagttccggcgccgtttgcaggcgtcgtgaaggaactgaaagtcaacgttggcgataaagtgaaaactggctcgctgattatgatcttcgaagttgaaggcgcagcgcctgcggcagctcctgcgaaacaggaagcggcagcgccggcaccggcagcaaaagctgaagccccggcagcagcaccagctgcgaaagcggaaggcaaatctgaatttgctgaaaacgacgcttatgttcacgngactccgctgatccgccgtctggcaccccagtttggtgttaaccttgcccaagtgaagggcactggccgtaaaggttggacagcacttcatgaagctagtgtaggaggattttatcggacagcaagtgaactattaaaaggtggagcagatgtaaatatcaaaggattataccagattactcccctacatgatgcagccaacctgacgccgttgttggcgattctcctgcacggactcggttttcctgtggggggtcacggggttagcgaagatccaacccgcgtgctgactgaaaccatttttgaattgatgggtattacgccaacgttgcacggcgggcatgcgcaggcgaagctcgacgaacatcaaccggtgtttatgccagtcggcgcgttttgcccgccgctggaaaaacaactggcgatgcgctggcggatgggcgtgcgtaacagtgcacataccctggcgaaactggcgacgccatttgccgaaggtgaggcgctgcgtctttccagcgtttcgcatccggaatacattggacgcgtcgcgaagttctttagcgatatcggcgggcgggcgctactaatgcatggtactgaaggtgaagtgtatgctaatccgcagcgctgcccgcagatcaatctcattgaccgtgaagggatgcgggtgctgtatgaaaaacaggacactgctggtagcgagttactgccacaagcaaaagatccggaaaccacggcgcagtggattgagcgttgccttgctggcagcgaaccgattcccgaatcgctgaaaatccagatggcttgctgcctggtggctacgggtgaagcggcaactatcagcgacggcctggcgcgcgttaatcaggcattttaa

SEQ ID NO: 28617 - DNA, 2853 bp, Homo sapiens; identical to SEQ ID NO: 26696
  SIMILAR (2233)..(2826): 981254mologous to Escherichia coli thiC,accession number M88701,Smith-Waterman Score=1060.

SEQ ID NO: 28618 - DNA, 1366 bp, Homo sapiens
  SIMILAR (532)..(332): 601254mologous to Escherichia coli O157:H7 putative N- acetylgalctosamine-6-phosphate deacetylase,accession number AE005542,Smith-Waterman Score=188.
ttatccagatttgttgcacatgtagcccgctatccagcgcaacgacgctggcgcgttgcccggtttaagcgatcccagaacaccatcaacacccagcattcgcgccggatgcagcgacgccatatggatggcttccgcaggcgttacgcccgtcaactcgaccatattgcgcactgccgcatcaacagacagcgtactgcccgccagcccaccagacgcggtacggacaacgccaccgtgcatctgcacttcttcaccacataacgtatagcgaccatccggcatcccagctgcctgcatcgcgtcggtgatcagtacgattctctctttcgcacagcaacaacacagcgacattgccgccggatgcacatgatgaccatcggctatcagttccagccaggcgcgcttgtccgttaatcccgcgccaaccatttcccgggtcgcggtgatgtaaacctgtcatcccgttatagcaatgcaccaggccgtcggcaccagcatcaaatgcggcgcgggtttgttgccaggtcgcagtaggtgtcgccgtacctttcgctgtcgcagtacagatggggattaccttcctgttctcggtgatgatgtaacaaacctccacatgaccccttgaatcccacactaccggttctgttattggctcccacagtctagaatttccatgatattctgcatagtgacccaccacggacggtttgaccatcggcgcgttgctatgataacgcaggctctggttgacgagatcgttattgaatgtggtagaaagccacaccggcgtgtcgttatcggccagcgtcagcagcacgctggtggtggcgatattcagcggttgccagccgcgtttgagctgatgcagggcgacaatcacgcccggctcgctcatggcctttaacaggcgacgaaaactgtgctgggcatccatcgtaaagaagtcgacccggctggcgttcacttcggcctggcgtgcggcaatgcgtgccatacggtcagcgtccagcggggcaataagggtttctgataagttttgaaagtggcgagattgctgcatcagcgcgtcaatcagcgcgcagcgttcggcgtgctgtttatcacgcccctgcacccagctgtagccgagcgtgccgtcagtcaggcgcacggcggcgcgggtcagcgtggcgtcgccggcaaaaaaacgttcgccggtgccgcccatccgcgcctgaatctgtaccaggccagtttcagcggcgcggatcacctcatagtcggcggtgatgtttagcgcgttcaggcgtgctgccagttcagccggttggctgtgcgccagcacggacatccagtgctggcgggtcgcggtatctgcgtgcat

SEQ ID NO: 28619 - DNA, 1440 bp, Homo sapiens
  SIMILAR (435)..(4): 961254mologous to Cloning vector pZC320 SopB,accession number U26464,Smith-Waterman Score=678.
tcagggtgctggcttttcaagttctttaagaatggcttcaattttctctatacactcagttggaacacgagacctgtacaggttaagcaccattttatcgcccttatacaatactgtcgctccaggagcaaactgatgtcgtgagcttaaactagttcttgatgcagatgacgttttaagcacagaagttaaaagagtgataacttcttcagcttcaaatatcaccccagcttttttctgctcatgaaggttagatgcctgctgcttaagtaattcctctttatctgtaaaggctttttgaagtgcatcacctgaccgggcagatagttcaccggggtgagaaaaaagagcaacaaatgatttaggcaatttggcggtgttgatacagcgggtaataatcttacgtgaaatattttccgaatcagtcaaaatgctcgtccagtatactctcacaccagtcagggttccccagatgtattcattctgcagatctgttggtttgcacctgtgcagcatggcgatcagatgaagatcacccataaagaaatcaacggcagggacccaagcataggagtatacggtggcgcgtctggtgggctggcgggcagtacgctgtctgttgatgcggcagtgcgcaatatggtcgagttgacgggcgtaacgcctgcggaagccatccatatggcgtcgctgcatccggcgcgaatgctgggtgttgatggtgttctgggatcgcttaaaccgggcaaacgcgccagcgtcgttgcgctggatagcggggaagcgaccgccgacctcgaaacggaaaacgtaactatcgaaggctggatcggcccggtagaaatcgaccagatcaaaggtaagaccattaccgttgtgcaacttctgcgtgcgggtcttggtatgatggacggtgtgctggaaaacgttttccagaaactggtttctaacatcgatgagcgtatggcgctgatcgttgacccaatgctggcaaccggtggttccgttatcgcgaccatcgacctgctgaaaaaagcgggctgcagcagcatcaaagttctggtgctggtagctgcgccagaaggtatcgctgcgctggaaaaagcgcacccggacgtcgaactgtataccgcatcgattgatcagggactgaacgagcacggatacattattccgggcctcggcgatgccggtgacaaaattgtctttcattgccatgcggaactccggatgagcattcatcagtcgggcaagaatgtgaataaaggccggatagaacttgtgcttatttttcttagcggtctttaacaagaccgtaatatccagctgaacggtctggttataggtacattgagcaactgactgcaatgcctcaaaatgttctttacgatgccattgggatatatcaacggtggtatatccagtgatttttttctccat

SEQ ID NO: 28620 - DNA, 1866 bp, Homo sapiens
  SIMILAR (319)..(1068): 931254mologous to Escherichia coli fatty acid oxidizing complex,accession number M59368,Smith-Waterman Score=1151.
  misc_feature (1)...(1866): n = a,t,c or g
atgatcgggccgcgtattttgccaggtaagattgagttcgcggttaagcgcctcatcttcattaccttctgtcggcttatcgttaatcgccgtcagccgcgcccgcaccaccggataaaacgattccgggactatctgatgttccgcgaggaacgctttagcggtgcacctgttcgggatcctctagggtcactagaggaggcgccgcccccccttccaatgagggggctacaaatgggcgaaaaatttgtggacaacgaatcaatgggtgacgaaaccagggaacaacacggctggcgtttagaagaagcacagaaggggcgccaaaacgtccgggaaaatattccccccggtaaagattgcgccccgtatacgcgnctgaaaaccgttctggtggatggcgtagtcaaagcagaaaaactggttgaaggcgcaaaggcggttttacgccaggccattaacggcgacctcgactggaaagcaaaacgtcagccgaagctggaaccactaaaactgagcaagattgaagccaccatgagcttcaccatcgctaaagggatggtcgcacaaacagcggggaaacattatccggcccccatcaccgcagtaaaaaccattgaagctgcggcccgttttggtcgtgaagaagccttaaacctggaaaacaaaagttttgtcccgctggcgcataccaacgaagcccgcgcactggtcggcattttccttaacgatcaatatgtaaaaggcaaagcgaagaaactcaccaaagacgttgaaaccccgaaacaggccgcggtgctgggtgcaggcattatgggcggcggcatcgcttaccagtctgcgtggaaaggcgtgccggttgtcatgaaagatatcaacgacaagtcgttaaccctcggcatgaccgaagccgcgaaactgctgaacaagcagcttgagcgcggcaagatcgatggtctgaaactggctggcgtgatctccacaatccacccaacgctcgactacgccggatttgaccgcgtggatattgtggtagaagcggttgttgaaaacccgaaagtgaaaaaatacccgtcagcgggcgttttccatcagctttattgccgcgatgtggtgatcccaatgttcgccatttacacctttggcccgcaaatcgttggtttgttgggattgggggttggcaaaaacgcggcactagggaatgtggtgattagcctgttctttatgctcggctgtattccgccgatgctgtggttaaacactgccggacggcgtccattgttgattggcagctttgccatgatgacgctggcgctggcgcttttggggctaatcccggatatggggatctggctggtagtgatggcctttgcggtgtatgcctttttctctggcgggccgggtaacggctttaaccgcgtcaaagaagagttcgaccatgaacgtttcctggtagccctcaccaactacggtacggcgatgtgcgcctttgaagatgcggcgcgctacgccaatcagcgcgtgcagtttggcgaggctattggtcgtttccagttgattcaggaaaaattcgcccacatggcgatcaaattaaactccatgaaaaacatgctgtatgaagcagcgtggaaagcagacaacggcaccatcacctctggcgatgcagcgatgtgcaaatacttctgcgccaatgcggcatttgaagttgtggatagcgcaatgcaggtgctgggcggtgtcgggattgcgggcaaccaccgcatcagccgcttctggcgtgatctgcgtgtagaccgcgtctccgggggatctgacgaaatgcagatcctgacgctgggtcgtgcggtgctgaagcaataccgctaa

SEQ ID NO: 28621 - DNA, 3900 bp, Homo sapiens
  SIMILAR (33)..(191): 671254mologous to Escherichia coli K12 probable ornithine aminotransferase,accession number AE000389,Smith-Waterman Score= 157.
atgcggaatttaaaatcgctcggtacaacccgggcccggagtttatcgccggccgggaagttttggaattttcaaccgtgggcacccgtaatccacttgtgtctcccgccgtacagaatccacttgcgaaacatccgctgcacagccaggagctgctcgatccgttacgggcgatgttggcgaaaacccttggctgcgctaacgcccggtaaactgaaatacagcttcttctgtaatagcggcaccgagtccgttgaagcagcgctgaagctggcgaaagcttaccagtcaccgcgcggcaagtttacttttattgccaccagcggcgcgttccacggtaaatcacttggcgcgctgtcggccacggcgaaatcgaccttccgcaaaccgtttatgccgttactgccgggcttccgtcatgtgccgtttggcaatatcgaagccatgcgcacggctcttaacgagtgcaaaaaaaccggtgatgatgtggctgcggtgatcctcgaaccgattcagggtgaaggtggcgtaattctgccgccgccgggctatctcaccgccgtacgtaagctatgcgatgagttcggcgcactgatgatcctcgatgaagtacaaacgggcatggggcgcacgggcaagatgttcgcctgcgagcatgagaacgtacagccggatatcctctgccttgccaaagcgctcggcggcggcgtgatgccgattggcgcgaccatcgccactgaagaggtgttttcagttctgttcgacaacccattcctgcataccaccacctttggcggcaacccgctggcctgtgcggcggcgctggcgaccatcaatgtgttgctggagcagaacttaccggctcaggctgagcaaaaaggcgatatacctcaccagcttgaagccatcgtcgaaaagcaccaaccggatgtgattggcctgcaggagacaaaagttcatgacgatatgtttccgctcgaagaggtggcgaagctcggctacaacgtgttttatcacgggcagaaaggccattatggcgtggcgctgctgaccaaagagacgccgattgccgtgcgtcgcggctttcccggtgacgacgaagaggcgcagcggcggattattatggcggaaatcccctcactgctgggtaatgtcaccgtgatcaacggttacttcccgcagggtgaaagccgcgaccattattgtgattttcttcccgctctttgtcgcccatggtcgctgatgatgtgttattcggtgttcctgtttttcttgttctttgctgtcccgcgcatcacttcgacaatgcctgacggcggcgaaatatcacccgcgctactggataaatgcagggtagaagggaaggcaaagctgaagactactgcggccagagcagcagagaagggcgtaattcataaacccgtactggggaaaaaacggcacgaacacagtgattcccgtaccgtcgataactggtgtgatgaccacgatcaaatcctcaaggcgctgattcgcaaagatcctcatgctgctaagctggcaatgtggcagcatctggaaaacaccaagatcatgttatttaacgaaaccagcgacgacttcgagttcaatgccgaccgctatctattcgccgaaaacccggtggtgcatctcgatacagccaccagcggcaaggtcgaccaaaacagggcagggcagcgtgcacgtgccactattttttgtaacacgcactttaaaaagcagttaagccgtgacgatatcgtctggacctactccggtgtgcgtccgctgtgtgatgatgagtccgactcgccgcaggctattacccgtgattacacccttgatattcatgatgaaaatggcaaagcaccgctgctgtcggtattcggcggtaagctgaccacctaccgaaaactggcggaacatgcgctggaaaaactaacgccgtattatcagggtattggcccggcatggacgaaagagagtgtgctaccgggtggcgccattgaaggcgaccgcgacgattatgccgctcgcctgcgccgccgctatccgttcctgactgaatcgctggcgcgtcattacgctcgcacttacggcagcaacagcgagctgctgctcggcaatgcgggaacgatgattgatgtcttagggccggagaaacgcagacggcgtaccacacaggaaaagatcgcaattgttcagcagagctttgaaccggggatgacggtctccctcgttgcccggcaacatggtgtagcagccagccagttatttctctggcgtaagcaataccaggaaggaagtcttactgctgtcgccgccggagaacaggttgttcctgcctctgaacttgctgccgccatgaagcagattaaagaactccagcgcctgctcggcaagaaaacgatggaaaatgaactcctcaaagaagccgttgaatatggacgggcaaaaaagtggatagcgcacgcgcccttattgcccggggatggggattgcacgtcattctcagacgaaccgatgactggatggatggccgccgcagtcgtcacactgatgatacggatgtgcttctccgtatacaccatgttatcggagagctgccaacatgccaactacagtcaacaactcgccatcgagacagcagcaaaccatcagcgacgcgctggaaacatcagcctgaacgtgaaggaggtcaccacgggcaaccagacgctaaccatcactcaggacacctccaaagcgcaaacggcgattaaagactgggtgaatgcgctacaactcgctaatagataccttcagcagcctgaccaaatacaccgccatgcgggagctgatagccagagttctagcaatggtgcactgctcggcgactccacgctgcggacgattcagacgcagttgaaatcgatgctgagtaataccgtcagttcttccagctataaaacgttggcgcagattggtatcacgaccgatcccagcgatggcaaactggaactggatgccgacaaactcaccgctgcactgaaaaaagatgccagcggcgtaggtgcattgattgttggcgatggtaaaaaaaccggcatcacgaccaccatcggcagcaacctgaccagttggctttcgacaacgggcattattaaagccgctaccgatggcgttagtaagaccctgaataaattaactaaagactacaacgccgccagcgatcgcattgatgcgcaggtcgctcgctacaaagaacaatttacccaactggacgttttaatgacctcgttaaacagcaccagcagctacttaacgcagcagttcgaaaacaacagtaattccaaaccctggctccactggatttccgcacggatcattattagccccgcgttctggatgttctggcgtacctggcgcgtcgtacgcaactggctggagaatatgcacgggcatgattatgagcatcatcatcacgatcacgaacatcaccacgaccatggacatcatcaccatcacgaacatggcgagtatcaggatgcccatgcacgagcccatgccaatgacattaaacgacgctttgatggtagagaggtcaccaactggcaaattttgttatttggcttaaccggtggccttatcccctgcccggcagcaattaccgtgctgttgatatgcattcagttgaaagccctgacactgggcgcaacactggtcgtcagtttcagcattggcctggcgttaacgcttgtcaccgtaggcgttggcgcagcaatcagcgttcagcaggtcgcaaaacgctggagcggatttaacactctcgctaaacgcgccccctatttttccagtctgttgattggcttagtcggtgtgtatatgggcgtacatggcttcatgggcataatgcgataa

SEQ ID NO: 28622 - DNA, 1521 bp, Homo sapiens
  SIMILAR (211)..(783): 541254mologous to Salmonella typhimurium 30 kDa protein similar to E. coli yadD and yhgA,accession number Z29513,Smith- Waterman Score=549.
atgggaaatcggacaaaagaggatgaactgtaccgagaaatgtgcagagttgtcggtaaagttgtgctggaaatgcgcgatctggggcaggaaccaaagcatattgttatcgcaggcgtattacgtacagcattagccaataaacgcattcagcgcagtgagctggaaaagcaggcgatggaaaccgtcattaacgcactgggcaatcccggttatctgcatgttgtgattgaacaccaaagcaagccggataagaaaatggcctttcgcatgatgcgttattctatagccgccatgcaccggcatctggaggctgaccacgataagctgccgctggtggtgccgatactgttttatcagggcgaggccacaccttatccgctatcaatgtgctggtttgatatgttttactcgccggagctggcgcgacgcgtctataacagtcctttcccgctggtggatatcaccatcacaccggatgacgaaatcatgcaacatcggcggattgcgattctcgaactactgcaaaaacatattcgccagcgcgacttaatgttattgcttgagcaactggtcacgctgatcgacgaagggtacactagcggaagtcagttagttgccatgcaaaactatatgctgcaacgcggtcatactgaacaagcggatttgttttacggtgtgttgagagacagggaaacgggaggggagtctatgatgacgctggcgcagtggtttgaagagaaagggattgagaaggggattcagcaggggaacgaacagcggaaaaggttaaaggtccaggggaaactttcccgccccaaggcgttccttcctgagtcaaggaatgtctcgggaagacgttgcagagatggcaaatttcctcttgctgagatgatacgtattaacttattaagtactgtgtcgacgatacgggcgcaaataaaattaaccaagcgagccacatgcgagggaactgctaatgacggtgcggggtttgcaaatggttccacagccgcagataaagcaagtgctgtcgccgttgaagtctggagcactgtaactccggcaacagggagtgcaacacaatttagctgtgtaacaccagcatcacaagaggtaacaatctccactgcagccaatgcggtcgtttattatccgatgagtgcacgcctggtcgtggaaaaaaataaaaccgtaaacaatgtcactgcggccattgctggacaggatattgaccttgttgccaatgtaaaaaacagcacctgcaaaagcggaatcagtaaccagcgtaatattgatcttggcgtcgttggggtgggatatttttcaggtaatgttactcctgaaagttatcaaccaggtggaaaagagttcactatcactgtatccgactgtgcattacagggaactggcgatgtgctaaatcagttacatattgattttagagcccttagcggtgtcatggctgctggctctaaggcaatatttggtactgaaattcggcacgagccagtaatgtag

SEQ ID NO: 28623 - DNA, 3129 bp, Homo sapiens
  SIMILAR (3129)..(2248): 1001254mologous to Escherichia coli K12 putative transport protein,accession number AE000114,Smith-Waterman Score=1550.
ttaacgcccggttcttccagcaattaggcacacgctacttaactgccagatcttgcccgccataccaagcaactggttacgggccttgtttagggcatcgggacccagcccagccggatcatttacctcaaagtcgaaacccgttgccgtgcccagttcaacaatggctggcatattgaatggaatgacgaaaccgtcgcggatcttgcccaattccattttggcacgatggattaccgcttccgcactgttttcgtcaccattacgctcttcccacggtttcagactgacgaaggccataccggcgttttgtgcctggccgctgaagctaaagccgttaaccgtaaagacactttcaacgttcgctttctcgttcttcagatagtaatccgtaacttgatccaacactttttgcgtccgctcttgcgtcgcgccagcgggtaactgaatcatggtcagaaagacaccctgatcctcttcaggtaagaaggaagacggaagacgtaaaaacaacaccaccattcctgcaacaatcagcgcatagatcagtaaatatcgtcctgtggatccgaggattttcgccgacgctgttggtgtagtggttaacgcgaagaaaccgcccttattttcgtgatgctcagcagagacgggtttaagcagcgttgcacataacgcaggggtaagaatcaatgccaccagaacagaaagcgccattgccgaaacgatggtgatagagaactggcgataaattgcccccagtagaaccgccgaagaatgccatcggaataaataccgctgacagccacactgtccgagaatgctaaaccggtcaatatcggataacatgccacagagggggcccgggtacatcacgcagggcgcgaggatgccggtaatcgcggtctggcgtaacaggttggagacgttacgggcgcttaagtaggcaccatcggtggtccaggtaaagaacagcatgattgcgatgatagctgcaatcatcacgaagacctgctcctgagtcaggttatgatttatcaggttggcttttagtttcccttcatgcatcaccagtacacgatcgctaaggccgagcacttcaggtaattcggaagagatgacaataacggcaataccctgctggacgagttggttaattaatttgtagatctcgtatttcgcgccaatatcgataccccccggccgggagaagttgatggcaaaagtaccaatttgaccacccaggtagtcaacgttgaacaccagttcctgcggcagcgcttcttcgtcacgccagataacccagccgcagcccagcggagccagaccgaatttatggcctgaagcactgatcgatttcacacgcggcaggcggaagtcccagacgatatccggggcgacgaacggtgccaggaagccaccgctggcagcgtcgatgtgcatgtcgatgtcgataccggtatcggcctggaatttatccagcgcatcgtgcagcggttgtgggaactcatagttaccagtgtaggtcacgccgaaagtcggcaccacgccgatggtgttttcgtcacaggcttcaatcatgcgtttcgggtccataaacaactgaccggggcgcatagggatctcacgcagctccacatcccagtagcgggcgaatttatgccagcagatttgtaccggaccgcacaccaggtttggtttatccgttggtttgcctgcagcttccatacgcttgcgccaacgccatttcatcgccatcccgccgagcatacaggcctcggaagaaccaatggtgttggtgccaacggcctgaccatttttcggcgcaggcgcatgccacagatcggcaaccatatttacgcaacgcaggtcgatggctgcggattgcggatattcttctttgtcgatccagtttttacataagtggaaaggccaataactcagcggctgcgacagcacatcaaagcccggatgcgcaccaatttcaaaatggctttccccgccgccggtcgtcaccgcccacagcaaatgtttgccatgcagcgccgtgccgccatgaccgtaagcccagccgtgggagaaaactttatcgatccaaagtttgaggagcggaggaatgctgtaccactgcatcggatgctgccagacgatcagatcggcgcgagacagcgcctcctgctcggcggcaatatcgatattgaagtcaggatagagttgataaagagagcgaatttcgacgccttccagcgtccccattctctgcccgcggatcgtcatattgctggtctgcgccagtgacatccctcgagtctccggggcaaacgctacggaaatcaacaagccaaacagcgagatacccgcccccattagcatcgtgttactgataccgtaattattgataaagatcggtagtgcccaggtcgaaacaatggtgccaatacgacttaaggacataatcacgcccacggcagaggcgcggatatctgtcgggaagagttcattaggatagagccactgcaaattacccggcccgccagagaaaaaggcatacaccgcaaaggccatcactaccagccagatccccatatccgggattagccccaaaaccgccagcgccagcgtcatcatggcaaagctgccaatcaacaatggacgccgtccggcagtgtttaaccacagcatcggcggaatacagccgagcataaagaacaggctaatcaccacattccctagtgccgcgtttttgccaacccccaatcccaacaaaccaacgatttgcgggccaaaggtgtaaatggcgaacattgggatcacctggcaggtccagatggcggcaacaaacagaacaaaaggaaaatggcggcgattaaacagatcgcgaaaacgggtttgctgcggctgctcttcatcgaaagccaccggttcgccaaacagtttgatcatcatctcttcgcactcttttactcgccctttgcgtaataaccagcggggagattcaggcagttcgaatcgaccaatcaaaatcaacaaacaggggatcgccgcgctacccagcatccagcgccagccgccttccacatcataaagccagtagccgaccagatcggcacaggtcgcgccgacataccacat

SEQ ID NO: 28624 - DNA, 1348 bp, Homo sapiens
  SIMILAR (605)..(670): 521254mologous to Escherichia coli glycerophosphate dehydrogenase,accession number M55989,Smith-Waterman Score=47.
atgcatctgccttcgccttatggcattcgcctgatcaaaggcagccatattgtggtgccgcgcgtgcatacccagaagcaagcctacattctgcaaaacgaagataaacgtattgtgttcgtgatcccgtggatggacgagttttccatcatcggcactaccgatgtcgagtacaaaggcgatccgaaagcggtgaagattgaagagagtgaaatcaattacctgctgaatgtgtataacacgcactttaaaaagcagttaagccgtgacgatatcgtctggacctactccggtgtgcgtccgctgtgtgatgatgagtccgactcgccgcaggctattacccgtgattacacccttgatattcatgatgaaaatggcaaagcaccgctgctgtcggtattcggcggtaagctgaccacctaccgaaaactggcggaacatgcgctggaaaaactaacgccgtattatcagggtattggcccggcatggacgaaagagagtgtgctaccgggtggcgccattgaaggcgaccgcgacgattatgccgctcgcctgcgccgacgctatccgttcctgactgaatcgctggcgcgtcattacgctcgcacttaccgcaggaacagagaagctgctgctcggcaatgcgggaacgctcggtaccgtgcgcgaaagcgaaaggctgggaagtgaaagtagaaacccagggtcaattggtctggaaaatgaactgactgcggaagatgtggcgagcgctgatatggtgattctgaccaaagatatcggcatcaagtttgaagagcgttttgctggcaagaccatcgtgcgcgtcaacatcagcgatgcagagttcctcatgacgaatcgtatctctcgcctcaaaactgcactgtttgccaatacccgtgaaatctcgctggagcgggcgctgctttataccgccagccatcggcaaaccgaaggcgaaccggtgatattgcgccgggcgaaagcaacagcgtatatccttgaacatgttgaaatttcgattcgtgatgaagaactgattgccggtaaccgcaccgtaaaaccgcgcgccgggattatgtcgccggaaatggacccttactggctgctgaaagagctggatcaattcccgacgcgtccgcaggaccgctttgctatcagcgaagaagataaacgtatctaccgtgaagagttgttcccgtactgggaaaaacgttcgatgaaagatttcatcaacgggcagatgacagatgaagtaaaagccgcgaccaacacgcagattttcagcatcaaccagacggataaaggccagggcacattattattgattacccacgcctgttga

SEQ ID NO: 28625 - DNA, 1446 bp, Homo sapiens
  SIMILAR (1)..(561): 871254mologous to Escherichia coli pantothenate synthetase,accession number L17086,Smith-Waterman Score=812.
atggctaacctgcacgccactcatatgaagctgggcgacgaatccttttcctttgccgatgtggtcgacgccagtattttcgttaacccgatgcagttcgaccgcccggaagatatggctcgttatccacggaccttgcaggaggactgcgagaagctaaacaaacgtaaaggggatttagttttcgccccttcggaaaaagagatctacccgaacggtactgaaacccacacttacgttgacgttcctggcctttcgaccatgctggaaggtgccagccgcccgttacattttcgcggcgtttcgactattgtcagcaagctgttcaacctggtccagccggacatcgcctgcttcggtgaaaaagattttcagcaactggcgctgatccgcaaaatggttgccgatatgggcttcgatattgagattgtcggtgtgccaattatgcgcgccaaagacggtctggcgctaagttcccgcaacggttatctgacggcggaacaacgcaaaattgcgcctgccgccatgcaccggcatctggaggctgaccacgataagctgccgctggtggtgccgatactgttttatcagggcgaggccacaccttatccgctatcaatgtgctggtttgatatgttttactcgccggagctggcgcgacgcgtctataacagtcctttcccgctggtggatatcaccatcacaccggatgacgaaatcatgcaacatcggcggattgcgattctcgaactactgcaaaaacatattcgccagcgcgacttaatgttattgcttgagcaactggtcacgctgatcgacgaagggtacactagcggaagtcagttagttgccatgcaaaactatatgctgcaacgcggtcatactgaacaagcggatttgttttccggtgtgttgagagacagggaaacgggaggggagtctatgatgacgctggcgcagtggtttgaagagaaagggattgagaaggggattcagcagggaagacaggaagggaccacccggttaccatttactcctaacctcccccccccccccacacccaccaccccccactctcaccccgccccaccacccttcccaatcaaccaccactatccactcacgcccccaacacccaacccgacgccactcctcacgcgggctgttgcattcctgtgggtatacgatgcagcgattcgcctgccgaatacggtagccgtttgccaccaatgtccaggtgagatcaatgtcttcgactttagtacgatccgagaaaccgaacttacgcaatacatcagtacggaacatcccgcaggcaccgctgataataaacggagctgctgtagcgtgcgcttcataacaatcatcggcaactttacggtcgcgcggatgtgcggtaacagacccgcgcctttcaacgcagtagaagggaaattgccggcttaa

SEQ ID NO: 28626 - DNA, 1650 bp, Homo sapiens
  SIMILAR (7)..(78): 911254mologous to Escherichia coli sensor-regulator protein barA,accession number D90894,Smith-Waterman Score=101.
acctgaaatacgattgaacgttcggcaaataatttgctggcaattattaatgatgttctcggcttctcgaaacctgaaaccaggtaagctgattctggaaagtattccattcccactacgcagcacgctggatgaagtcgttactctgctggcacattcttctcacgataaagggttagaactgacgctcaatattaaaagcgacgtgcctgataacgtgatcggcgacccgctgcgattacagcaaatcatcactaacctggtggggaatgcaattaaattcaccgagaatggcaacattgatattctggtagaaaaacgtgcgctgagtaataccaaagtgcagattgaagtgcagattcgggatgccggcattggtattcctgaacgcgatcaatcgcgcttattccaggccttccgacaggctgatgccagtatttcccgccgtcatggtggcaccgggctggggctggtgattacacaaaaactggttaatgaaatgggcggcgatattccgttccatagccaggcgaatctcggtacaacaatatggttccacattaatctcgatctgaacccgaacattattatcgaagggccatccacccagtgcctcgcaggtaagcgcctggcctatgtcgaaccaaactccgcagcagcgcaatgcacgctggatattttaagtgaaacgccgctggaagtggtttatagcccaacgttctccgcgctgcctcccgcgcattacgacatgatgttgttaggcatcgcggtgaccttccgcgagccgctaacaatgcaacatgagcgattagcgaaagcggtatcgatgaccgatttcctgatgctggcacttccttgccatgcacaagtcaatgctgaaaaactcaagcaagatggtatcggcgcgtgtctgctgaaaccattaacacctacacgcctgttgcctgccctgacggaattttgtcatcacaaacaaaacacgcttttgcctgtaaccgatgaaagtaagctggcaatgacagtcatggcggttgatgacaaccccgctaacctgaaacttatcggcgcattgctggaagatatggtgcaacatgtggaactttgcgatagcgggcatcaggcggttgaacgggcgaaacagatgccgccggcccggggtatccacccgcgcgctagtggcaccacctggggccccgggtctcacaacccgggcatcctcaaacgtcaccgggcgcttgctggtcggaaaatccgacaacacgttcaaacccgtgggccgtcaggtcgacaaggggaagaacctattgccatgtcagcaatgaacgcagctaaccacttgaaaggcgttacggcgatcatcaccatgaccgaatcgggtcgtaccgcgctgatgacctcccgtatcagctctggtctgccaattttcgccatgtcgcgccatgaacgtacgctgaacctgactgctctctatcgtggcgttacgccggtgcactttgatagcgctaatgacggcgtagcagctgccagcgaagcggttaatctgctgcgcgataaaggttacttgatgtctggtgacctggtgattgtcacccagggcgacgtgatgagtaccgtgggttctactaataccacgcgtattttaacggtaga

SEQ ID NO: 28627 - DNA, 2745 bp, Homo sapiens
  SIMILAR (2041)..(2742): 1001254mologous to Escherichia coli K12 putative transport protein,accession number AE000114,Smith-Waterman Score=1208.
atggcaaagcaccgctgctgtcggtattcggcgctgaccacctaccgaaaactggcggaacatgcgctggaaaaactaacgccgtattatcagggtattggcccggcatggacgaaagagagtgtgctaccgggtggcgccattgaaggcgaccgcgacgattatgccgctcgcctgcgccgccgctatccgttcctgactgaatcgctggcgcgtcattacgctcgcacttacggcagcaacagcgagctgctgctcggcaatgcgggaacggtaagcgatctcggggaagatttcggtcatgagttctacgaagcggagctgaaatacctggtggatcacgaatgggtccgccgcgccgacgacgccctgtggcgtcgcacaaaacaaggcatgtggctaaatgcggatcaacaatctcgtcccgctatccagcgcaacgacgctggcgcgtttgcccggtttaagcgatcccagaacaccatcaacacccagcattcgcgccggatgcagcgacgccatatggatggcttccgcaggcgttacgcccgtcaactcgaccatattgcgcactgccgcatcaacagacagcgtactgcccgccagcccaccagacgcgaaaaacgtgcgctgagtaataccaaagtgcagattgaagtgcagattcgggataccggcattggtattcctgaacgcgatcaatcgcgcttattccaggccttccgacaggctgatgccagtatttcccgccgtcatggtggcaccgggctggggctggtgattacacaaaaactggttaatgaaatgggcggcgatatttcgttccatagccagccgaatcgcggttcaactttctggttccacattaatctcgatctgaacccgaacattattatcgaagggccatccacccagtgcctcgcagggaaaccaatttcttcccctatggtcgccgcacgcatggggcgcgatcgttctaagcctctgcgtaaaaactgggagtcggtcaaagaacaggtgatgcgaaaagcacttcgcgctaaattcgaacagcatgcagaactgcgtgcgctcttgctggcaaccgcgcccgcaaaactggttgagcatacggaaaacgatgcttactggggagacggtggtcatgagagcctgaaaggacacagcacggacgtgctctattccgtgcaaatgcagggcaatcccggttatctgcatgttgtgattgaacaccaaagcaagccggataagaaaatggcctttcgcatgatgcgttattctatagccgccatgcaccggcatctggaggctgaccacgataagctgccgctggtggtgccgatactgttttatcagggcgaggccacaccttatccgctatcaatgtgctggtttgatatgttttactcgccggagctggcgcgacgcgtctattacagtcctttcccgctggtggatatcaccatcacaccggatgacgaaatcatgcaacatcggcggattgcgattctcgaactactgcaaaaacatattcgccagcgcgacttaatgttattgcttgagcaactggtcacgctgatcgacgaagggtacactagcggaagtcagttagttgccatgcaaaactatatgctgcaacgcggtcatactgaacaagcggatttgttttacggtgtgttgagagacagggaaacgggaggggagtctatgatgacgctggcgcagtggtttgaagagaaagggattgagaaggggattcagcagggaagacaggaagtaagtcaggaattcgcccagcgtcttctgagtaaaggaatgtctcgggaagacgttgcagagatggcaaatttacctcttgctgagattgataaggttaaaaacaatgagcacaaaaccactcttccgttacggaaagcgaaaaaatcatccggtgaacctgacgtcgtcctgtgggcaagcaacgattttgaatcgacctgtgccactctggactacctgatcgttaagtcagcaccagacaacgctcactatcaaggcaatgaagagatgatgatcaaactgtttggcgaaccggtggctttcgatgaagagcagccgcagcaaacccgttttcgcgatctgtttaatcgccgccattttccttttgttctgtttgttgccgccatctggacctgccaggtgatcccaatgttcgccatttacacctttggcccgcaaatcgttggtttgttgggattgggggttggcaaaaacgcggcactagggaatgtggtgattagcctgttctttatgctcggctgtattccgccgatgctgtggttaaacactgccggacggcgtccattgttgattggcagctttgccatgatgacgctggcgctggcggttttggggctaatcccggatatggggatctggctggtagtgatggcctttgcggtgtatgcctttttctctggcgggccgggtaatttgcagtggctctatcctaatgaactcttcccgacagatatccgcgcctctgccgtgggcgtgattatgtccttaagtcgtattggcaccattgtttcgacctgggcactaccgatctttatcaataattacggtatcagtaacacgatgctaatgggggcgggtatctcgctgtttggcttgttgatttccgtagcgtttgccccggagactcgagggatgtcactggcgcagaccagcaatatgacgatccgcgggcagagaatggggtaa

SEQ ID NO: 28628 - DNA, 1146 bp, Homo sapiens
  SIMILAR (522)..(584): 611254mologous to Escherichia coli O157:H7 putative enzyme,accession number AE005531,Smith-Waterman Score=77.
atgccgctctgtttgagtggcggcatttgtgaaggcggaaaactcgatggcggagtttgtcacttcggcattgatagacttcgacgcaagagtgttcgactcgcggttgaactcctgcatcataaaatccagacgacgaccaaccgcttcttttttcttcagaatgttgtaggtctctttgacatgcgcttcgaggcgatccagttcttcggcaacgtcaattcgttgtgccagcagaaccagttcctgctccagacggttgttttccagttgcacctgagcatcttccacgttcgcgaccagacgctcacgctgccattgcaggatttccggcatatgggagcggactttgaccacttcggcggtgacgccttccagacgctgctcgatcaatgctttcagtgcctagacttcggtttcgcgcgcgacaataaagtcgtccagcgtaccatccagcgccgcgagaatttcagcggcaatggcgtcaagatcctgctcctgggctcgccatcacgcccggccagcaactgttcatcaccattaagctttggaacgacgaccaccaagcgcccccgcgaagccttgctcgacagcctgaaaaaactccagcttgattatatcgacctctacttaatgcactggcccgttcccgctatcgaccattatgtcgaagcatggaaaggcatgatcgaattgcaaaaagagggattaatcaaaagcatcggcgtgtgcaacttccagatccatcacctgcaacgcctgattgatgaaactggcgtgacgcctgtgataaaccagatcgaacttcatccgctgatgcaacaacgccagctacacgcctggaacgcgacacacaaaatccagaccgaatcctggagcccattagcgcaaggagggaaaggcgttttcgatcagaaagtcattcgcgatctggcagataaatacggcaaaaccccggcgcagattgttatccgctggcatctggatagcggcctggtggtgatcccgaaatcggtcacaccttcacgtattgccgaaaactttgatgtctgggatttccgtctcgacaaagacgaactcggcgaaattgcaaaactcgatcagggcaagcgtctcggtcccgatcctgaccagttcggcggctaa

SEQ ID NO: 28629 - DNA, 1732 bp, Homo sapiens
  SIMILAR (1005)..(343): 941254mologous to Escherichia coli K12 putative flagellin structural protein,accession number AE000144,Smith-Waterman Score= 1100.
atgaacaaagcgcactttgttagcaatctcggggcaactaaatgttgccccctttcgtttttaccctaccgctggcgtcgggtcatcgcctttgtagtcgcgttttacttccgtcacctcatcgaccttctcgttgtgcagatgcacttcaagctggttaaaggcaatgttgatgtcgttttcacggcacagctgatcgatagtacggttcagctcatcgacagtacgactacggtcacgcagttcacgcacatacagacgcagctcatgatccaacgtgctggcaccaaatgccgtaaagaagacttccggcattgtgtaggtatcctagaacctgaatggtacccgattatcgttgttagagtcgtcgtagacgtaagccagtttgaagtacggagtcagagcctgatcttcgctgtaggtgaaggtataacctgcatctacacccagttcataacgcatgctgtcgtaagactgaccgtcaactttcatgtcgttgctcagctgtcatcaccagactggaacagaccagaaacgctgcccgtaaggagtcacgtaaccagcatcacccagtttgaagtcgtaaccggctttcaaaccgaagccccaagcgtcggagttggtgctaccgtcaacgtaagtaccgttgctcatggttgcagacaggtcgttgttgaagtgagagtagctcaagctaccatcaacaaagacgttgttcgcgaagtgagcagaagagtagatgtaggcagtctggctgtcttgatccacctgaccagaacggtcattcatgtcacctttagcgaagcctgcagccgcaccgacgatccacttagcgttgttaccgtcaattttggtatcaacaccgaccatgatgccgttaacatcctgatcatagttgatggtgccgttgtcgccgttgaagttaccaccgaagtagcttacccatgcgccgccgttatcagccaggccatgacgagagttggtcagacgagtaccaacggtgtctggacgatatcgtcagtgaatgcatttcagataagaacaggggcagcgagatcactggcccccccctggtcattaaccgagaaggtcttttgcggaacgacgatggaacgcatgcgggctgctttagaggcgatcatgccatttaccgaatcttccagcgctacgcaggcaccttacttaccctgtggccgggaatgcggcttggctgtaaggcagtttttcggccgaggcgagggcatcgaaactgtcgcgtacctatttcgaataattcgggtcgtcagaacaagagttctctccatcggcggtttctccaggactcgaatttcatcaacgccagtgaaaatagcgactcttcgccaaaacagatcggattgtcacgctgccatgattgctgacacatatcgtcaagtgaccccaacagacccattttcccggcacccattttcacgtgtcttgcgtggtcttttctttatcatctttaaagatacgaaagcgcacaacggcatcggcatgatcggcggcgtcaaccgccgcgccgattatttgaatctgctggaaaaagtatttggcgatcgtgtttccagcccgcaatggcaggctacgttgaaagcgatcgttccgtcttatggacgcaagctgaacggtgatgtagcggcaacagaacgcgagttgcagtacaccagcgaagtggtggggttgaactacgacaagccgcaggcagcagata

SEQ ID NO: 28630 - DNA, 624 bp, Homo sapiens
  SIMILAR (624)..(469): 981254mologous to Escherichia coli BIOB,accession number A11530,Smith-Waterman Score=276.
atgattgctgacaatatcgtcaatgacccaacgaccattttccgccaccattttcagtgtctgcgtggtcttttctttatcatctttaaagatacgaaagcgcacaacggcatcggcatgatcggcaaaggatttcttatgagcgaacaaatcacgtttgccaccagcgattttgccagtaacccggaaccacgttgcccgtgcattttgctgctggatgtttctggttctatgaacggtagacctattaatgaacttaacgccggattggttacctttcgtgatgaactgcttgctgatccgctggctttaaaaagagtggaactcggcattgtgacgttcggcccggtgcatgtggaacaaccctttaccagcgccgctaatttttttccgcccatcctgtttgcccagggcgatacaccaatgggtgcggccattaccaaagctctggatatggtagaggagcggaaaccgcgagctttgcgggcagtatttgcaatcttccggacaagctccggtcttaatcgacagcaacgtgctgacctgcacctgacgaggatcgaaatgctggcgatgcacctgctgcgcttcaaacagcagatccagcaacggtttttcaaataa

SEQ ID NO: 28631 - DNA, 455 bp, Homo sapiens
  SIMILAR (26)..(265): 311254mologous to Homo sapiens Skn-1a/Epoc-1/Oct-11 POU transcription factor,accession number AF162278,Smith-Waterman Score =85.
tgaccagttcggcggctaacatgcaaattctcccggtggcggtaatgttccgctaccggacttttcagaaatcatttattcccctcgcgtcccgcccgttgttactcttccttgttcaggaatgccaaatataaggacatcatcatgcagagccggaagctcttaaaagaacaactcatctatatccgggataaacgcaacggagaggtgaaaaacagatgaaaataatacttctgtttttagcagccctggcaagttttaccgtacacgcacagcccccctcacagaccgtagaacaaacagtccggcatatttatcagaactataaatcagatgccactgccccttattttggtgaaaccggagagcgggcgataacttctgcgcgtattcaacaggcgcttaccctgaacgacaatcttacgctgcaaggaaatattggctggctggattat

SEQ ID NO: 28632 - DNA, 1200 bp, Homo sapiens
  SIMILAR (837)..(448): 691254mologous to Plasmodium lophurae histidine-rich protein,accession number X01469,Smith-Waterman Score=699.
atgcgtggagacaattgtagtggtgcttgtggtggtggtggtggcgacggcggtggtggtggtgacggtggtggtggtgatggtggtgtgggtgatggtggtgatggtggcaatggtggtggtggtagcaatggtggcagcagtggtggtgatggtggcgatggtggcaatggtggtggtggtggcagtgattgtgttggtggcaatggcagtggtggtagcggtggtgaggatggtggcgatggtggtggtggtggtggcggtggcagcggcggtgatggtggtggtggtgatggttgtagtggtggtggtgatggtggcgatggtggtggtggcggtggcggcagcggtgaaggtggtggcagcggtagtggtggtggcagtggcggtgatagtggcaatggtggttgtggtggtggtgatggtggtggtgtggtggcggcagcggtggtggtggtgatggttgtggcagtggtgatggtggcggtggtggtggtgatggtgatggtgttggcggtggtggcggtggcagtgatggtggtggtggtgatggttgtggcagtggtgatgatggtggtgatggtggtggtggtgatggttgtggcagtggtgatgatggtggtgatggtggtggtggtgatggtggtgggggcagtggtggttgtggtgacagtggcagtggcagtggcggtggcagttgtggtggcggtggtggtgatggtggtggtagtggtgatggtggtggtggtggtgatggtggtgatggtggtggcggtggtggcagtggtgatgatggtggtggtggttatggtggtgatggtgatggtggtggtgatgcacgcactcacaccccacaccaccaccagcaaagcccactctacagccatgggaagaccttcaggcttggacacctatagaagttcatgtaaggctaggaagtttacacaccctggtttctctgtggggcagaccgtggtagacataacagtggaatcagaaagagcaataaagaagctatatctcaagtctaggaaaagagccttacgaatgaagaagcaacttctcgatgagttatataaacttacatacaatcttgaggttatagaaagattgaagccttggatcctgaaaaattatcttccacaaaaccggtccctggtgccaaaaaggttgcggactgctgctgtgaaggacctctag

SEQ ID NO: 28633 - DNA, 4107 bp, Homo sapiens; identical to SEQ ID NO: 26162
  SIMILAR (2770)..(3492): 991254mologous to Escherichia coli yjdB,accession number U14003,Smith-Waterman Score=1293.

SEQ ID NO: 28634 - DNA, 1371 bp, Homo sapiens
  SIMILAR (481)..(975): 991254mologous to Escherichia coli O157:H7 putative enzyme,accession number AE005531,Smith-Waterman Score=877.
atggtggcaatggtggtggtggtagcaatggtggcagcagtggtggtgatggtggcgatggtggcaatggtggtggtggtggcagtgattgtgttggtggcaatggcagtggtggtagcggtggtgaggatggtggcgatggtggtggtggtggtggcggtggcagcggcggtgatggtggtggtggtgatggttgtagtggtggtggtgatggtggcgatggtggtggtggcggtggcggcacggttgaaggtggtggcagcggtagtggtggtggcagtggcggtgatagtggcaatggtggttgtggtggtggtgatggtggtggtgtggtggcggcacggtggtggtggtgatggttgtggcagtggtgatggtggcggtggtggtggtgatggtgatggtgttggcggtggtggcggtggcagtgatggtggtggtggtgatggttgtggcagtcgtgatgatcgtcgtatagtgtggcccgttcccgctatcgaccattatgtcgaagcatggaaaggcatgatcgaattgcaaaaagagggattaatcaaaagcatcggcgtgtgcaacttccagatccatcacctgcaacgcctgattgatgaaacgtgcgtgacgcctgtgataaaccagatcgaacttcatccgctgatgcaacaacgccagctacacgcctggaacgcgacacacaaaatccagaccgaatcctggagcccattagcgcaaggagggaaaggcgttttcgatcagaaagtcattcgcgatctggcagataaatacggcaaaaccccggcgcagattgttatccgctggcatctggatagcggcctggtggtgatcccgaaatcggtcacaccttcacgtattgccgaaaactttgatgtctgggatttccgtctcgacaaagacgaactcggcgaaattgcaaaactcgatcagggcaagcgtctcggtcccgatcctgaccagaatgccaaatataaggacatcatcatgcagagccggaagctcttaaaagaacaactcatctatatccgggataaacgcaacggagagaccgtagaacaaacagtccggcatatttatcagaactataaatcagatgccactgccccttattttggtgaaaccggagagcgggcgataacttctgcgcgtattcaacaggcgcttaccctgaacgacaatcttacgctgccgggcaatattggctggctggattatgatccggtttgtgattgtcaggattttggcgatctggtgctagaaagcgttgcgataacccaaactgacgccgatcatgccgatgccgttgtgcgctttcgtatctttaaagatgataaagaaaagacacgcagacactga

SEQ ID NO: 28635 - DNA, 1179 bp, Homo sapiens
  SIMILAR (381)..(100): 921254mologous to Pseudomonas aeruginosa probable bacteriophytochrome,accession number AE004828,Smith-Waterman Score= 414.
tcaggtagaccagcaccgggccgccgggcaaggccgtgatgacggacgttgctcagcaggttggcggcgacctgggcgtagcggtccgggtcgaccacgtgcacgaacatgcgggtcgatggcgatctcgatcaccaggccgggataggcgacgtcggtttcgcagacgatctgccgcaccagttgcgagacgtcggtgtcgaccgggttcacggtgaggccgatgcccgattgcaggcggctcatgtcgaggatctggctgaacagccgctccatgcggctgctggacgcggaaatgtgttggcgcagttcggtggtgcgggtgtcgctggaggacagcagggccgccgccatggagatcgactcggccgcatggttgaggcacagttccatcaggtccaggcgcagcttttcggcgatcgccaggtcggtttcgctccagggcgtggagtggccgcggaccacttcctcccaggcctcgaacgagccgcgcggggtcagctgcgggccggaggggccgatggtcaacagcttttccggcttgccgccccagcggatgcggtgcacttcctcgtggcggaaccagaagatccagcccgattcctggcggtggaaacggatcgccagcacaccgcagcagtcgccgccgtccggagagtcaaagctgggctgcggccagttgtcggtgtggtagatgtcccgttccgggtcgcgctgcaggcgttgcaggatattcccggcctggcgctcgaagtcgctgcggatgctcagggtgcggccgccgagcatgaccagggcgccgtcgcagggaatcagtgcggcgatgccatcgtccgggtgggccagtgcgccgaacaggtcgtcggcgtcctgcgcgcggcgagccagggccagcctgcgctcggtggacacgcgcagcagttcggcgatacgcccctgctccaggcgctcgacgatggcgctgcagacgtggtgcaggttaacggtaaagtccgtgccaaaatcatcgttccggtggacgcaacggaagaacaggttcgcgaacgtgctggccaggaacatctggtagcaaaatatcttgatggcgttactgtacgtaaagtgatttacgtaccaggtaaactcctcaatctggtcgttggctaagcgcgggaggaagcgtgcgatatctggcaacat

SEQ ID NO: 28636 - DNA, 1527 bp, Homo sapiens
  SIMILAR (959)..(930): 601254mologous to Escherichia coli Xanthosine operon regulatory protein,accession number D90771,Smith-Waterman Score=41.
ttactcgatccctttactacgcaggtaatcttcgtaattaccgctaaagtcgatcacgcgttccggggtgatttccagaatgcgggtcgccagggagcttacgaactcacggtcgtgtgaaacaaagatcagcgtgccctgatacagttccagtgccatgttcagcgactcaatggattccatatccaggtggttggtcggttcgtccatgatcagaatgttcggcttctgcatcattaacttaccaaacagcatccgccctttttccccaccggaaagcactttagctggctttttgatgtcgtcctggctgaacagcaaacgaccgagaatactgcgtaccgcctgctcgtcatcgccttcctgcttccactggctcatccattcgaacacggtcagatcattttcaaactcatatacgtggtcctgagcatagtaaccaatgcgcgcgttctcagaccattttacggtgccggcggaacagctgaagataccgatcgccaggataccgattaacgtcgatggaatggtgattgccagcagatcgaggaactcaagatggcgaccatcaaaggtgacattacccagcatcgcaaccagagacacgaccgcaaccgacaccggactggcgataatccccatctgtgcaccgatagaacttgccgccatcggacgttccggacggatgttgttcttaatggcgacgtcgtagatgatcggcagaatggtgtaaaccacatgacccgtaccgcaaagaatggtcagtgtacaggtcacaaacggcgcgacaattgagacatatttcgggttgcggcgcagcagcttctcggcaatttgcagcatgacatcaagaccgcccgaagcttgcaaggtcgccgatgccgccaccaccgcaatgataaccagcatgacatcaactggtggtttacctggcgatgtggaagatacaagtaatggccgatgatctataatggtgacactgacgggggacacttcggcgagaaaataatccggtgagccgacaatagccatgggtatatctggcccgattcgaatggcgatcatatctttatccatctccccacccagacggacgcctgcatcaaaacgttcagaaacgacatcggtcaaaccataatcaatggtgagctgaatatcaatttcaggatgcgatttcaggaatgtgcgcattgctggtaacaatatcgtttttgctgcatgttctacagtagtaatacgtattgtcccggatgggcggttctgcagatcgctcagggatgccatggctgaatctatgtcatgcaacatagggccaagaacagacaaaagatgctcgcccgcttcagttggaacaacgctgcgcgtggttcgcgtcagaagccgcaatcccaatcgttcttctatacgacgcactatctggcttaaagctgactgcgccatgctcaggcgggctgctgcacgagtgaagctacgctcctctgcaacgacgacaaacgccatcagatcagcgatttcttcacgcttcat

SEQ ID NO: 28637 - DNA, 2205 bp, Homo sapiens
  SIMILAR (1)..(702): 991254mologous to Escherichia coli K12 putative mutase,accession number AE000413,Smith-Waterman Score=1204.
atgaaagatgtcacgctggtgcgtccgcaagatgcgggagcgaatacatgtgctcacatcctgagccagttgccgcatttgcagctaccaacgctggagacgctggggctaatcaacgcattgggttatgcgccaggcgatatgcagccgtcagattccgcaacctggggcgtggcagagctgcaacatgaaggtggcgatacctttatggggcatcaggaaattttaggcacgcgcccgttaccgccgctgcggatgccttttcgcgatgtgattgaccgtgttgagcaggcattagtttccgctggctggcaggtggagcgccgtggcgatgatctgcaatttctgtgggtcaatcaggcggttgcgattggcgataatctcgaggcggatttaggccaggtctataacattaccgccaatctctctgtgatctcttttgacgacgcaatcaaaattggtcgtatcgtgcgtgagcaggtacaggtcggtcgggtcattacatttggtggcctgttaaccgacagtcaacgcattctcgatgccgcagaaagcaaagaagggcgctttattggtatcaatgcgccgcgttctggcgcttatgacaacggtttccaggtcgtgcatatgggctatggcgtcgatgaaaaagtgcaggtgccacaaaaactgtatgaagcaggcgtgccaaccgtgctggtggcgcaccaccagcgtgtttttgccattttcgcggtcgctattgatatcacgcaggttattaatattcagtactgccgttgccagcaggccgcatgcggtcgccggaaggatcagtgccggaatcaatccaaagaaaaccagtacggaaatatcacccagaccgatataaccataaggacgattgcccacggtgtaggtgatagcggcaatgatcgacaacccgccaagaatcaggaaaccgacaaaatcggccagctaactctggtggccgttattttatctcttggcggtaagtttattcactttatggaaccgttatcgcgtgtttcatggtttgtcggcgtcatcgtcgcctttgcggcctacgccttattaaagaaacgtacaacagcagaaaaaacaggagagcaaaaaaccatagaaaacgaagctcgcgttgtagatatcgccgttaaaggcggaaaaattgctgctatcggtcaggatctgggcgatgcaaaagaagttatggatgcgtctggtctggtggtttcgccgggcatggttgatgcgcacacccatatttctgaaccgggtcgtagccactgggaaggttatgaaaccggtactcgcgcagcggcaaaaggtggtatcaccaccatgatcgaaatgccgctcaaccagctgcctgcaacggttgaccgcgcttcaattgaactgaagttcgatgcccgcggtgtttgcgctccgcattgtgtttattcgccgccgtttccagctttcgggaagctcaatctgccctttccccgtccttttgcgccgtcctctgcgttggcggattccgcccttcacattttctacgaatttgtgcccttccccccggtctgcacgtatcacctgctgatcatcgtcatgctgttattgctgttaacgctggtgctgacgggcctggcaccgcatctgtttcggagaaacacagtgaacgttaattcatcgtcaaatcgtggcgaagcgattctcgccgccctgaaaacgcagttccccggcgcggtgctggatgaagagcgacaaacgcctgaacaggtcaccattacggtgaaaatcaatctgctgcctgacgttgtacagtatctttattatcaacatgatggctggcttccggtcctgtttggcaacgacgagcggacacttaacggtcattacgcggtttattatgccctttcaatggaaggggccgaaaaatgctggattgtggtgaaggcgctggtcgatgccgacagtcgggagtttccgtcagtcacaccgcgcgtccctgccgcggtctggggcgagcgagaaattcgcgatatgtacggtctgattaccggttggcctgccggatcagcagtcgcctggtgttgcccaatgactgcctggtaccgagctagcggcgttttttttcggcccaaatctcttatgtccccctttgtgccgaaattcctttacgctttctctataattcagggccaaaattttgtcccataa

SEQ ID NO: 28638 - DNA, 690 bp, Homo sapiens
  SIMILAR (241)..(528): 971254mologous to Escherichia coli Lipoprotein rlpB precursor,accession number D90704,Smith-Waterman Score=467.
atgaataactatggcagcgagggacgcagactcacacacgacacaaaatacgcgtgcgaccaagcgaacgacggcacgacaaaaagacacaaagacagacagagacactgtgtcgcggtgtgtgtagaaagacacacgaacacgcacgcgcacgcacagagaaaacagatgagcgcacgagggagagacgtgagagtattaagacatatacgcaacaacaaaagagcaaagaaaacacacgcagagtatcagatgatcatgacggttaatgcgaccgtgttgatccccggccgtgatatctacccgattagcgccaaagtcttccgttcgttcttcgataacccgcaaatggcgttacgaacagataacgaacaagacatgatcgtaaaagagatgtacgaccgtgctgccgaacagctgattcgtaagctgccaagcatccgtgctgcggatattcgttccgacgaagaacagacgtcgaccacaacggatactccggcaacgcctgcacgcgtctccaccacgctggtggcatcaggcaatagtgaccaaattttgggtatagcccacctgcgtccagctgcggccaggtttcacaaaattcttcgtaactgcaatgcagcgtatcagggcgcgacaaaatgctgcgtaccggaccgtgtgccagaacagtttcgtcttcatatttaa

SEQ ID NO: 28639 - DNA, 2703 bp, Homo sapiens
  SIMILAR (2026)..(2700): 1001254mologous to Escherichia coli ALS OPERON REGULATORY PROTEIN,accession number D90883,Smith-Waterman Score=1125.
  misc_feature (1)...(2703): n = a,t,c or g
atgaattcgttacaaatcttgagttttgtcggttttacgctgctggtggcggtgatcacctggtggaaggtccgcaaaacagataccggatcgcaacaaggctattttcttgccggacgttcactaaaagcgccggttattgccgcttcgttaatgctaaccaacctttccacggaacaactggtcggcctttccgggcaggcctacaaaagcggcatgtcggtgatgggctgggaagtgacttcagcggtgacgctgatcttcctcgcgctaatctttttaccgcgctatctgaagcgcggcattgccaccatccccgattttctggaggaacgttatgataaaacgacgcgtattatcatcgacttctgcttcctaattgccaccggcgtctgctttctgccgattgttctctactccggcgcgttggcgctcaacagcctgtttcacgtcggggaatcgctacagatttctcacggtgcggctatctggctactggtaaatttgcttggtctggcgggaattttgtatgcggtgatcggcggactgcgcgcaatggcagtggccgactccatccaccgtattgggctgtaccaaactcatctgaaaaagcaggccagctatattgtggaaggcaatgccgaaagcaaaagggcgctacgccagcacaaccgggagcagataaaacagcatccagaatggtttcctgctccgctcaaggcgagtgacagacgctggcaggcgctggcggaaaacaaccactttttaagcagcgaccatctgcataacattaccgaagtggcgattcaccgcctggagcagcagcttggcaagccttacgtctggggcgggattctatacagtcgtgtgaacgtcgtggactgcggcgatctggtatatgcctttggcgatgcccgtgagatgagcgaaaagctgcaagcgcacgccgagaagctgctggctgccggcaagcgtatactctcttataggggtgaccactttgttacgctgccgctgctgcgtgctcatgctaagcattttggcaaaatggcgctggtacactttgacgcccacaccgatacctatgcgaacggttgggaatttgaccacggcactatgttctataccgcgccgaaagaaggtctgatcgacccgaatcattccgtgcagattggtattcgtaccgagtttgataaagacaacggttttaccgtgctggacgcctgccacgtgaacgatcgcagcgtggatgacgttatcgcccaagtgaaacagaatgtgggtgatatgccggtttacctgacttttgatatcgactgcctggatcctgcttttgcaccaggcaccggtacgccagtgattggcggcctgacctccgatcgcgctattaaactggtacgcggcctgaaagatctcaacattgttgggatggacgtagtggaagtggctccggcatacgatcagtcggtaatcactgctctggcagcgtcaacgctggcgctggaaatgctgtatattcagtcggcgaaaaagggcgactttcgaaggctaaggcaacaagatatcaacagtccatcggcagaagccgcgcctgtagaagatggtctggcgcaattgtacgttctgccgccgctaagcacgctgaccattcatgttgggaaacgcaaaattaaactgcgcccggaagagttacagaaagtcactggcgaacgtggacgccgcgttgagtgccgtaaacctacagacgctgaaagctacggcaatgctatctatatcgctaaccaccagaacaactatgacatggtgacagcatcgaacatcgtgcaaccgccgacggtgacggtaggtaaaaagagcttgctgtggatccccttcttcgggcagttgtactggttaaccggcaacttattgatcgacagaaacaatcccactaaagctcacggcaccattgcggaagtagtgaatcacttcaaaaaacgccgtatttccatctggatgttttttcgatacaggggaantggcgcagcactgaactttacccgtgcggcggaaaaactgcatacctcacagccttcgttaagcagccagatccgcgatcttgaaaactgtgtcggtgttccgttactggtgagggataagcgcaaagtcgcgttgacggcggcgggagaatgttttctccaggacgcgctggcaatcctcgaacaagcggaaaatgccaaattacgggcgcggaaaattgttcaggaagacagacaattaaccattggctttgtgccatcggcggaagtgaatttactgccaaaagtattaccgatgtttcgtctcagacagccagacaccttgattgagctggtgagtttaatcaccacgcaacaggaggaaaaaattcgccgtggtgaactcgacgtcggcttaatgcgccatcctgtttatagcccggagattgattatctggagctttttgacgaaccattagtggttgtgttaccggttgatcaccctttagcacatgaaaaagagatcaccgccgcgcaactggatggcgtgaatttcgtcagtaccgatccggtgtattccggttcgcttgcgccgatcgttaaagcgtggtttgcgcaagaaaacagccagccaaatatcgtccaggtggcaacgaatattctggtgaccatgaatctggtgggcatggggctgggcgtcacttga

SEQ ID NO: 28640 - DNA, 3132 bp, Homo sapiens; identical to SEQ ID NO: 8818
  SIMILAR (2303)..(2458): 941254mologous to Escherichia coli VisC,accession number D90281,Smith-Waterman Score=229.

SEQ ID NO: 28641 - DNA, 823 bp, Homo sapiens
  SIMILAR (347)..(625): 921254mologous to Salmonella typhimurium parF,accession number M68936,Smith-Waterman Score=451.
gcgggccgcggtggcgcccgcacttcctgcggcgagcgtgcgctggcgggctcccaccgggccgagtgggagaccccggtccgtcgcgggacgccagtcggtcacgggcggaccgcgaccacgggacggcgcggcgctcccctgttgaaatccggttcggtgcgtcgctaattccgcttgcgcaggggtatgcatcccccggaaacgataaaaattcccttgaaacctttgtttattcatgcgttgcgattaacaatacgcttttccagagagcggcttttaacaatgccctaacctgatttcaggtgacgtacaatgccagtctctcagaccttcagagggtgttatgctatatatctttcgtcttattattaccgtgatttacagcatcttagtctgggtattcggctccatttaatgccttttcagcccgcgtaacccgaaacatgtggccacctttgggcatatgtttggccgtcttgcgccgctgtttggcctgaaagttgagtgccgtaaacctacagacgctgaaagctacggcaatgctatctatatcgctaaccgccagaacaactatgacatggtgacagcatcgaacatcgtgcaaccgccgacggtgacggtagaaacaatcgcactaaagctcacggcaccattgcggaagagtgaatcacttcaaaaaacgccgtatttccatctggatgttcccggaagaacccgcagccgtggtcgcggcctgctaccgttcaagactggagcattcacgcggcaattgcggcgggcgtcccgattattcccgtgtgcgtctctaaacttcgaataa

SEQ ID NO: 28642 - DNA, 2670 bp, Homo sapiens
  SIMILAR (658)..(1338): 991254mologous to Escherichia coli Adhesin AIDA-I precursor,accession number D90839,Smith-Waterman Score=1153.
atgaaatccttttcaaggaattgcgatcatcaagtattcagtgcgctgctgattaacgccggtatcgatcgcggaaacaccgatgagatcgtgcaatcaatcgctgactatattgatgtcgatgactcaccacgctttcacggcgcagaagatagcttttaccaaagccagacgccgccccggcatagtgccaatcagatgctttttctgactggcgaattacgtcagataaaaggcataaccgaaaacatctatcagcggcttatcccgtatgtctgcgttctcccgaccacggaacttagcatcaatcttaatatgctaacggagaacgatattccgctcttcagagcgttattcctcaataacatcacggatgctgacgctcgggtcttattgcaaaaaaggccgagggaaggctggctaaccacggatgcatttctttactgggcgcagcaggatttctccggtgtgaagccactggttgctcagtctccgtccacaaaaaaaagaaagagaaacgagacacctttagatttgctggtcttgagcttcactcggcgcgaaccagtggggtacaagagactggggcacctggttgggcatttctgtcggtaccggttcaagtccgacttcgggggaataccctacgagctctccacgactctgaagctgaccggcagcactgtgctgaacggtgccattgaccccacgaatgtcactctcgcctccggtgccacctggaatatccccgataacgccacggtgcagtcggtggtggatgacctcagccatgccggacagattcatttcacctccacccgcacagggaagttcgtaccggcaaccctgaaagtgaaaaacctgaacggacagaatggcaccatcagcctgcgtgtacgcccggatatggcacagaacaatgctgacagactggtcattgacggcggcagggcaaccggaaaaaccatcctgaacctggtgaacgccggcaacagtgcgtcggggctggcgaccagcggtaagggtattcaggtggtggaagccattaacggtgccaccacggaggaaggggcctttgtccaggggaacaggctgcaggccggtgcctttaactactccctcaaccgggacagtgatgagagctggtatctgcgcagtgaaaatgcttatcgtgcagaagtccccctgtatgcctccatgctgacacaggcaatggactatgaccggattgtggcaggctcccgcagccatcagaccggtgtaaatggtgaaaacaacagcgtccgtctcagcattcagggcggtcatctcggtcacgataacaatggcggtattgccccaatctatatcgctaaccaccagaacaactatgacatggtgacagcatcgaacatcgtgcaaccgccgacggtgacggtaggtaaaaagagcttgctgtggatccccttcttcgggcagttgtactggttaaccggcaacttattgatcgacagaaacaatcgcactaaagctcacggcaccattgcggaagtagtgaatcacttcaaaaaacgccgtatttccatctggatgttcccggaaggaacccgcagccgtggtcgcggcctgctaccgttcaagactggagcatttcacgcggcaattgcggcgggcgtcccgattattcccgtgtgcgtctctacaacttcgaataagattaatcttaatcgactgcacaacggtctggtgattgtcgaaatgctgccgccaattgacgtcagtcagtatggcaaagatcaggaaaaccatagaagaatgggtttggggctgtttccaggcaaggccagcagagtttccataaacacatcacaggctggcacaaaggagatgcagaaggagcagccgcagcatgtacagtcaaaagcacctggcacctctgcttttgatcccgcgaagaatgatccgctgagtcgtgccgtgcttggtgaacacagcctcgaagatggcatagatggcttccttggattgacctggaatcaggagttagccgcgacaatcgaccgactggaatcactggatcgaaatgaactgcgtaaacagttttccattaagcgactcaatgaaatggagatttatccgggagtgaccttttcagaagagttagaggggcaactctttgcctcgatcatgcttgatatggaaaagctgattagcgcgtatcgacgtttccaccggggcaaatgcggcgttacccaggatggccaatccccgcggtataccgaagctcggcccgcaacttcgcgagacatcgaaggtgagcgcctgattgaagcctctgccggcacaggcaaaacctttacgattgcggcgctctatttgcgcctgttacttggactaggcggttccgccgcctttccccgcccgctgaccgttgaagaactgctggtggtcacctttaccgaggctgccacggcagaattgcgcggtcgtatccgtagcaatatccacgagttgcgcatcgcctgtctgcgtgaaaccaccgacaatccactgtacgaacgcctgctggaagagatcgacgataaagcgcaagccgcgcagtggttgttgttagccgaacggcagatggatgaagcggcagtctttactattcacggcttttgccagcgcatgctcaacctgatgccttga

SEQ ID NO: 28643 - DNA, 2659 bp, Homo sapiens
  SIMILAR (569)..(1105): 961254mologous to Escherichia coli K12 putative ATP-binding component of a transport system,accession number AE000184,Smith- Waterman Score=875.
  misc_feature (1)...(2659): n = a,t,c or g
ggttgctgccgcggcgcaacgccccgctggccgccgttctctgtccgccccctcctcttccgcgcgggtctctcggcgccgtcgcgggccaccctctctcgccgggggtccgtagcgaccgggcacgggtcgttgttcagctgtgcagctccccgttcttctgctgcgcggcccccactcctctcacacggtcggtacccaccatggtggatctggattccggccagctgtgcgtttacccgggtaactccgatgagtccatgccggcggcgacccaggcgcgtgaacgtctgctggccgataccgccaagaagaaagcgcagattgctgagttgcaatctttcgttagccgctttagcgccaacgcctagaaatctcgccaggcaacttcgcgcgcgcgccagattgataaaatcaaactggaagaggtgaaagcctccagccgtcagaacccgttcatccgttttgaacaggataagaaactgttccgtaacggcgctggaagtggaaggtctgaccaaagggtttgataacggtccgctgtttaaaaatctcaacctggtgctgcgaagtgggtgaaaacctgccggtcctgggtaccaacggcgtcggtaaatcaacgctgctgaaaacgctggtgggcgatctgcaaccggacagcggcaccgtaaaatggtctgagaacgcgcgcattggttactatgctcaggaccacgaatatgagtttgaaaatgatctgcccgtgttcgaatggatgagccagtggaagcaggaaggcgatgacgagcaggcggtacgcagtattctcggtcgtttgctgttcagccagggcgacatcaaaaagccagctaaagtgctttccggtggggaaaaaggccggatgctgtttggtaagttaatgatgcagaagccgaacattctgatcatggacgaaccgaccaaccacctggatatggaatccattgagtcgctgaacatggcactggaactgtatcagggcacgctgatctttgtttcacacgaccgtgagttcgtaagctccctggcgacccgcattctggaaatcaccccggaacgcgtgatcgactttagcgnnttgggtaacccgtgccttcaccgcctgcggatcgtgaccgtcgatttcatggatcacatgccagtgataggcttcaaaacgttttgccgtatcgtcggtaaaccagccttctgtttcaccgtcgatggaaataccgttgtgatcgtaaaaaccaatcagcttgcccagtcccagcgtgcctgccagcgaacagacttcgtgggaaataccttccatcaggcagccgtcgcccataaacacataggtgaagtgatcgacgatctcatggtctggctggttaaactgcgccgccagtgtacgctctgctatcgccagcccgacggcactgatcctctcaaggcagaatctggcccaggatttcagacgctgacgctcacgctcgatattctcaagtttctcgttaaagcgcgcccaacgttcgtcatccaccaggcccagttcacgaccgatttcagtcaaacgcagatccgcatatcttcgcgtagcatcagacgatattctgcgcgcgaagagcgtgaagagaatcgcctgccgcactatgacaatgagagcgaggagaaccgtcgtgctagaagaataccgctgaatgttcactggatctcggctgccctgttgaagaatttaacgcattttgcgatgcccatcccgatcgtactggtcgtcgtctacgccaaacacttctgctgcggtaacctcgtgatcacactccgccaccagtgctgtactggctttccggtatggctggcgaatatcctcttctctgttatctggctgcgttacttccgccaggggccggtggaatggctctggcgtttttctggctccaacctgggagcctttcataataatgtgtttcttccattaaatggagaaatcaccaaagtcctggctgtgaaagagcatgatttgcttcaccagtcacattcgcaaacgcgatacccgctgatctccgagctgaaacagattctgctggagacctactacggtcgtgattatgtagaagtagcgctgtgtgcggcttcaataacgctcagcggaataccgtctttaatcgcctgctcgatgactttcggatcgttcggatcgaggaacacgtccagccagcaccgagaacgagaaagatctttaccagcgttgttgctctacactctctggagctactacaaaatgtgggggcgcatgacaacagaaactctccgcctgcgtcgcctcggtaaagtccagatgctggcacaggcagcggaagaacatcctctgcatggcggcactggtattgctcacactcgctgggcgacccacggtgaaccttcagaagtgaatgcgcatccgcatgtttctgaacacattgtggtggtgcataacggcatcatcgaaaaccatgaaccgctgcgtgaagagctaaaagcgcgtggctataccttcgtttctgaaaccgacaccgaagtgattgcccatctggtgaactgggagctgaaacaaggcgggactctgcgtgacgaacttttagaggaattcccccaccgccgggccagaccgatgcttccggaatccgccaacaaataa

SEQ ID NO: 28644 - DNA, 2820 bp, Homo sapiens
  SIMILAR (2164)..(2817): 991254mologous to Escherichia coli 1-acyl-glycerol-3- phosphate acyltransferase,accession number M63491,Smith-Waterman Score=1139.
atggcgcgatttgtggtgttagtgattgatagctttggcgtaggggcaatgaaagatgtcacgctggtgcgtccgcaagatgcgggagcgaatacatgtggtcacatcctgagccagttgccgcatttgcagctaccaacgctggagacgctggggctaatcaacgcattgggttatgcgccaggcgatatgcagccgtcagattccgcaacctggggcgtggcagagctgcaacatgaaggtggcgatacctttatggggcatcaggaaattttaggcacgcgcccgttaccgccgctgcggatgccttttcgcgatgtgattgaccgtgttgagcaggcattagtttccgctggctggcaggcggttgcgattggcgataatctcgaggcggatttaggccaggtctataacattaccgccaatctctctgtgatctcttttgacgacgcaatcagaattggtcgtatcgtgcgtgagcaggtacaggtcggtcgggtcattacatttggtggcctgttaaccgacagtcaacgcattctcgatgccgcagaaagcaaagaagggcgctttattggggacaggagtagggttgctctggtttgtgttagcgccagaattatgatgtttgcatctccggctgatatgactctcgaatggcaggaatccggtgtggaaggggctaaccgcttcctgaaacgtgtctggaaactggtttacgagcacacagcaaaaggtgatgttgcggcactgaacgttgatgcgctgactgaaaatcagaaagcgctgcgtcgcgatgtgcataaaacgatcgctaaagtgaccgatgatatcggccgtcgtcagaccttcaacaccgcaattgcggcgattatggagctgatgaacaaactggcgaaagcaccaaccgatggcgagcaggatcgcgctctgatgcaggaagcactgctggccgttgtccgtatgcttaacccgttcaccccgcacatctgcttcacgctgtggcaggaactgaaaggcgaaggcgatatcgacaacgcgccgtggccggttgctgacgaaaaagcgatggtggaagactccacgctggtcgtggtgcaggttaacggtaaagtccgtgccaaaatcaccgttccggtggacgcaacggaagaacaggttcgcgaacgtgctggccaggaacatctggtagcaaaatatcttgatggcgttactgttccttccactatgaaggtcatgatcctggactcaggcgatccgaacgggccattaagccgtgcggtgcgtaaccagttacgtctgaatggtgtcgagttgcttgataaagaaaccacgcgtaaggacgttccatccttgcgtttgggtaaagtgagcatcgcgaaagataccgcatcggtattccgtaacggtcaaacagcagagtatcagatgatcatgacggttaatgcgaacgtgttgatcccccgccgtgatatttacccgattagcgccaaaggtcttccgtcgttcttcgataacccgcaaatggcgttagcgaaagataacgaacaagacatgatcgtaaaagagatgtacgaccgtgctgccgaacagctgattcgtaagctgccaagcatccgtgctgcggatattcgttccgacgaagaacagacgtcgaccacaacggatactccggcaacgcctgcacgcgtctccaccacgctggtgggtgaaaaactggcggtactgggtaccaacggcgtcggtaaatcaacgctgctgaaaacgctggtgggcgatctgcaaccggacagcggcaccgtaaaatggtctgagaacgcgcgcattggttactatgctcaggaccacgaatatgagtttgaaaatgatctgaccgtgttcgaatggatgagccagtggaagcaggaaggcgatgacgagcaggcggtacgcagtattctcggtcgtttgctgttcagccaggacgacatcaaaaagccagctaaagtgctttccggtggggaaaaagggcggatgctgtttggtaagttaatgatgcagaagccgaacattctgatcatggacgaaccgaccaaccacctggatatggaatccattgagtcgctgaacatggcactggaactgtatcagggcacgctgatctttgttcacacgaccgtgagttccccgcgtaacccgaaacatgtggccacctttgggcatatgtttggccgtcttgcgccgctgtttggcctgaaagttgagtgccgtaaacctacagacgctgaaagctacggcaatgctatctatatcgctaaccaccagaacaactatgacatggtgacagcatcgaacatcgtgcaaccgccgacggtgacggtaggtaaaaagagcttgctgtggatccccttcttcgggcagttgtactggttaaccggcaacttattgatcgacagaaacaatcgcactaaagctcacggcaccattgcggaagtagtgaatcacttcaaaaaacgccgtatttccatctggatgttcccggaaggaacccgcagccgtggtcgcggcctgctaccgttcaagactggagcatttcacgcggcaattgcggcgggcgtcccgattattcccgtgtgcgtctctacaacttcgaataagattaatcttaatcgactgcacaacggtctggtgattgtcgaaatgctgccgccaattgacgtcagtcagtatggcaaagatcaggttcgtgagctggctgcccattgtcgttcgataatggttcaaaaaatcgccgagctcgataaagaagtcgcagaacgcgaagccgccggaaaagtttaa

SEQ ID NO: 28645 - DNA, 1092 bp, Homo sapiens
  SIMILAR (337)..(1083): 961254mologous to Cloning vector pBIOTRX-BirA Eschericia coli biotin-holoenzyme synthetase,accession number AF044308,Smith- Waterman Score=1214.
atgcgcaccaccaaactccctgatccaaaagtgaatggcaatgccggtagtttcttcaaaaaccctgttgtatctgccgaaacggctaaagcattactgtcacaatttccaacagcaccaaattacccccaggcggatggttcagtaaaactggcagcaggttggcttatcgatcagtgccagctaaaagggatgcaaataggtggggctgcggtgcaccgtcaacaggcgttagttctcattaatgaagacaatgcaaaaagcgaagatgttgtacagctggcgcatcatgtaagacagaaagttggtgaaaaatttaatgtctggcttgagcctgaagtccgctttattggtgcatcaggatacagcctgcctgagcctatccagttacttaatgctaaacagatattgggtcagctggatgtcggtagtgtagccgtgctgccagtgattgactccacgaatcagtaccttcttgatcgtatcggagagcttaaatcgggcgatgcttgcattgcagaataccagcaggctggccgtggtcgccggggtcggaaatggttttcgccttttggcgcaaacttatatttgtcgatgttctggcgtctggaacaaggcccggcggcggcgattggtttaagtctggttatcggtatcgtgatggcggaagtattacgcaagctgggtgcagataaagttcgtgttaaatggcctaatgacctctatctgcaggatcgcaagctggcaggcattctggtggagctgactggcaaaactggcgatgcggcgcaaatagtcattggagccgggatcaacatggcaatgcgccgtgttgaagagagtgtcgttaatcaggggtggatcacgctgcaggaagcggggatcaatctcgatcgtaatacgttggcggccatgctaatacgtgaattacgtgctgcgttggaactcttcgaacaagaaggattggcaccttatctgtcgcgctgggaaaagctggataattttattaatcgcccagtgaaacttatcattggtgataaagaaatatttggcatttcacgcggaatagacaaacagggggcttattactga

SEQ ID NO: 28646 - DNA, 1891 bp, Homo sapiens
  SIMILAR (151)..(570): 901254mologous to Cloning vector pZC320 SopA,accession number U26464,Smith-Waterman Score=679.
atggcggctaatgccaccggcagcttattgcctgtatatgtaaatcgtgcatattttactgaccacgcacggtatgaaaccgcagcagaataccgggaaagaattcgtctggatgctgtaaaaatgacggaatacctgcgtacaaaggttgaggatctggctctgaaggggctacgtgttttgctcgtggaaggtaacgacccccagggaacagcctcaatgtatcacggatgggtaccagatcttcatattcatgcagaagacactctcctgcctttctatcttggggaaaaggacgatgtcacttatgcaataaagcccacttgctggccggggcttgacattattccttcctgtctggctctgcaccgtattgaaactgagttaatgggcaaatttgatgaaggtaaactgcccaccgatccacacctgatgctccgactggccattgaaactgttgctcatgactatgatgtcatagttattgacagcgcgcctaacctgggtatcggcacgattaatgtcagatccccctatgatgtcatagttattgacagcgcgcctaacctgggtatcggcacgattaatgtcgtatgtgctgctgatgtgctgattgttcccacgcctgctgagttgtttgactacacctccgcactgcagtttttcgatatgcttcgtgatctgctcaagaacgttgatcttaaagggttcgagcctgatgtacgtattttgcttaccaaatacagcaatagtaatggctctcagtccccgtggatggaggagcaaattcgggatgcctggggaagcatggttctaaaaaatgttgtacgtgaaacggatgaagttggtaaagtgactggcgatgctgtcggaatggacgatatcccgcaagaggcccggcagtaccggcataaccaagcctatgcctacagcatccagggtgacggtgccgaggatgacgatgagcgcattgttagatttcatacacgtcgcctgaatcaaacggttcgtctgctgcttgagcatgagatgggacaggtttggatcagcggcgaaatttctaatttcacgcaaccagcttccggtcactggtactttacactcaaagacgacaccgcccaggtacgctgcgcgatgttccgcaacagcaaccgccgggtgaccttccgcccacagcatgggcaacaagttttagttcgcgccaatattacgctctacgagccgcgcggcgactaccagataatcgttgagagtatgcagccggccggtgaagggctgctgcaacagaagtacgaacagctcaaagcgaagttgcaggctgaaggactgctttccgttacccttttaagcggctgttcgctgtttaacagcgaagaagatgtggtaaagatgtccccattgccaaccgttgaaaaccagtttacgccgaccacggcgtggagcacttccgatggtagcggcattggcaacttctattccaatcttcatccggcactggcggacaacgttgtctatgcagcggaccgcgctggtttagtaaaagcgctgaatgcggatgatggcaaagaaatctggtctgtcagcctgaccgagaaagatggctggttctctaaagagcctgcattactttcttgccgtgtgaccagtgtctggccgaacaaccaaacagaaaagtttaataaacagcggacggaggggccggcggtggcggagccggagcaagcaggggttcggcggcattacctgtacccattcaccggcggctaccggcggcggcgcgcagcgtgtcaggcggagagacccgccgccagctttacgacttcaaaggaccgacaccgcgccagagtaccgctggcgcagatagattccgccaacaggcaagccggccgag

SEQ ID NO: 28647 - DNA, 3321 bp, Homo sapiens
  SIMILAR (2269)..(3315): 901254mologous to Escherichia coli O157:H7 PEP-protein phosphotransferase system enzyme I,accession number AE005472,Smith- Waterman Score=1530.
atggatatcatttctgtcgccttaaagcgtcattccactaaggcatttgatgccagcaaaaaacttaccccggaacaggccgagcagatcaaaacgctactgcaatacagcccatccagcaccaactcccagccgtggcattttattgttgccagcacggaagaaggtaaagcgcgtgttgccaaatccgctgccggtaattacgtgttcaacgagcgtaaaatgcttgatgcctcgcacgtcgtggtgttctgtgcaaaaaccgcgatggacgatgtctggctgaagctggttgttgaccaggaagatgccgatggccgctttgccacgccggaagcgaaagctgcgaacgataaaggtcgcaagttcttcgctgatatgcaccgtaaagatctgcatgatgatgcagagtggatggcaaaacagtttatctcaacgctgctgttgtataaaggagacgttatgcaggatttaatatcccaggttgaagatttagcgggtattgagatcgatcacaccacctcgatggtgatgattttcggtattatttttctgaccgccgtcgtggtgcatattattttgcattgggtggtactgcggaccttcgaaaaacgtgccatcgccagttcacggctttggttgcaaatcattacccagaataaactcttccaccgtttagcttttaccctgcaggggattatcgtcaatattcaggcggtattctggctgcaaaaaggcaccgaagcggcagatattctgactacctgcgcgcagttgtggatcatgatgtatgcgctgctttcagtcttctcgttgctggatgttattttgaatctggcgcagaaattcccggcagcatctcagttaccgctgaaagggatatttcaggggattaaactgatcggcgcgattctggtcggcattttgatgatctcgctgctgattgagggttacatcaccgtgcaggggcgcgagaaagatcagattaaccgtggcggcgagaagatcgctgccgaagagatcgaaaacctgctgctgcgccacccggcggtgatctacgccgcactggtgagcatggaagatgagctgatgggcgaaaaaagctgcgcttatctggtggtaaaagagccgctgcgcgcggtgcagaataaagttgactgggcctttgaaccgcaacgtgccgcgttgttaatccatgatatgcaggactattttgtcagcttctggggcgagaactgcccgatgatggagcaggtgatcgcgaatattgctgcgctgcgcgactactgcaaacagcacaatatcccggtttattacaccgcccagccgaaagagcagagcgatgaagatcgggcgctgttgaatgatatgtgggggccgggcctgacccgctcgccggaacagcaaaaggtggtggatcgcctgacgccagatgccgacgacacggtgctggtgaagtggcgctacagcgcgtttcatcgttctccgctggagcaaatgctgaaagagagtggacgtaaccagctgattattacgggactaactcagcagagagcagttctaataaggctgacaacaagacagagctatcgtgcaggaaccacaattggcgcatgcatgctggcaatgccgctagctgcggccggtgtaggttttagcgttacgttaatcttgttgattgggctttgggcgttgatgtgctacacggcgctattactgctggaggtgtaccagcatgttccggcagataccggtctgggcacgctggcaaaacgctatctgggacgctacggtcaatggctgacgggcttcagtatgatgttcttaatgtatgctctgactgcggcatacatcagcggtgccggtgaattgttggcctccagcatcagcgactggacaggtatttctatgtcggcaaccgctggcgtgctgttgttcacttttgttgccggtggcgtggtttgtgtcggaacttcactggtcgatttatttaaccgttttctgttcagcgccaagattatttttctggtggtaatgctgcgttcaaataccgttggtggacggttgcaaactggtgcaattacgtttctgccgccgttggcgtttgcactgttttatccacgaggatttgtgatggcgctgggttacgccggtgtggcgctggcggtactggcattgattatcccttcgctgttgacctggcaaagcagaaagcacaatcctcaggcgggttaccgggtcaaaggtggtcgtccggcgctggtggtggttgatcaggaagttgaacgttttctgagcggtcgtgccaaggcatcagcccagctggaaacgatcaaaacgaaagctggtgaaacgttcggtgaagaaaaagaagccatctttgaagggcatattatgctgctcgaagatgaggagctggagcaggaaatcatagccctgattaaagataagcacatgacagctgacgcagctgctcatgaagttatcgaaggtcaggcttctgccctggaagagctggatgatgaatacctgaaagaacgtgcggctgacgtacgtgatatcggtaagcgcctgctgcgcaacatcctgggcctgaagattatcgacctgagcgccattcaggatgaagtcattctggttgccgctgacctgacgccgtccgaaaccgcacagctgaacctgaagaaggtgctgggtttcatcaccgacgcgggtggccgtacttcccacacctctatcatggcgcgttctctggaactacctgctatcgtgggtaccggtagcgtcacctctcaggtgaaaaatgacgactatctgattctggatgccgtaaataatcaggtttacgtcaatccaaccaacgaagttattgataaaatgcgcgctgttcaggagcaagtggcttctgaaaaagcagagcttgctaaactgaaagatctgccagctattacgctggacggtcaccaggtagaagtatgcgctaacattggtacggttcgtgacgttgaaggtgcagagcgtaacggcgctgaaggcgttggtctgtatcgtactgagttcctgttcatggaccgcgacgcactgcccactgaagaaagacagtttgctgcttacaaagcattggctgaagcgtgtggctcgcaagcggttatcgttcgtaccatggacatcggcggcgactatgagctgccatactatgaacttcccgaaagaagagatccggtttcctcggctggcgcgctattcgtatcccgatggatcgtagaaagatcctgcgccgataagttccgggtattctgcggtgcttctggttttcggtaa

SEQ ID NO: 28648 - DNA, 1521 bp, Homo sapiens
  SIMILAR (1508)..(1422): 411254mologous to Escherichia coli multidrug resistant protein emrA,accession number D90891,Smith-Waterman Score=43.
atgatgtgtatcatgtatcgcaccgccagcagcctcgccaaccagtatcacatcgacagcgaacaggcccgacggggatcacagaatgcgtttgacgttaactttgaggcctggcagctggagatcaaccatgtgctggaagccgccagtgcgcaaagccagcgtaactatcagatttcggcactggtgtttatcagcatgattattgttgcggcgatctacatcagcagtgcgctgtggtggacgcgcaagatgattgttcaaccactggccattatcggtagccattttgacagcattgctgcgggtaatctggcgcgtccgattgcggtatatggtcgtaatgagatcaccgccatttttgccagtctgaagaccatgcagcaggctttgcgtgggacggtaagtgatgtgcgtaagggaagccaggagatgcacattggtatcgcggagattgtcgcaggcaataacgatctctcaagtcgtaccgaacagcaggcggcatcgctggcacaaacggccgccagtatggagcaattaaccgccacggtagggcaaaacgccgataacgcacgacaggcgctcggaactggcaaaaatgccgcgacaacggcgcaggcggcggctgttcagtttattgacaggtgccaggctgatttcacgcgcggtgcttaccgctaccggagtggaacgtactttatttgccagtacctgaccgtcacggttagtggtattgacgctcaccagcgtggacaaaccgatacgcagcggatattgctccagctgtttctggtccagttcgatacgcacaggcagacgctgaacgactttgatccagttaccggtcgcattttgcgctggaagcagctggaccgcgcggcgggagacataaccggtcatcggactgataatacgagtacgctccagcgccagccaggcgttacgtacttcggtggcagcctgttgcacggctggctgatcttccagtttagtccccagaatcatcgcctgattggcattgtattgttgaatcgcgacgtccagttgcgcctgggcactggtgacggcgtcgcgggcgtgttgcagctcttcgcgaccaatcaggttggcattgcccagcggcacacggcggttgtagtcgctttgtgctttcgcgagggcgattttctgcacctcaatattcgcctgcaactgcttgctgttaatcatcagctggtgggtttggcgaacgctggaagccagtgcagttttggctttttcaaacgcctggcgagcatctgtcgggtcgagagtgaccagcacgtcgccttcttttacaaaatcggtgttatcggcccagactttcgtcacgctgccagacacctgagacataatttgaatttgattccctgccacgtatgcgtcatcggtttcttcgaagtgacgcagtaccaaaaaccaataaatccctatcgctacggcaataattataaagagcaggtgagaaggaggagcagacgcttacgttgccgatcttcttag

SEQ ID NO: 28649 - DNA, 3090 bp, Homo sapiens; identical to SEQ ID NO: 26092
  SIMILAR (1105)..(1812): 1001254mologous to Escherichia coli SERINE/THREONINE PROTEIN KINASE AFSK (EC 2.7.1.-),accession number D90880,Smith-Waterman Score=1208.

SEQ ID NO: 28650 - DNA, 1990 bp, Homo sapiens
  SIMILAR (703)..(1320): 991254mologous to Escherichia coli SERINE/THREONINE PROTEIN KINASE AFSK (EC 2.7.1.-),accession number D90880,Smith-Waterman Score=1045.
tcctgcgtgaacagggtattgccgaatttaaattaccggatcgcgtggagtgtgtggattcacttccgctgacggcggtcgggaaagtcgataaaaaacaattacgtcagtggctggcgtcacgcgcatcagcctgaaggagagaacccgatggctattccaaaattacaggcttacgcactgccggagtctcacgatattccgcagaataaagttgactgggcctttgaaccgcaacgtgccgcgttgttaatccatgatatgcaggactattttgtcagcttctggggcgagaactgcccgatgatggagcaggtgatcgcgaatattgctgcgctgcgcgactactgcaaacagcacaatatcgcggattaagtcggggcccaccagaaatatcacagcgatgaagatcgggcgctgttgaatgatatgtgggggccgggcctgacccgctcgccggatcagcaaaaggtggtggatcgcctgacgccagatgccgacgacacggtgctggtgaagtggcgctacagcgcgtttcatcgttctccgctggagcaaatgctgaaagagagtggacgtaaccagctgattattaccggggtatatgcccacattggctgtatgaccaccgcaaccgacgcatttatgcgcgatattaaaccgtttatggtggtgcccccatgccaccgggtgaacttcgcacagtttacgccgaccacggcgtggagcacttccgttggtagcggcattggcaacttctattcctatcttcatccggcactggcggacaacgttgtctatgcagcggaccgcgctggtttagtaaaagcgctgaatgcggatgatggcaaagaaatctggtctgtcagcctggccgagaaagatggctggttctctaaagagcctgcattactttctggcggtgtgaccgtgtctggtgggcatgtctacattggcagcgaaaaggcgcaggtttacgcgctgaataccagcgatggtactgtggcatggcaaactaaagtcgcgggtgaagcactttcgcgcccggtggtcagcgacggtctggtgttaatccacaccagtaacggtcagttacaagcgctgaacgaagctgacggcgctgtcaaatggacagttaacctcgatatgccttcgctctctttgcgtggcgagtctgcgccgacaacggcttttggtgcggccgtcgtggggggcgataatggtcgcgtcagcgcagtgctgatggaacagggccagatgatttggcagcagcgtatttcccaggcgaccggttctaccgaaattgaccgtctgagcgatccattggcttcgcgaacgcgggttcaccgtcccggcgaccaacccccggatcacgcggaagaagatcagcatattcagcctgctggagacaccacacgcccacgacgctatagcaaaggcgatggtggaccaaaggaacagtttcacttccccgacgcgctttgccagccagccggtaagcgggatcgagatggcattcgccaccccgaaagaagtgattacccacgttccctggctgagcgatgagcccagattcccggcgatagtggggatcgccacgttagcaatggtggagtccagcacctgcatgaatgtcgccagtgacagcgcaatcgtcataatgaccagttgcgcgccttccagcggtttttgctgttgcatcacacgcacctctggattagccagcgttagcttttacgatatcgtcgatcagtttattgacaggtgccaggctgatttcacgcgcggtgcttaccgctaccggagtggaacgtactttatttgccagtacctgaccgtcacggttagtggtattgacgctcaccagcgtggacaaaccgatacgcagcggatattgctccagctgtttctggtccagttcgatacgcacaggcagacgctgaacgactttgatccagttaccggtcgcattttgcgctggaagcagtga

SEQ ID NO: 28651 - DNA, 1527 bp, Homo sapiens; identical to SEQ ID NO: 16051
  SIMILAR (1)..(474): 1001254mologous to Escherichia coli ORF_f413,accession number U28377,Smith-Waterman Score=830.

SEQ ID NO: 28652 - DNA, 1395 bp, Homo sapiens
  SIMILAR (1)..(423): 891254mologous to Escherichia coli nusG protein,accession number M30610,Smith-Waterman Score=638.
atggaagattctgtgggtgaagtcatggtaccaaccgaagaagtggttgaaatccgtggcggtcagcgtcgcaaaagcgaacgtaaattcttccctggctacgtcctcgttcagatggtgatgaacgacgcgagctggcacctggtgcgcagcgtaccgcgtgtgatgggcttcatcggcggtacttccgatcgtcctgcgccaatcagcgataaagaagtcgatgcgattatgaaccgcctgcagcaggttggtgataagccgcgtccgaaaacgctgtttgaaccgggtgaaatggtccgtgttaatgatggtccgttcgctgacttcaacggtgttgttgaagaagtggattacgagaaatctcgtctgaaagaagtgaggagcgtctctgcctggccgcccatcgtctgggatgtgagcagtggcgcggtgcagatgccggatgcgacgcttgtcgcgtcttatccgacctacgggaacacacatgtagggcggataaggcgttcacgccgcatccgccagtggcgcggtgcagttgccggatgcaacgcttgccgcgttttatccggccaggaggattgcacatgcagagcatcaccccgtatgcgacaggtgttccatatcgagcatcaactgcggttgtgccgggatcttcacgccgaaatccggttccgctttcactttcggtggcgttccgcgctcaacaggcagtcccgcgtcggaccaggtttgccagccgccatccagcaggcgcacatctttcacgccagcataaagcataatctgcgctacaagcctggcagcggtatttcctctcgcgtcgtgacgcccgaagtcaacgaaattgtggtgaacccgaatgcgaccctcgactggcaactggcactacgccaggcagcaggaaaaaccgatttagcgcgcgatatgctgcaaatgttactcgatttcctgcctgaagttcgcaacaaagttgaggaacagctggttgaacgccgcgcaattcgtgaatccgcgcagggcgctggtgcccgtgaagtcttcctgattgaagaaccgatggctgccgcaattggtgctggcctgccggtttctgaagcgaccggttctatggtggttgatatcggtggtggtaccactgaagttgctgttatctccttgaacggtgtggtttactcctcttctgtgcgcattggtggtgaccgtttcgacgaagctatcatcaactatgtgcgtcgtaattacggttctctgatcggtgaagccaccgcagaacgtatcaagcacgaaatcggttcggcttatccgggcgatgaagtccgtgaaatcgaagttcgtggccgtaattacggtgttcactcatcaacgtttttttgctttctggagttaaattaa

SEQ ID NO: 28653 - DNA, 1818 bp, Homo sapiens
  SIMILAR (1036)..(1719): 921254mologous to Escherichia coli IS5 39.3kDa protein,accession number U70214,Smith-Waterman Score=1122.
atgaaggccagccacgccatgagggctgctgcaaaggtgagaagtcagaacacgagcactgcggacacggtcaccagcatgaacacggtcaatgctgcggtggtcgccacggtcgcggcggcggtcgtcggcaacgtttctttggtcacggtgaattacgtctgcccgggcgtcatctacccaacgctggattttctgcaggagcagtcgctgattaccatccgcgaagaggaaggaggtaagaagcagattgcgctgaccgaacaaggcgcgcagtggctggaagaaaaccgcgaacagtgtgtaaaaaggaatgcagctgcctgctttaacaagcatacataccaagttcagaacagtgtctatttctggagactaaggagagttactgtgattaatgtgatagacaagggcgacgaggtggaagcggacaaaacgttacacattgcgcaaaacggaacggtggtcgccgagggtgattatggattccgcctcacgaccgcaccaggtaatggtttgtacgttaactatgggctgaaagcgctgaacatccatggtgggcaaaagctgacgttagccgaacatggcggagcctatggcgcaacggccgatatgtcggcaaaaatcggtggtgaaggggatctggcaatcaatacggtgcgacaggtttcgctttccaacggtcagaacgactatcagggggcaacctacgttcagatggggacattacgtaccgatgcggatggtgcacttggcaacacccgggaactgaacatcagcaacgcggccatcgtcgatcttaatggatcgacgcagacggtagagacattcaccgggcagatgggttcgactgttttgttcaaagagggggcgctgacggtaaataaaggtgggatcagtcagggtgaactgacaggtggcggaaacctgaatgttacagggggaacgctggctatcgaggggcttaatgcacgctacaatgcgttaaccagcattagcccaaatgcggaagtcagcctcgataatactcagggtgaattcagcagtaagcgccgtcagaccagaaaagagattttcttgtcccgcatggagcagattctgccatggcaaaacatggtggaagtcatcgagccgttttaccccaaggctggtaatggccggcgaccttatccgctggaaaccatgctacgcattcactgcatgcagcattggtacaacctgagcgatggcgcgatggaagatgctctgtacgaaatcgcctccatgcgtctgtttgcccggttatccctggatagcgccttgccggaccgcaccaccatcatgaatttccgccacctgctggagcagcatcaactggcccgccaattgttcaagaccatcaatcgctggctggccgaagcaggcgtcatgatgactcaaggcaccttggtcgatgccaccatcattgaggcacccagctcgaccaagaacaaagagcagcaacgcgatccggagatgcatcagaccaagaaaggccatcagtggccactttggcatgaaggcccacattgcctggtcaccaccgcggccaacgagcatgacctcaatcagctgggtaatctgctgcatggagaggagcaatttgtctcagccgatgccggctaccaaggggcgccacagcgcgaggagctggccgaggtggatgtggactggctgatcgccgagcgccccggcaaggtaccggcgcggcatcgtctttctgcacacggatgtgttttgtataccgctctttcccgccgtattgtggcgctccccctgcctgtgtcggcgcccccataa

SEQ ID NO: 28654 - DNA, 2652 bp, Homo sapiens
  SIMILAR (28)..(1026): 971254mologous to Escherichia coli sensor-regulator protein barA,accession number D90894,Smith-Waterman Score=1682.
atgtctcgacttctcgaaactggaagcagcacgctggatgaagtcgttactctgctggcacattcttctcacgataaagggttagaactgacgctcaatattaaaagcgacgtgcctgataacgtgatcggcgacccgctgcgattacagcaaatcatcactaacctgaatggcaacattgatattctggtagaaaaacgtgcgctgagtaataccaaagtgcagattgaagtgcagattcgggataccggcattggtattcctgaacgcgatcaatcgcgcttattccaggccttccgacaggctgatgccagtatttcccgccgtcatggtggcaccgggctggggctggtgattacacaaaaactggttaatgaaatgggcggcgatatttcgttccatagccagccgaatcgcggttcaactttctggttccacattaatctcgatctgaacccgaacattattatcgaagggccatccacccagtgcctcgcaggtaagcgcctggcctatgtcgaaccaaactccgcagcagcgcaatgcacgctggatattttaagtgaaacgccgctggaagtggtttatagcccaacgttctccgcgctgcctcccgcgcattacgacatgatgttgttaggcatcgcggtgaccttccgcgagccgctaacaatgcaacatgagcgattagcgaaagcggtatcgatgaccgatttcctgatgctggcacttccttgccatgcacaagtcaatgctgaaaaactcaagcaagatggtatcggcgcgtgtctgctgaaaccattaacacctacacgcctgttgcctgccctgacggaattttgtcatcacaaacaaaacacgcttttgcctgtaaccgatgaaagtaagctggcaatgacagtcatggcggttgatgacaaccccgctaacctgaaacttatcggcgcattgctggaagatatggtgcaacatgtggaactttgcgatagcgggcatcaggcggttgaacgggcgaaacagatgccgccggcccggggtatccacccgcgcgctagtggcaccacctggggccccgggtctcacaacccgggcatcctcaaacgtcaccgggcgcttgctggtcggaaaatccgacaacacgttcaaacccgtgggccgtcaggtcgacaaggggaagaacctattgccatgtcagcaatgaacgcagctaaccacttgaaaggcgttacggcgatcatcaccatgaccgaatcgggtcgtaccgcgctgatgacctcccgtatcagctctggtctgccaattttcgccatgtcgcgccatgaacgtacgctgaacctgactgctctctatcgtggcgttacgccggtgcactttgatagcgctaatgacggcgtagcagctgccagcgaagcggttaatctgctgcgcgataaaggttacttgatgtctggtgacctggtgattgtcacccagggcgacgtgatgagtaccgtgggttctactaataccacgcgtattttaacggtagagattacttaccaaatcacacatcgaggcaaaggttgtatctttcggcagacggatatgctccaccagttcgaaacgcagccagcgaagacgctcaatctggcgcaggatttttggttgctgacgcagggcgatgagcgtagggccatcaatattgaccgatgccagcaggccgtgctctataaagaagtcggctttttgcgccagcaaatcaatctgctctttcacaacctccatccgatggctgacgatcggctgccaggtgtaagcacgctcacactgcaaccaaaaacgccgttcctgcaagctctcgatgcttgcttcagggttgcttattcgctggataacctgccttatcatcaaagatgtcctgtgtttaaaagtgatgctgcccggactcgacaaagattatcgcgcgccatcaggttcacgactatgtccaaaaagattgccgtgattggcgaatgcatgattgagctttccgagaaaggcgcggacgttaagcgcggtttcggcggcgataccctgaacacttccgtctatatcgccccaccggcgagcgtacgttctactactggcggaacgaagccgccgccaaattctggctggagagtgagcagtctgcggcgatttgcgaagagctggcgaatttcgacttatctctacctgagcgggattagcctggcgatcttaagcccgaccagccgcgaaaagctgctttccctgctgcgcgaatgccgcgccaacggcggaaaagtgattttcgacaataactatcgtccgcgcctgtgggccagcaaagaagagacacagcaggtgtaccaacaaatgctggaatgcacggatatcgccttcctgacgctggacgacgaagacgcgctgtggggtcaacagccggtggaagacgtcattgcgcgcacccataacgcgggcgtgaaagaagtggtggtgaaacgcggggcggattcttgcctggtgtccattgctggcgaagggttagtggatgttccggcggtgaaactgccgaaagaaaaagtgatcgataccaccgcagctggcgactctttcagtgccggttatctggcggtacgtctgacaggcggcagcgcggaagacgcggcgtaa

SEQ ID NO: 28655 - DNA, 1536 bp, Homo sapiens
  SIMILAR (870)..(445): 421254mologous to Bacteriophage N15 gp5,accession number AF064539,Smith-Waterman Score=189.
ttagtcgtcgtccttccttctcaacgcatttctccccacacgccactttgcgtcataaactttttgcgtcgcttcaaaaccgttggtgccagtcaggtgttgtcgcatccaaggtggaattccacaagattttttcgctctcaggtctcccataccccagccaatcggtgtgtaccagttactccgccagcccgttatccaagattcttggccggagaatactgccgcttcggtgtcagcacgtcctgacagacatgccggtataagcggaaacctatttcggcaaacatctgacgatggcatcgatacgcgtctggaaatcagcacgcacatctttacggaagctttcgtaagggttgccgtcgcaccttgcgatcgccgctgtaaatcagcgtacctcaacgccgttagttttgagcgcagcgccatagttactgtgcgccacatgaccccaatggagccggttctggccgtttgtgtgaccagccgtcgcatgccgaactggcaataagctgcactgcagttcatgtcattggcagcgcccagatgggtttgatatcgcgcatacgggcaataatgtcggcgcgtcaaacgccccggacaccattccacccggcgtatccatatccagaagatgccgtcaacgccggggtcactgattgcctgctgcaggcgagcaatgatccgttgtaacccgtcatcccggaataagggggttttacgaccagcgtgccggaaaccggcaagaccgcgataccatttgccacctgaagctgcgtgatggacggggatccatgtcatcatcctcaccaaacagcgcagcggttcggctatttgtccggcatcaagcgtgatgccagagacggtattgtcagccgggtgatgcccaactatcatatagcgatccctcttgtgagaaccatgccaatgttgtacgctgtatgagggaccgatgctcttagcccaaaggtgggcattgaacgcggacaatagtccccatcccacctctaccttaggacgagtcatcgaacgatgccactctgtggtgttcgaaacccaaaggtatgcccgtcgcgtcgatccattaagatcgacgatgtccgcgttgctgatgttcagttccggttgttgccaagtgcaccatccgcatcggtacgtaatgtccccatctaacgtaggttgccccctgatagtcgttctgaccgttggaaagcgaaaccgtcgcaccgtattgattgccagatccccttcaccaccgatttttgccgaatatcggccgttgcgccataggctccgccatgttcggctaacgtcagctggtgcggtcgtgaggcggaatccataatcaccctcggcgacaccgttccgttttgcgcaatgtgtaacgttttgtccgcttccacctcgtgccctgatagttacggccttccaggtgtagtcacccgcgccgacaaccagcgtatcgacgctgatattccctccgcgagcgtcgcagcaggaatatccgtatcgaaagatggatgctacgcgtcgcat

SEQ ID NO: 28656 - DNA, 2424 bp, Homo sapiens
  SIMILAR (766)..(1332): 861254mologous to Escherichia coli ORFT,accession number X73295,Smith-Waterman Score=830.
atgccacggaagctttcagcccgtgaccaaagacccgttgagatcaatgccggcctggtacaggtgccagaaaacccggggctgggtgtagaaatcgatatggatcaagtgatgaaagcccatgagctgtatcagaaacacgggcttggcgcgcgtgacgatgcgatgggaatgcagtatctgattcctggctggacgttcgataacaagatcgatgctgataataccgcagttcttccagctataaacgttggcgcagattgtatcacgaccgatcccagcgatgccaaactggaactggatgccgacaaactcaccgctgcactgaaaaaagatgccagcggcgtaggtgcattgattgttggcgatggtaaaaaaaccggcatcacgaccaccatcggcagcaacctgaccagttggctttcgacaacgggcattattaaagccgctaccgatggcgttagtaagaccctgaataaattaactaaagactacaacgccgccagcgatcgcattgatgcgcaggtcgctcgctacaaagaacaatttacccaactggacgttttaatgacctcgttaaacagcaccagcagctacttaacgcagcagttcgaaaacaacagtaattccaaacaggtcatgtacgcggcaaaaggcacccaggcctatgcacaaattggcgtcgaaagcgccgtaatgagcgccagccagcagcagctggtcaccatgctatttgatggagtgctgagcgcactggttagagcgagcctgtttatgcaggacaacaatcagcaaggcaaaggcgtctctttgtcaaaagcgatcaacatcattgagaacggactgcggggcgacgaggtggaagcggacaaaacgttacacattgcgcaaaacggaacggtggtcgccgagggtgattatggattccgcctcacgaccgcaccaggtaatggtttgtacgttaactatgggctgaaagcgctgaacatccatggtgggcaaaagctgacgttagccgaacatggcggagcctatggcgcaacggccgatatgtcggcaaaaatcggtggtgaaggggatctggcaatcaatacggtgcgacaggtttcgctttccaacggtcagaacgactatcagggggcaacctacgttcagatggggacattacgtaccgatgcggatggtgcacttggcaacacccgggaactgaacatcagcaacgcggccatcgtcgatcttaatggatcgacgcagacggtagagacattcaccgggcagatgggttcgactgttttgttcaaagagggggcgctgacggtaaataaagtcggaccggaaacgctaaagcgtgacccacccgtcagagcaatgacaatccccgcaacagctgcggtatataaaccgtactggggtgccacaccactaccaatagccaacgccatcgccagcgggatagcaataatcccgacggttatcccggcaatcaggtcacggcggaatggtatcgcagacaacgacttcatcaattacagagttacgcaggttgttcgccgcgttgccagagaagatcgggtgagtcgcgtacgcaaatacacgtttagcaccacgttactttcagagcttcagcagctttacacagcgtaccgccagtgtcgatcatatcatcgaccagtacgcagtcacgacctgcaactaaacctgctgatcattaaagataatcagattgtgtatcgcaaagcctggggagcggcgaaaaagtacgatggcagcgtgttgatggaacagcctgtcaaagccaccaccgggacgctgtatgacctggcctcaaacaccaaaatgtacgccacgaacttcgccctgcaaaagctgatgagcgaaggcaaactgcatcctgacgatcggattgcgaaatatattccggggtttgccgatatggttgtcacctgcgggccattcatgagctttggcgaacgtcgcctgctgggtctgttccagaaccgttacggacctaaccgtgttggctataccatctgccgacaagaaggccccggcacccggattccggcccctttcccaaacaagtttggcgccaggcccttggaaattgggccgaaccattggcagtttgaaaatacggaagattatgttcgccaggccgttgaagaaccacaccagcggggtgcaaaccaggtacgctacgccaccgcacgctcagtcttcaaatgggatggcaccgataccgtcaaagtcggcagcgatgaaaccccggttcgcgtgctggacgaagaagtctccaccgaccaggcgcgctggcataaccgctattggatcgacagcgaagggcaaattcgccagtcggaacagtatctcggcgcggattattttccggtgaaaaccactctcatcaaggcggcaaaacaatga

SEQ ID NO: 28657 - DNA, 4901 bp, Homo sapiens
  SIMILAR (4658)..(3675): 921254mologous to Escherichia coli No definition line found,accession number U00039,Smith-Waterman Score=1604.
  misc_feature (1)...(4901): n = a,t,c or g
gaatattttcgacataagcgtaggcttcatgtccacgagcgtagccgtaagtcagcttgctgtaatagggtttctggctaagtaaaggcagacgctgttttacgtcagcccaactgtcaggattccctttggtttttgccgtcagggcgcgggcatccagcatatgcgggtaccgagctcggtagccacattggaaagatccccaagggttcccgcgcggcgtaccgccgcagtgctcggcgaagtggcgaagcaggcgccgtcgacacgccgagaagcgcgcatcggtgatgagcgacacgtcttgccccacgagatatgcttgtagcgcggaggtgagnctggtaggtctcttccatgccggtgccggacggccgccgccgatcaccaccatgatatcgccctgcacaatctcttcccgcttgatcgccttgatcgcctgcgcttccgagacaaacacccgcacccggccggtgtggtggtatacgccatcttcgcccaccaccgacgggtcgatcgccgtggccttgatcaccgaaccttccggcgcgatgttgcccgtcgggaagcagaccgtcgaggtcagccctttcgcttttgccttctccggcggcaggatcacgtcatccggctctacgccgtcctgctcgcgcaggcactggcggaagcgcgcccggcgctcggacgcctgccaccattcaaggttctcgcccaccgtctggccggtcacggtcatggcgtccagatgcagcaggccgaggtcgcgcaggtggagcatcacctccggcacgccgcccgcgaggaaggcgcgcacggtcgggtgatagtccgggccgttgggcagcacgctcaccagacgcggcactttacggttgatgcgcgtccagtgctcaacgtccgggatcgtgcagcccgccgcgtgggcgatggccggaatgtgcagcagtaaattcgtggagccgccgaacgccgcgtggctcaccatcgcgttttacatggctttatccggacaggatatcccgcgtggtgatgccgcggctatccagctcgctgaccgcgcgcgccgactggcgggcgatctccagccacaccgcctgcccggacggcgccagcgcggagtgcggcagcgccagacccagcgcctccgcgaccacacccgccgcccggcgaggcgcaggcgcgacagcccagttcgcggcctcctgcagggagagttcgtggttggcgaaacgcgcgccgatggtctgcaccttgcccgcgtcttctacgacgtcgcgcagctcgccccctacccaggatgtcggctcgcagaggaagtagtggtttaccgtaccgttgtaacggttttcgatacgacgcagttcgccgtaacgttcaccggggctgatgttacagccgatggaacattgctggcagatgctcggcgcaaactgcatatcccatttacggttgtaacgctcggagtgcgttttgtcggtaaatacgccggtcgggcaaatttcgaccaggttaccggaaaattcgctttccagcgtgccgtcttccgggcgaccgaagtagacgttgtcgtgcgcaccgtaaacgcccagatctgtaccgtcagcgtaatctttgtagtaacgcacacagcggtagcaggcgatgcagcggttcatttcgtgagagatgaatggccccaaatcctgattacggtgggtacgtttggtgaaacggtagcgacggaagctgtgtccggtcatcacagtcatatcctgaagatggcagttaccgccctcttcacataccggacagtcgtgcgggtggttggtcatcaaccactcgaccacgctttcacggaactgtttcgcttcttcgtcgtcaatggaaataaaggtgccatcggaagccggtgtcatacaggacatcaccaggcgaccacgcgtgtcttccgcgttttggtattgcttcaccgcacactggcggcaagcaccgacacttcccagcgccggatgccagcaaaagtcgggaatatcaaggcccagagacagacaagcttccagcaggttgtccgctccgttgacctcgtattctttgccgtctacatgaattgtagccattagcatgcttccacagcgctctttcagcaggttcggctgaatcccattaatcaaatgggtattgctgaacggctgtttgattcccgcctcaaattcttcgcggaaatatttgatggcgctctgtaacggctccactgcaccaggtgcgtgggcacagaaagttttacccgggcctaagaatcgacacagttgctcaagtgtttcgatatcgcccggctgaccttcaccacgctccagcgcacgcagaattttcacgctccacggcagaccgtcgcggcacggcgtacaccagccgcaggactcacgggcgaaaaactcttccaggttacgcaccagcgacaccatgttgatctcatggtcaaccgccatcgccagcgccgtacccagacggctgcccgctttaccgatactttcgaattccatcggcagatcaaggtgcgcttcggtcaggaagtcagtccccgcgccgcctggctgccaggctttaaatttcagaccatcacgcataccaccggcgtaatcttcgaggatctcgcgtgcggtggtgccgaacggcagttcccacagtcccggatttttcacccgaccggagaagcccatcagcttggtcacggtgtcgaaagctatcgcaccactggcgcgccgcgtatcagtcctactcactttatggacagcgacggcaaagtgggcgcggaagtggctccgcgtcgttatttctgtctgcaatgtcacgtaccgcaggccgataccgcgccaatcgtggggaatacccccagccgtctggcgctggggacgctgctgttgatcggttttgttggcggcatcgtcttctggggtggccgggcttgccgattcgaagatattcctgtaaatcagctctcgccgggcaacaacgccgcgtcgctttagcgcgtctgtgctacccgtgccacgtatgatggcagagccaacaatcccgcaatcaatgccgatatatttcgggttttccgggtgttcatagcttacgaagatgttgccaggtgcatatcggcatggaaaaagctgcacgccgcgttccgccagcaatttcatgttagtgccgtttttctccagcgccgcaacatcagacaccggaatgccgtaaatgcgctccatcaccatcatcccttcactacaatagtcagggtaaacttccgggatgtagagcatcgggctgtcttcaaaattgcgccgaagctgaatggcgttggcagattcccgcagcaaattcagttcatcaatcaatgtcttttcgtactcgcgcaccacttcggttgggcgcagacggcgaccatccggcagcaaacgcggcacccagcgagccagacggtagataagtttcagatccgctttaataaccggcaaaatatccgggcggatgactttaatcaccacctctttaccattcgatttcaatcgcgcggtatgaacctgggcgatagaagcagaagccagcggcttgatttcaaaatcgtcaaaccacgcttctaccggcaagccgcccattgcagcttcaatctgctgcttcgccagcttgccatcaaacggagcaactttgtcgaatagggcgatcatcaacgctggcgcatagatgatgtaggcatgaagcagcaggaacgccagcggcgcagtcaggaagatcagccgtggaatgcccgacaagaagtggaacatggcgttgacgtaacatagccgctgagcaaacttcagccctttaccggtgagcgggttatcgagacggaagatttgtaccatcccgcgcgcccagcgaatacgctgaccgatatgcgccgacagactttcggtcgccagccccgcctgcctgccggaatacgcattatagcgctggcaggtattaggccacggagggttatcgacagcaatgccgccaatttcatccagcggcttacgacgaatcaccgcacaggaaccgcagaagaaagtggcgtcccacatatcgttgccatcctgcaccagaccatagaacagcgtgccttcgttcggcgttttacggaaacgccccaggttgcgttcaaacgggtccggtgagaagaagtggtgcggcgtctgcatcatcgccagctgtttttctttcaggaaccagcccatggtcatttgcaagaacgatcgcgttggtacgtggtcgcagtcgaaaatcgacacgaactcgccttgggcatatttcagcgcattgttgatgttgcctgctttcgcatgttcatgagtggtgcgggcgatatatttcacccccacgttttgcgcaaactggcgaaactcttccctgccgccgtcatcaaggatccagatattcagcttatctttcggccagtcgatacccagcgaggcgtaaatggtatttttcaccacgttgagatcttcgttgtaagtcgggacaaagatatccaccgacggacacagcgacatatctttcggcaatggcaccggctgacgattcagcggccatactacctggaagtagccgagcaccagcacaatccacgcgtacgtttcagggaagagcagaataagcccgcacaccagggaagcgatgatcgaatgatcatagcaagcgggcatggctttacgctcttcggcgccgagctgggagaactcgccaccgctgcccaggaagaacaggccgtcaacgcctgctttgatcagatcgtcgatcagcgcggcggtgcccggcttatcgagctggccgtcggcggtaaaaatggtggagacagggggaatgattcccgtgaacaacgcggactgcggcatgagatctccttgctgaatcat

SEQ ID NO: 28658 - DNA, 1846 bp, Homo sapiens
  SIMILAR (510)..(1): 1001254mologous to Escherichia coli similar to E. coli YicJ,accession number U70214,Smith-Waterman Score=892.
ctgctcgtcccctttgccgatgatgctcaccagcggcagcgcgatgccgctgatagcgagcgagcccgccgccgccaggaagaagcgccaggactgcagggcgtgacgctctttcgggtcggcggtgatgacgcccggcatggcgcagtacggcacgttaacgaaggtgtagaccagcgtcaggagaatgtaggtcacgcaggcgtagatgatcttgccctgtgcggagaagtccggcgtgtagaaggtcagcacgcagacgatgccgaacgggatggccccccacagcaggaacgggcggaactggccgtgccgcgtgcgggtgcggtctaccagcagccccatcagcgggtcggtgacggcgtcgagcacgcgggagaccaaaaacagcgtgcccataatccccgccgacaggccgaagacgtcggtgtagaaataggccagcaggaacatcgtggcctgccagacgaagccgcaggcggtgtctcccagcccgtagccaattttgtcggcgttaattacctcgataattttatcggtgtcataaatacagcctttccaggtgccgccgctcaccgactgcagtgccgcccacagccgggtgtcgtccggcaaaaagtcgtgggcgtgcaggtccgggtgcgtctgccgccgcgccagctcgcgcgcgccctcttccggcgtcagcgggttgtccgcggtgccgatgaagttcacgctgccagttaacgtcagacgatccagcgggcatatctctgatgatgtcgttatcgcgcagcttgccaatcggcccgcccgccagcgcctccggcgacacgttggcctgaatgcagtgacgtcccttcgacacgcccgagaagcgcgcatcggtgatgagcgacaccgtcttgccccacgatgatatggtttcaaccagcggtaagccgactacggcgtgatagctgccatttatcttcctgacaaaacagccacccagcccctgaataccgtatgcacctgctttatctaacggttcatcgctggcgacatagcccgcgatgtcttcgtctgttaacgttctgaaagtcacatcggtgaccaccaggcaatcgagaatgtgctggctgtcggccaacgccactgctgtcatcacctgatgggtctgacccgataatttgcgcaacatctgcgccgcatgctctgcgtcgcgcggtttctccagcacttctccgttcaggataacgatagtatccgcacccagcaccgggagatccttcgccgtttgcgcgacacctgcccgtgctttctcgcgcgccagacgcacaacatactgctgcgcgctctcctgcggctgacgctgctcctcaatgcccgtaacaatacgttcaaaggtcacgccaagttgcgcaagtaactcctgacgacgcggagaaccggaagctgcatagatatcaaagcgatgccctttagtgactaccgcgtttggcgtggcgacattcgccagcggtggcgcgtagtccgggcgctttaccaccacgcgtttggtcgccagcaagcgtgcaggctccagtaatccatcggcatcaagatccggtcccaccagcgactgaaagacacgcatctcttttttcactagcgcgcttttctgcttatgcgggaacatcgggtcgagataaaccacctgcgggcgcggggtaatatcagtcagcgccgtcagggggaaccggatttgtgttgggcacatccataagacgcgccagcgtcgcatcaggcatcggagcacaactgccggattcggcgtgaacgccttatccgatctacgggcctcgtccctgttgtgataaaccaggcgggcaacatctttcat

SEQ ID NO: 28659 - DNA, 3072 bp, Homo sapiens
  SIMILAR (1735)..(2817): 941254mologous to Escherichia coli sensor-regulator protein barA,accession number D90894,Smith-Waterman Score=1720.
atgctcaacctgcgcgacctcggcctgctgcatctggacgccatgaccgtgaccggccagacggtgggcgagaaccttgaatggtggcaggcgtccgagcgccgggcgcgcttccgccagtgcctgcgcgagcaggacggcgtagagccggatgacgtgatcctgccgccggagaaggcaaaagcgaaagggctgacctcgacggtctgcttcccgacgggcaacatcgcgccggaaggttcggtgatcaaggccacggcgatcgacccgtcggtggtgggcgaagatggcgtataccaccacaccggccgggtgcgggtgtttgtctcggaagcgcaggcgatcaaggcgatcaagcgggaagagattgtgcagggcgatatcatggtggtgatcggcggcgggccgtccggcaccggcatggaagagacctaccagctcacctccgcgctaaagcatatctcgtggggcaagacggtgtcgctcatcaccgatgcgcgcttctcgggcgtgtcgacgggcgcctgcttcggccacgtgtcgccggaggcgctggcgggcgggccgattggcaagctgcgcgataacgacatcatcgagattgccgtggatcgtctgacgttaactggcagcgtgaacttcatcggcaccgcggacaacccgctgacgccggaagagggcgcgcgcgagctggcgcggcggcagacgcacccggacctgcacgcccacgactttttgccggacgacacccggctgtgggcggcactgcagtcggtgagcggcggcacctggaaaggctgtatttatgacaccgataaaattatcgagggaataccaatcggtaaaagtgggagacaatccatgggtggactgcccatgaaggggggtaccatcatgttcgatacggatattcttgctgcgacgctcgcggaggaatatatcagcgtcgatacgctggttgtcggcgcgggtgactacacctggaaaggccgtaactatcaggtaaacgggacgggcgacgtgcttatcgacgtgcctaaaccgtggaatgatcccatggcgaataaccctctgacgacgctcaatttgctggaacacgacgatagccatgtcggcgttcaactggtgaaggcgcaaacggttattgggtcgggtggctcattaacgttacgtgatttacagggcgacgaggtggaagcggacaaaacgttacacattgcgcaaaacggaacggtggtcgccgagggtgattatggattccgcctcacgaccgcaccaggtaatggtttgtacgttaactatgggctgaaagcgctgaacatccatggtgggcaaaagctgacgttagccgaacatggcggagcctatggcgcaacggccgatatgtcggcaaaaatcggtggtgaaggggatctggcaatcaatacggtgcgacaggtttcgctttccaacggtcagaacgactatcagggggcaacctacgttcagatggggacattacgtaccgatgcggatggtgcacttggcaacacccgggaactgaacatcagcaacgcggccatcgtcgatcttaatggatcgacgcagacggtagagacattcaccgggcagatgggttcgactgttttgttcaaagagggggcgctgacggtaaataaaggtgggatcagtcagggtgaactgacaggtggcggaaacctgaatgttacagggggaacgctggctatcgaggggcttaatgcacgctacaatgcgttaaccagcattagcccaaatgcggaagtcagctcgataatctcccggttgttaggcatcgcggtgaccttccgcgagccgctaacaatgcaacatgagcgattagcgaaagcggtatcgatgaccgatttcctgatgctggcacttccttgccatgcacaagtcaatgctgaaaaactcaagcaagatggtatcggcgcgtgtctgctgaaaccattaacacctacacgcctgttgcctgccctgacggaattttgtcatcacaaacaaaacacgcttttgcctgtaaccgatgaaagtaagctggcaatgacagtcatggcggttgatgacaaccccgctaacctgaaacttatcggcgcattgctggaagatatggtgcaacatgtggaactttgcgatagcgggcatcaggcggttgaacgggcgaaacagatgccgttcgatttgatcttaatggatattcaaatgccggacatggatggcattcgggcctgcgaactcatccaccaactcccgcatcagcaacaaacgccggttatcgcggtaacggcgcatgcaatggccgggcaaaaagagaagctgcttggcgcagggatgagcgattatctggcgaaaccgattgcagaagagcgattgcataattggttgttgcgctacaagcctggcagcggtatttcctctcgcgtcgtgacgcccgaagtcaacgaaattgtggtgaacccgaatgcgaccctcgactggcaactggcactacgccaggcagcaggaaaaaccgatttagcgcgcgatatgctgcaaatgttactcgatttcctgcctgaagttcgcaacaaagttgaggaacagctggttggagaaaacccggaaggcctggttgatttgattcataaactgcatggcagttgcggctatagcggtgtgccacgtatgaagaatctctgccaactgatcgaacaacagctacgtagcggtactaaagaagaagatttggaaccggagctgctggaactgttggacgagatggataatgtcgcgcgcgaagccagcaaaattctcggccaggaatcagatactgcattcccatcgcatcgtcacgcgcgccaagcccgtgtatctgatacagctcatgggctttcatcacttgatccatatcgatttctaaacccaggccccggttttctggcacctgtaccaacccgccttgatctcaacggtcttgggcaagagctattgcctccgggaaatccaggcgatcatagcgcatatacccgggaaaggggagatgtaatagccggaagtaaaacgggtaaatag

SEQ ID NO: 28660 - DNA, 1869 bp, Homo sapiens
  SIMILAR (1256)..(1179): 381254mologous to Escherichia coli NADH DEHYDROGENASE I CHAIN N (EC 1.6.5.3) (NADH-UBIQUINONE OXIDOREDUCTASE CHAIN 14) (NUO14),accession number D90858,Smith-Waterman Score=40.
ttaaacaacccgtatgccggacaatatgcgccagcatcgcatccggcacgatccccaaaacctggcgcttatctggccgtgtttttctaaaatctcgataatctgccgatccgtttgctgcatcgaatggcttgctaacgcacacaggttggcaatcgactgctcaacatcatgcgccacaatcccttcattgccggtcacggcggtatcatccagcgccattaacaccgctttccacgcagccgaagcactggtcgaaaccttcatcgcgcagctgttcgacgcaccatcgcaaatcatgccgctgacatcgccgatcatactgctgatcgccatcgagatggtttcataacgcccatccaccagccatgccatcccggcggcggcccccattgctgcggtcgttgcggcacacagcgcagacaaacgcggtaactgggtatggatgtaaattgcgctcaaatgcgaaagcatcagcgcacgcgccagccgttcatcatccgctccgaagtgttctgctaccaccaccacaggcattgttccgtaatccctggttaccgagcccgagttactcatagccggaagcgtagcgccgcccatacgcgcatcggatgccgcgctggtacgaatcacaatggatgaagagagatctttcgccagcaaaccgcgctcgcacgccacgcgcaggtagtagtagaggccgattgccgaaccgacaaccacggcacccaccagccaccacaagtgtgcctggacaccgaccgccagcacgtagaacttaccgataaagcccagcgtcatcgggataccggccagagacagcatcatcaccgtcatcactgccgcgaggatcggacgatgccagaacagaccgcggtaagagaacagggaatcagcatccgggccacgatacgggctggacatcaggctgaccacgccgaacgcgccgaggctgcgcttccatcgacatctcgccggtttgcaggcaatcagcgctaccagcagatagccgaggtgagagatagatgagtaaccgagcagacgtttgatattggtctggctcagcgccatcaggttaccgaagatgatggaggcaaaggcgataatcgccagcaccacgcgaatcgcttcgctgtcacccaccggtgcgtagaggaacagacgcatcaccacgaccataagtcgtttttgctcacgaatatcagaccagtcaacaagtacaatgggcatcgtattgcccgaacagataaagctagcatgccaacggtatacagcgagtcgctctttgtggaggtgacgattacctaacaatcggtcgattcgtttgatgttatgttttgttctcgctttggttggcaggttacggccaagttcggtaagagtgagagttttacagtcaagtaatgcgtgcaagccaacgttaagctgttgagtcgttttaagtgtaattcggggcagaattggtaaagagagtcgtgtaaaatatcgagttcgcacatcttgttgtcttaacttaatgatttttaccaaaatcattaggggattcatctggtgaaagccggaaacatcgacgccgccgtcgagctttctcaccagaccaacaccctgccggaaattaccggacgcgtttgtccgcaagaccgtttgtgtgaaggtgcctgtactattcgcgatgagcacggcgcggtaactatcggcaacattgaacgaccagcccagcactttaccaagccgccagcccgtttcagtgaagcatcgctggttaaagagctggaaaaacgcggtatcggtcgtccgtctacctatgcgtcgatcatttcgaccattcaggatcgtggtaattgaattgtggaagcaggtccttcccat

SEQ ID NO: 28661 - DNA, 1644 bp, Homo sapiens
  SIMILAR (1209)..(520): 981254mologous to Escherichia coli transketolase,accession number X68025,Smith-Waterman Score=1179.
atgctcattatattttatttaatcatttcggccagcgcccatgctgccggagggatcgcattaggtgccacgcgtattatttatcccgctgatgctaaacagactgcggtatggattagaaatagccataccaatgagcgctttgtggtcaattcgtggattgaaaacagcagcggtgtaaaagaaaagtcattcatcattacaccgccactgtttgttagtgaacccaaaagcgaaaatactttgcgtattatttacaccggtccaccgctggcagcagatcacggtattgaacgcaaactggaaatagaaaaagcggtcactgacgttgcggaactgaacggtgaattacgtaatcggcagtatcttgtcgagcaattaacaaaagcacatgtcaacgatgtgaattttacgccgtttaaatatcagttaagcccgtcattgccagtgaaaaaagacggtccggcgcagccatacgtacggcgttacgtgcgtattccacgaacatcaggaaggtggagtgtacggcaggaagccaccgtgcagggagataccgttagcaatcgcggtcataccgaactcgcgaacaccgtagtggatgtagttacccgcagcatcttcgttgattgctttagaaccagaccacagggtcaggttagacggcgccaggtcagcagaaccgccgaggaattccggcaacagcggaccgaacgcttcgatagcattctgagacgctttacggctggcgattttcgccggattagcctgcagtttagcgatgaactctttcgctttagcgtcgaagtcagacggcatttcgcctttcatacggcgggtaaattcagcggcttcctgcggataagctttcgcgtaagcagcgaatttctcgttccatgcggattctttcgcctggcctgcttctttcgcatcccactgagcatagatttcagacgggatttcgaacggcgcatatttccagcccagttgttcgcgggtcagggcaatttcagcgtcgcccagcggcgcaccgtgggagtcgtgggtaccggctttgttcggggaaccgaaaccgatgatggttttgcacatcagcagggaaggtttgtcagtcactgcgcgcgcttcttctactgcgcgtttgatagatgccgcgtcatgaccgtcgatgtcgcgaataacgtgccagccctaagcttcactacgacctgcaggcatgaaggaaatccggcgctatgggcggcggtgattatgtactgcttctcgctgcgaagaatggcgaatctacgcaaggttcagcgactggcgcaaagtggcgttctggtggtcagcgatcgcttcccgcaggctgaaatttcgggcttttattatgatggaccggggattggcgtcgaaccatgttctctggcgcagcgcgaacggcgtttataccaacaaatggcgcaatatcgcccggaattaattattcgcctgggcattgatattgagactgccatctcccgcaagcctgaccatgactatgccgagctgcaggacaaaatcggtgtcatgtcgaagattggctataacggcacaaaaattcttgagattgattccagagcgccctacagcgaagtgctggaacaggcacagaaggcggtttctctg

SEQ ID NO: 28662 - DNA, 1248 bp, Homo sapiens
  SIMILAR (643)..(1086): 991254mologous to Escherichia coli ORF_f252; was ORF_f87p and ORF_f234p before splice,accession number U28377,Smith-Waterman Score=748.
atgcctgtggtggtggtagcagaacacttcggagcggatgatgaacggctggcgcgtgcgctgatgctttcgcatttgagcgcaatttacatccataaccagttaccgcgtttgtctgcgctgtgtgccgcaacgaccgcagcaatgggggccgccgccgggatggcatggctggtggatgggcgttatgaaaccatctcgatggcgatcagcagtatgatcggcgatgtcagcggcatgatttgcgatggtgcgtcgaacagctgcgcgatgaaggtttcgaccagtgcttcggctgcgtggaaagcggtgttaatggcgctggatgataccgccgtgaccggcaatgaagggattgtggcgcatgatgttgagcagtcgattgccaacctgtgtaggcaactgtcctacctgggtagcggatgcatccgcaccaaagtggatgatttaccgtctcgtctgaaactcatctatgcgggcgtgacggaaatcatcacccagttccagcctgattatttcgccattgaacaagtctttatggcaaagaacgctgactcagccctgaaactgggccaggcgcgcggcgtggcgattgtggcggcggtgaatcaggagttgccagtatttgaatacgcggcacgtcagcggcgctatctggggctgctctccggcgaagacggcgacaaaatcaaacgattgccgttggttggcgtctggctggaacggcgactggcggccaaatcctcgaaaacccaaagcatgaaaaccaaatctccggcgctatgggcggcggtgattatgtactgcttctcgctgcgaagaatggcgaatctacgcaaggttcagcgactggcgcaaagtggcgttctggtggtcagcgatcgcttcccgcaggctgaaatttcgggcttttattatgatggaccggggattggcgtcgaacgtgcgaccgggaaaatcagcatgtttctggcgcagcgcgaacggcgtttataccaacaaatggcgcaatatcgcccggaattaattattcgcctgggcattgatattgagactgccatctcccgcaagcctgaccatgactatggtaccgacgggtggaaaagttccaagcagggtcgagaggcgcgccggtggcgaccgccagagcgcaaaatgccggaaagcgcggatggcccaggaaccgatcaacggccagtttcccgtataagcactgcggcccaacagggcccctttcccgccgcataa

SEQ ID NO: 28663 - DNA, 1521 bp, Homo sapiens; identical to SEQ ID NO: 28648
  SIMILAR (1508)..(1422): 411254mologous to Escherichia coli multidrug resistant protein emrA,accession number D90891,Smith-Waterman Score=43.

SEQ ID NO: 28664 - DNA, 807 bp, Homo sapiens
  SIMILAR (414)..(40): 191254mologous to Homo sapiens Human breast tumour-associated protein 72,accession number Y48611,Smith-Waterman Score=110.
ctatggctgtgcggtgttttcgggcgcgtcgcccccgctgtcttctgctctgttgtgcgggggggtgttttcttgtcgcgtgtgctcccctctttgtttcttcttctcttcttgctgtgttcgtggtccggcggttcggttgttgcgtgtgggtttgtgcgtttttcccgctcgttgctcggtcgttttttgtttttgttggctcttctccccctcgccgcgccgggtcttgttttgtttgtttgcggttcctgcgcgttctcttgctctgtttgggtggcggtctgtgttttgttttttgtttgttttggtttttttgtggggcctctcttgttttgttcctgtttggtcggtggtgttcgtgtggtgtgtttgtgtggtgtgtttgggcttcttttgtttggcttctgttttctgggcgcttgtctttcctcgtgctgcggccgtttcgttgctaccgaagtcatctgccgctccagcttgcgccatgacgcgcaattcaccgttaaaatcgccaatcggcagtgtaaccgagccttcgccctgttcgttgagcgttaacggagcgccaccacgtttcagctcatcaccatcgccaccgaaacgcagagctgccagacgcccctgaccttcaataacctgaccgtaaatatcgtaaatgtctgcgccatagcgtttctgaccaaagaacgcctgccacggatctggcgtgacgtagtcagtaatattcagcacaccactgtttagcttctcgccatttttagtgctggctttaattttcacggttaatggttgattgggacgcat

SEQ ID NO: 28665 - DNA, 2828 bp, Homo sapiens
  SIMILAR (1263)..(2705): 991254mologous to Escherichia coli exopolyphosphatase,accession number L06129,Smith-Waterman Score= 2471.
atgaagcgttggcaggacaacagcgacggtagcggcgcagtgcgacccgcccgtgtcacgctgaaactggataaagccagttatcgccctggcgacaccattaagttgcatatcgccgcgccaacggcgggtaaaggttatgcgatggtcgagtccagtgaaggcccgctgtggtggcaagagattgatgttcgggctcaagggctggatctgacgattccggtcgataaaacctggaatcgtcatgatctgtatttaagtacgctggtggtacgtcctggcgataaatctcgctccgcgacgccaaaacgcgcggttggtgtgttgcatctgccgcttggcgatgaaaaccgtcgcctcgatctggcgctggaaacaccagcaaaaatgcgtcccaatcaaccattaaccggtgaaaattaaagccagcactaaaaatggcgagaagcctaaacaggtgaatgtgctggtgtctgccgttgatagtggtgtgctgaatattactgactacgtcacgccagatccgtggcaggcgttctttggtcagaaacgctatggcgcagacatttacgatatttacggtcaggttattgaaggtcaggggcgtctggcagctctgcgtttcggtggcgatggtgatgagctgaaacgtggtggtaaaccgccggtcaatcacgtcaatattgtcgtgcagcaggcgctgccggtaacgctcaacgaacagggcgaaggctcggttacactgccgattggcgattttaacggtgaattgcgcgtcatggcgcaagcctggacggcagatgacttcggtagcaacgaaagcctggttgatcgtctgtatgcggcctccagctccggcgtaccggttaatctgctggttcgcggaatgtgttcgctgatccccaatctggaaggcattagcgacaacattcgtgccatcagtattgttgaccgttaccttgaacatgaccgggtttatatttttgaaaatggcggcgataaaaaggtctacctttcttccgccgactggatgacgcgcaatattgattatcgtattgaagtggcgacgccgctgctcgatccgcgcctgaagcagcgggtactggacatcatcgacatattgttcagcgatacggtcaaagcacgttatatcgataaagaactcagtaatcgctacgttccccgcggcaatcgccgcaaagtacgggcgcagttggcgatttatgactacatcaaatcactcgaacaacctgaataaccctatgccaatacacgataaatcccctcgtccgcaggagtttgctgcggtcgatcttggttcaaacagttttcacatggtcatagcccgtgtggtagatggtgccatgcagattattggccgcctgaaacagcgggtgcatctggcggacggcctggggccagataatatgttgagtgaagaggcaatgacgcgcggtttaaactgtctgtcgctgtttgccgaacggctacaagggttttctcctgccagcgtctgtatagttggtacccatacgctgcgtcaggcgctgaacgccactgactttctgaaacgcgcggaaaaggtcattccctacccgattgaaattatttccggtaatgaagaagcccgtctgatttttatgggcgtggaacatacccaaccggaaaaaggtcgcaaactggttattgatattggcggcggatctacggaactggtgattggtgaaaatttcgaacctattctcgttgaaagccgccggatgggttgtgtcagctttgcccagctttattttcctggcggggtcatcaataaagagaattttcagcgcgctcgcatggcggcagcacaaaaactggaaactttaacctggcaattccgtattcagggctggaacgttgcaatgggcgcttccggtaccataaaagccgcccatgaagtgttaatggaaatgggcgagaaagacgggataattaccccggaacgtctggaaaaactggtaaaagaagttttacgtcaccgtaatttcgcatcgctgagtttaccgggtctttccgaagagcggaaaacagtcttcgttccgggactggcgattttatgcggtgtgtttgatgctttagccatccgtgaactgcgcctttctgacggggcgttacgcgaaggcgtactgtatgaaatggaaggacgtttccgtcatcaggatgtgcgtagtcgcaccgccagcagcctcgccaaccagtatcacatcgacagcgaacaggcccgacgggtgctggataccactatgcaaatgtacgaacagtggcgggaacagcaaccgaagctggcgcatccgcaactggaggcgctactgcgatgggccgccatgctgcatgaggtcgggttgaatatcaaccacagcggtttgcatcgccactccgcttatattctgcaaaacagtgacttgccgggttttaatctggaacagcagctgatgatggcgacactggtgcgctatcaccgtaaagcgattaagctcgacgatctaccgcgctttaccttgtttaagaagaaacagttcctgccactgatacagctattgcgccttggcgtattactcaacaatcaacgtcaggcaaccaccacaccgccaacattgacgctgattactgatgacagtcactggacactgcgtttcccgcatgactggtttagtcagaatgcgctgggtgaagaagggattgtggaagctgacagcgctgacggtagtcttatggatgaactgctaacgctgatggcagcacaccgcgtgtggtcacgcattcctaagattgacaaaattcctgcctga

SEQ ID NO: 28666 - DNA, 2316 bp, Homo sapiens
  SIMILAR (273)..(761): 941254mologous to Escherichia coli o417,accession number U00039,Smith-Waterman Score=797.
acaaacaaacgacacttttgctgaagcagggctacggctttgttcgtgagcatggcgacgataaagtgctggtcgtctgggcagggcaacagtaacttttccggcttcccgttcgtcagtacctcgggaagccgccaaccaggataaaatgtcagccctaatcagcgttgcaggataaagcaccgctcactcttcaacagaccgatttgcaccccagcaaatgtagcgttattgttaccttccttgctacagagttcgacagatatcccgctatgacattctccctttttggtgacaaatttacccgccactccggcattacgctgttgatggaagatctgaacgacggtttacgcacgcctggcgcgattatgctcggcggcggtaatccggcgcagatcccggaaatgcaggactacttccagacgctactgaccgacatgctggaaagtggcaaagcgactgatgcactgtgtaactacgacggtccacaggggaaaacggagctactcacactgcttgccggaatgctgcgcgagaagttgggttgggatatcgaaccacagaatattgcactaacaaacggcagccagagcgcgtttttctacttatttaacctgtttgccggacgccgtgccgatggtcgggtcaaaaaagtgctgttcccgcttgcaccggaatacattggctatgctgacgccggactggaagaagatctgtttgtctctgcgcctgccatgcttgtgatgagtgaaagccgcgcccatgaattaggtcttaagccgcgcgctcgtgtgcgttcgatggcggtcgttggttgtgacccatcgattatgggttacggcccggttccggcctcgaaactggcgctgaaaaaagcggggctttctgccagcgatatcggcgtgtttgaaatgaacgaagcctttgccgcgcagatcctgccatgtattaaagatctgggactaattgagcagattgacgagaagatcaacctcaacggtggcgcgatcgcgctgggtcatccgctgggttgttccggtgcgcgtatcagcaccacgctgctgaatctgatggaacgcaaagacgttcagtttggtctggcgacgatgtgtatcggtctgggtcagggactggagattggtaccgcgaaggttgccgctttagtaggggaagttctgcccgacggtatggtcaatatcattggcgtgggcagctgcccgtcgcgtggtatggataaaggcggggtgaacgacctcgaatccgtggtcaagtgcgtacaacgcgccattgaccaggcagaattgatggcagattgtcagatctcttcggtatatctggcgctttctggtaagcacatcagctgccagaatgaaattggtatggtgcctatttctgaagaagaagtgacgcaagaagatgtgccggaatctcgtaaccccagcttcagcgttaagtgccgtatcggtgccaacatgatttgggatgccgaaaagcgcggcgtgctgaaaccaggcgttgaactggttgaaccgaccagcgacatccccgagaaaaatggtcagccgtggcgcattgaactttggtgcatcggcaccgatgcgttaagcaaatcgatggcggaaatcattcacgctgatatgcgccagattggcgcagatgtctcgctgtattggcgaagaagagagcagtatctatgctcgtcagcgcgacggtcgttttggcatgattttccaccgcacctggggcgcgccatatgatccacacgccttcctcagttcaatgcgcgtaccgtcacacgctgacttccaggcacagcaaggattagccgacaaaccgctgattgataaagagatcggcgaagtgctggcgacccatgacgaaacgcaacgtcaggcgctgtatcgcgacattctgacccgtctgcatgacgaggcggtttatctgcctatcagttacatctcaatgatggtggtatcaaaaccggagctgggtaacatcccctacgcgccgatcgccaccgaaattccgttcgaacagattaaaccgatgctggcctctacccgcaccatgctgggactggatcagccgctgtacgtccagtacggcacctggttgtggaaggcgctgcatcttgactttggtatcccattcggcggtcggcgcggtcacaccgaggccaaggaaagacatccccgcgacgtgcagcatcatatggccgacatccagcgttgccagcaccagcaccgaagggatcaccgcgcctgccagatgatcgacaaacacccgcacatggcccgcaccggaaagccgtga

SEQ ID NO: 28667 - DNA, 3378 bp, Homo sapiens
  SIMILAR (1207)..(1860): 991254mologous to Escherichia coli methionine synthase,accession number J04975,Smith-Waterman Score=1074.
atgcctgcgagtgttacgggatcgcgcgagtctgcgtcccgtccgcgtcggtcccatacccggtggggttcacaaagctcaggcggtcccctttttgactggctggtcagccagaacgaactcaaagctaacccggcgaaaggtgtttcggcaccgaaagcgccgcgtcatctgccgaaaaacatcgacgtcgacgatatgaatcggctgctggatattgatatcaatgatcccctcgctgtacgcgaccgtgcaatgctggaagtgatgtacggcgcgggtctgcgtctttctgagctggtggggctggatattaaacacctcgacctggagtctggtgaagtgtgggttatggggaaaggcagcaaagagcgccgcctgccgattggtcgcaacgctgtggcgtggattgagcactggcttgatttgcgcgacctgtttggtagcgaagacgacgcgctttttctgtcgaaactgggcaagcgtatctccgcgcgtaatgtgcagaaacgctttgccgaatggggcataaaacaagggctgaataatcacgttcatccgcataaattacgtcactcgttcgccacgcatatgctggagtcgagcggcgatcttcgtgcgagaggcgcttacctttgtgccaaattattatccggggctgcgcaggttccagaatggagatctgcattcgcctggtttgcccgctgtgccgaacaggcaaggcaaaaccagtacttacaggtcagctcttgcgtacccgccctggaaggctgcgatgttaacggtgccagttttacccttgaacagatgctcgcctggcgggaccatccgcaggttaccggccttgcagaaatgatggactaccctggcgtaattagcgggcagaatgcgctgctcgataaactggatgcatttcgccacctgacgctggacggtcactgcccgggtttgggtggtaaagaacttaacgcctatattactgcgggtattgaaaactgccacgaaagttatcagctggaagaaggacgccggaaattacaactcggcatgtcgttgatgatccgcgaagggtccgctgcccgcaatctcaacgcgctggcaccgttgatcaacgaatttaacagcccgcaatgcatgctctgtaccgatgaccgtaacccgtgggagatcggccatgaaggacacatcgatgccttaattcgccggctgaaatgcattaccgagtttatcgagcaggataccgaagaagcccgccagcaggctacgcgcccgattgaagtgattgaaggcccgttgatggacggcatgaatgtggtcggcgacctgtttggcgaagggaaaatgttcctgccacaggtggtcaaatcggcgcgcgtcatgaaacaggcggtggcctacctcgaaccgtttattgaagccagcaaagagcagggcaaaaccaacggcaagatggtgatcgccaccgtgaagggcgacgtccacgacatcggtaaaaatatcgttggtgtggtgctgcaatgtaacaactacgaaattgtcgatctcggcgttatggtgcctgcggaaaaaattctccgtaccgctaaagaagtgaatgctgatctgattggcctttcggggcttatcacgccgtcgctggacgagatggttaacgtggcgaaagagatggagcgtcagggcttcactattccgttactgattggcggcgcgacgacctcaaaagcgcacacggcggtgaaaatcgagcagaactacagcggcccgacggtgtatgtgcagaatgcctcgcgtaccgttggtgtggtggcggcgctgctttccgatacccagcgtgatgattttgtcgctcgtacccgcaagagtcgaaacccaggcggtacagctaacgcacaatctaccttcgagcaaaaagcggcaaatccctttgataataacaatgatggtctgccggatttaggcatggctcccgaaaatcatgatggggaaaaacactttgctgaaattgtgaaagatttcggcgaaaccagtatgaatgataacgggctggatactggcgagcaggcaaaagctttcgcattgggaaaagtccgcgaatggtggtcgatgccggacaatgacattcgccgccgaagaaccgcaaggcattcacgcctgaaagagaatctgccgctgattacgctaatcgtgatgatggcaatcagctggggtctggagcagttcaatcatccgttcgggcaactggcgtttatcgcgaccacgctggttgggctgtacccgattgctcgtcaggcattacggttgatcaaatccggcagctacttcgccattgaaaccttaatgagcgtagccgctattggtgcactgtttattggcgcaacggctgaagctgcgatggtgttgctgctgtttttgattggtgaacgactggaaggctgggccgccagccgcgcgctgtggcgattaacagccatagcgccacccttgggacagcaactggttggcactctcgcacacgttccgccgttcttcctgatgatggcaggtctggcggtttacgcggtgctgtttgcgggctggtcaagtaacaacaaatactcgttgctgggtgcgatgcgtgcttctgcgcagaccctgagctacgaagtgttcctcgggctttccttgatgggcgtggtggcgcaggccggttcattcaacatgaccgacatcgtcaacagccaggcgcatgtgtggaacgttatcccgcaattctttggttttattacctttgccatcgcgggcgtggcggtatgtcaccgtcacccgtttgaccagccggaagccgagcaggaactggcggatggttaccacattgaatattccggtatgaagttcggtctgttcttcgtgggtgagtacatcgggattgtgaccatctctgcattgatggtgacgctgttcttcggtggctggcaaggcccgttgttaccgccattcatctggttcgcgctgaaaaccgcgttctttatgatgatgttcattttgattcgtaatgtccttcggctggaaaatctgcctgccgctgacgctgatcaacttgctggtaacggcggctgtcattctctggcaggcgcaataaggggcaataagaccatgaccttaaaagaattgttagtaggtttcggcacccaggttcgtagtatctggatgatcggcctgcacgcgttcgccaaacgcgaaacgcgaatgtacccggaagagccggtctatctgccgccccgttatcgtggtcgtatcgttctgacccgcgacccggacggcgaagagcgttgcgtagcctgtaacctctgcgcggtagcctgcccgtcggctgtatctcgatgcaaaagcagaggatag

SEQ ID NO: 28668 - DNA, 3117 bp, Homo sapiens; identical to SEQ ID NO: 9168
  SIMILAR (2479)..(3114): 1001254mologous to Escherichia coli K12 putative glutamine synthetase (EC 6.3.1.2),accession number AE000228,Smith-Waterman Score=1134.

SEQ ID NO: 28669 - DNA, 3069 bp, Homo sapiens
  SIMILAR (602)..(658): 781254mologous to Escherichia coli K12 transport of D- alanine, D-serine, and glycine,accession number AE000492,Smith- Waterman Score=71.
atggtggcgatgcactttcagtcaccgactggtgtggaagcgtcattcgcgcatttgtggaatgacggcggctggttcccgaaagggttaagtgggttctttgccggattccagatagcgggtttcgctttcgtggggattgagctggtaggtacaacagctgcggaaaccaaagatccagagaaatcactggcacgcgcgattaactccattccgatccgtatcattatgttctacgtcttcgcgctgattgtgattatgtccgtgacgccgtggagttcggtagtcccggagaaaagcccgtttgttgaactgttcgtgttggtagggctgcctgctgccgcaagcgtgatcaactttgtggtgctgacctctgcggcgtcttccgctaacagcggcgtcttctctaccagccgtatgctgtttggtctggcgcaggaaggtgtggcaccgaaagcgttcgctaaactttctaagcgcgcagtacccgcgaaagggctgacgttctcgtgtatctgtctgctcggcggcgtggtgatgttgtatgtgaatcctagtgtgattggcgcgttcacgatgattacaaccgtttccgcgatatctgtttatgttcgtctggacgattatcctttggtcgtaacttttgtatctgaaacaggcgtcctcatctacatgagaagtcgcactacaagatgccgatcggcaagcagatgtgctggacggcatcgcgaaaacggcgggaccgggaaaacgcacacagcgaggggagcccggagttacacccccaccggcaataagagagggggtccaagtaacgaatatccgtggcacgaacgttttattacctttgccatcgcgggcgtggcggtatgtcaccgtcacccgtttgaccagccggaagccgagcaggaactggcggatggttaccacattgaatattccggtatgaagttcggtctgttcttcgtgggtaatgtccttcggctggaaaatctgcctgccgctgacgctgatcaacttgctggtaacggcggctgtcattctctggcaggcgcaataaggggcaataagaccatgaccttaaaagaattgttagtaggtttcggcacccaggttcgtagtatctggatgatcggcctgcacgcgttcgccaaacgcgaaacgcgaatgtacccggaagagccggtctatctgccgccccgttatcgtggtcgtatcgttctgacccgcgacccggacggcgaagagcgttgcgtagcctgtaacctctgcgcggcactaaccccaaggcgggacacagactcactgagcataccagcatcaagctgtgcacaagaaatctacaagcgacattcagcggaaattcgcccttctgtgggaacttccaatgccgagccacacacatctagtctggtgttctctcctatctttctgtcgcgcaactatctctttctgtgtgtgtatcacgatcaagaagaaccgcgcgaagagagacgaacgaatgagaacaaagaagaggagagagagaaaagggggacaggcatgcagagaagagaacgaaagcggcagacagcggaacacagccgagacgaggagggagcaataggagagcgaagagcagaggcgcagcgagagaaggcgaggagacgcaggacagccgcaagagacagcgggacgcacaagacagcgaaagaagaccacaggagaggggaaggacgcgcagcccagaacgaacgagaagaagaggagagagggcgaaaagacgaagcagagagaaacggagggaagaggagcgaacgagagagaaggcagagacagatgctgagacaaaagagcagagaagaacaccgaaacccctccactctgggttcgcctctcccggaggatccaacaaaggaccggtccatcaactgcaactcccacgcagtgaccacggctcctcaggacccacctggctacccaccccacggaaggttacgggaattcggtcacgagggaattaccattttagaagaccaaataagagctcgagatcaggcggccacaggaactaactttgcagtacacgagataaacatcaaacacctacaaggagttggagatcttcgaggaagagtagccagaacacaccgcaccaccgccacaacccgcatcccaccccacccacaccaagacacagacagcacacgcaaatatcgaccggtccaccttcattatgaactgagacaacagcgttcacacctttccagagcctactacatcgtattaatcagtttcaaaggcaaccctggtgaccctgctcttaggtctctgttgtctcgagttgttgcacagtatgctcaacgaaatgcaaagattcaagatcaacaagaagctattgactggcttctcggtctagctgtgaggcttgaatatggagataatgctgaaaaatacaaggacttagtacctgattatgcaaaaactgctgacaatgcaactaaaaatgcagaaccattgatcaatttggatgtaaataatcctgatgttaaggctgatgtcaatcatggaaaatgtgagagagaagagaagagcaatactgaaaaagtttccccgtgccacacctactcgcaggtgtcttggcagggaatccaggagcaaatgccttcaaaacgccaagaactttggccatcaaatgaatgtgcaggtgtctactatagtgttaaaaatgttataaaggtattgatccacaccaatttccatcttgccattagatgtgattcaagcattgtgaagctttctggagacattcacttattcaggcaagagcaccagcaaattgagaaagccattcaagaattcgtgcccgccctggaaactctttccaagaacttggacatgaagggaaggggcctgccccaacctgatgaatccagaaccacaccacaacaggcctgtcacggatgcccgatcccactcaaagaaccatactcctcaagccgtgagaacaccaaagaacgtcaggctgaagctgatctccgctctcctgcagcacagacggaacccccaaacaacatctgggccctctga

SEQ ID NO: 28670 - DNA, 2229 bp, Homo sapiens; identical to SEQ ID NO: 17640
  SIMILAR (1299)..(766): 1001254mologous to Escherichia coli 4-alpha-l- fucosyltransferase,accession number M87049,Smith-Waterman Score= 911.

SEQ ID NO: 28671 - DNA, 2265 bp, Homo sapiens
  SIMILAR (768)..(4): 941254mologous to Escherichia coli high affinity ribose transport protein,accession number M13169,Smith-Waterman Score= 1207.
tcagttgattagatctcttttttctgcgccgacatctacgccacgggtaggttcatcaaggatcaacactttggggcgtgtcatcagaccgcgggcaatcgccactttttgctgattgccaccggaaagcagaccaattgcctgttccatcgacggagttttcacattaaacagacgaatgaaatcactcacagcctgctgttcatcggcatgcttcaaactgccgccagcgcggctgaagtagcgcagcgctgtcagcgacatgttctcttttactgacatgcccaacactaaaccgtcacgtttacggtcttcggagatatacacaatgccgtttgccaggccatcctgcggtgaacgggtaacgacttcatgcccatccagggtgacgtaaccgctggtgcgcggtagtgcgccgtagagcactttcatcagttcggtacgacctgcgcccatcaaaccagagacgccaagaatttcgcctttgcgtaaagtaaaagagacatcgttaacgccaggtccgcagagattatcgactttcaggcggatatctcccggcgctttgtccaggtgcggatattgatcttccagcttgcgaaccaccatcatctcaatcagcgaatcttcggtcagtgatgccacttcgcgctcagcaataaattggccatcacgaaaaacggtaacgtcatcgcaaatctcgaagatttctttcatgcggggggagatatcgaccataccgcgggcttgcgaattcagtccgcggataagcggaccaggatccggtcgcgataggccagggcatcgtcgggtcacccatagaaaactcgagtcaagcacacgcgtccgcgttatgaccaggtaatgtccttcggctggaaaatctgcctgccgctgacgctgatcaacttgctggtaacggcggctgtcattctccaggttcgtagtatctggatgatcggcctgcacgcgttcgccaaacgcgaaacgcgaatgtacccggaagagccggtctatctgccgccccgttatcgtggtcgtatcgttctgacccgcgacccggacggcgaagagcgttgcgtagcctgtaacctctgcgcggtagcctggccggtcggctgtatctcgctggtgagttagctcgtgtaccgctactttgtgctggatttggcccgcccgataaaacggtttatccccaaggatcgtcgcccgatgcattatccgtcgctgtggcaggtaatcggcattggcatagtgctgggtcacgcggttatcccaaatcgcaatatcatttggttgccagcgccagcgcacctgaaactccggtttggtgatatgggcaaacaaaaaacttaacaaggcttcgctctctttctcgctcacatcaacaattcgcgtagtaaagccttcattcacaaacagcgcctgtttaccgctcaccggatgcgttcgcaccaccggatgtagcaacggcgggtttttcgcgaccgcctcgcgccagcgttgatgttccggccaaggccccaactcaggcagctggcggaagggaacagagagcgcctcataggccgcaataccgctggtccagagcgtatcacggcggtcgaaggtactctttagctgcagaatcgccctgcgggtggcgttcataatgtccatcggatgcagtgtcgtatctggcgaaatcgtatggtacagccgatgattcgtaaccagttgtgatgccacttcatgggctttttcacgcccaaccaacaggtcgataattttcagaccaaagtcgatagctgtacccggcccctggctggtcagcaattttacccgtgcatcccagacgacgcgcttgtccagccattgttcggcgggaattttgtctttcagcgtcgggaagccggtcatattaccaatcgggaagatatcgtgcggcaccagcacggtggctggcgcggcgcaaatagccgcgacgatacgcccggaacggtggaactgtttaacggtttcaaccagcagagtgctatcgcgaaaacactccgcgcctttaatgccaccaggcagcacgatcacgtcatattcgccatcagccacttcgaccagcggcgcatccgccagcagcttcacgccgcgcgagcaggtaatcgccaggttaccatcgctggcgacgctggcagtggtgactttgataccgccgcgaaccagcagatcgatagtggtgacggcttcagtctcttcactaccaggggcgaggcaaaccagtgccgatgcgctcat

SEQ ID NO: 28672 - DNA, 1538 bp, Homo sapiens
  SIMILAR (232)..(888): 851254mologous to Escherichia coli NADH DEHYDROGENASE I CHAIN I (EC 1.6.5.3) (NADH-UBIQUINONE OXIDOREDUCTASE CHAIN 9) (NUO9),accession number D90859,Smith-Waterman Score=941.
atgacgaccacgttgcgctggagattgcgacgggggctgaaaccgcggggaactcggtggagcgagggtctgatgaccttccgggatctgcgccataatggtttcaacgtcttcgatgaagcccatgcgcagcatttcgtcagcttcatccagaaccagaccgctcagtttagagaggtccagagtgccacgtttcaggtggtccagcagacggcccggaggcgcgtaattctggaaaatctgcctgccgctgacgctgatcaacttgctggtaacggcggctgtcattctctggcaggcgcaataaggggcaataagaccatgaccttaaaagaattgttagtaggtttcggcacccaggttcgtagtatctggatgatcggcctgcacgcgttcgccaaacgcgaaacgcgaatgtacccggaagagccggtctatctgccgccccgttatcgtggtcgtatcgttctgacccgcgacccggacggcgaagagcgttgcgtagcctgtaacctctgcgcggtaacccttgccccgggtctcggcttgttattcttcgccttgacaaaaaaagccagaaaaaaccaaagaacggttcgcttggttacccgggaattttttccgcaatcaactttctcacgcttgcatttccgtggtctgtgcgaagaagcctgtccgaccacggcgattcagttaaccccggatttcgaaatgggggaatacaagcgccaggatctggtttacgagaaagaggatctgctgatctccggtccgggcaaatacccggaatataacttctaccggatggcaggtatggcaatcgacggcaaagataagggcgaagcagagaacgaagccaagcctatcgacgtcaagagcctgttaccgtaaggagaggggcaatggagttcgctttttatatctgtggcttgatagccatacttgcgaccttgcgagtgatcacccataccaatccggtacacgcactgctgtacctgattatttcgctgctggcgatttccggggtgttcttctcactgggcgcttacttcgccggtgcgctggaaattatcgtctacgcgggtgccattatggtgctgttcgtgttcgtggtgatgatgctcaacctgggcggttcagaaatcgaacaggaacgccagtggctgaaaccgcaggtgtggattggtccggcaattttgtcgccaatcaagtaggtggggtatggccaggccatcctcggtcttaacgatcagggtatcgacggtacgccaatcagtgctaaagcagtgggtattacgctgttcgggccttacgtactggcggtggaactggcttctatgctgctgctcgcagagcgttctgcgctggctccgtgcgctatcggtgcctgggttggtaacagctttggtgcgggcttctttggtgcactgatcgccgggattatcggcggcatcgtggtgcattacctgaagaaaattccggtgcataaagttctgcgctcggtgatagctgtcagctggtaccatttattcatttag

SEQ ID NO: 28673 - DNA, 3255 bp, Homo sapiens; identical to SEQ ID NO: 15733
  SIMILAR (1291)..(1698): 451254mologous to Escherichia coli dihydroxybenzoic acid- activating enzyme,accession number X15058,Smith-Waterman Score=218.

SEQ ID NO: 28674 - DNA, 1247 bp, Homo sapiens; identical to SEQ ID NO: 25587
  SIMILAR (625)..(1245): 981254mologous to Escherichia coli soluble lytic transglycosylase,accession number M69185,Smith-Waterman Score=1033.

SEQ ID NO: 28675 - DNA, 1413 bp, Homo sapiens
  SIMILAR (1413)..(913): 1001254mologous to unidentified bacterium transposase,accession number Z78058,Smith-Waterman Score=881.
tcaggccagtgtcctaaggacactcagagaacagcagcagcccgacacgagaccgttggtgtctgtctgccgcatggggtgcggacctcggtggtggcctgggtcctggctgggcgagggtgcgccctgccatctcagtgtgaccaccttcatgctgtcactgcatctcctctggcccaggaagctgcccctcggttgagaatcacaccgtgtggtcttctgtaacaggcacttgagccagacatacccatcaacacgcggggctgagtctggtgtttgtaaacgaccgctgtagcaatgtaccgacaaggttgccggtaacattaggatgagctgacaacgcctacctgccatgtggacatgtgttcctgcttttaatcctttcgccgacatgtaatcggccagcggactcccctgaatcaaatcgccgttatcaaccagtacgctgtttttcacttcattgcgggcatcgttaatcaggcttgccgtacgtaccagtccgaatttttccgtggcggtgtctttgtaataatcgaaatccatcatgttgctatgcagatcagtggtttccatgatacgcagatcgaccgtcgctgcattcacactggcggcaatcagcgtggccaggagcgttgcgctaaacttaatcatcagggacatcggaatgcaggcgatgccattatgcaggtctacgacgggacgaaaccgatggacgtcgtcagcaaagcggacaattctccggtaacggcagcggatattgccgctcacaccgtgctgacaccggatgttccggtcctttctgaagaagatcctttcggatgggaagtccgtcacacttggagcgttactggctgatgtgacgcagtcggatgaaccactttgaggatcccccgctgggtccaaggccaaatgcccgcaatccagcccgcgcagaaaacccatcatgtcaaagcgcattccttctgcagttaaccagcgcaatcctcgccagtgaacccggacgatataatcagcttctccaaaagcaagtgagcggatacattcgggacgcgaaccgaatccccggtcagcaatgcgtatctcgtctgccgtttgcgcaaatcggtccagccgttcagcgtctctgctgtcggttagctcaaaatcagtgaactgacaggtatgaggatcatatcccatatgtagtcgccattcagcgctgccgcccccgggcgcactgattgctgttccatcgacaagacgcaatctctttccgcttgtacaacccgtaactgcggcgcgtacagcaagtgtttgtgcggcaagtatgccaaaccagtcggcggcattccgcagccgcttcaggagagccacgtcagataatgttgcaacgtcatggagctgagcccatgcagtgacttcacgtaatgacat

SEQ ID NO: 28676 - DNA, 1479 bp, Homo sapiens
  SIMILAR (1464)..(511): 801254mologous to Escherichia coli K12 2':3'-cyclic- nucleotide 2'-phosphodiesterase,accession number AE000492,Smith- Waterman Score=1275.
ctacatcgtcaacgttatattttgatagtttgacggtgtaatgtctggtaattcggtggtcttgtccttgccatttcgcaatctgcagattcggatacatctgtcaacgccgctaatcaggttgtttctgttggtgctgatattgcttttgatgccgaccctaaattttttgcctgtctggttcgctttgagtcttcttcggttccgactaccctcccgactgcctatgatgtttatcctttggatggtcgccatgatggtggttattataccgtcaaggactgtgtgactattgacgtccttccccgtacgccgggcaataatgtttatgttggtttcatggtttggtctaactttaccgctactaaatgccgcggattggtttcgctgagtgagggtccgacatttagtctccgtttctcgtcgtctggcgaaaaatatgggcggcgatattacggttaccagcgaacagggcaaaggttcaacctttacgttgacgatccacgcaccgtcggtagcagaagaggtcgatgatgcgtttgatgaagacgatatgcctttaccggcgctgaatgtgtggcgtgtggcatcgtgatcggctttgagtgtttctaccagcttgctgtcttccgccgcgagggattttttattagcgatgtcgtaaatcggtcgtgcttccgctttcgcctgcgtcacctgccatttaccgctgtcattactgagttgtaagtcgaccacaccaagatgatcgccccacatgcctggcattaccgccggaacaccattcagcgtgcctttggcgatatcagccccttcgatatcagcaaaatctttacctgggaaaacggcgtgagcatggccaaacataatggcgttaacgcccggaatttcactgaggtaataaactgagttttccgccatcactttatacggatcggcagatagcccggaatgtgccagaacgacaacaacatcggcacctttctcgcgcatttcaggcacgtatttgcgcacggtttcggtaatatcattcaccgtcactttcccggataaattagctttatcccagcccatgatttgtggtggcacgacgccaatatagccaatcttcagcgtctgtttttttccgtctttatcgaccacttcggtgtctttaattaaatacggtgtaaacattggctgtttggttctggcgtcaatgacgttggcatttacataagggaatttcgctcctgccagcgcatttttcaggtaatccagaccgtagttaaactcctggttgccaagcgttccgacggtatagtccagcgtatcagtcagaatttttccgtgtcggtgtactttgtaataatcgaaatccatcatgttgcaaagcagatcagtggtttccatgataagcagatcgaccgtcgctgcattcacactggcggcaatcagcgtggccaggagcgttgcgctaaacttaatcatcagggacat

SEQ ID NO: 28677 - DNA, 907 bp, Homo sapiens
  SIMILAR (642)..(881): 461254mologous to Escherichia coli ugpB precursor (AA -23 to 415),accession number X13141,Smith-Waterman Score=165.
atgacgcagagccgtttacggtgcttatcgtccctgacagatgtcgcttatgcctcatcagacaccatggacacaacgttgatgaagcacccacttgttgtcatacagacctgtttaacgcctgctccgtataggagtgggggcagtgacgaccattccgttctggcattctatggaagggaactgggtaaagaggtggattctctggcccaacgttttaacgccgaaaaccggattacaaaattgtaccgacctataaaggcaactacgaacagaattaagcgcggggattgccgcatttcgtaccggcaacgcgccggctattttgaggtttatgaagttggcaccgccaccatgatggcgtcgaaagccattaaccggtgtatgacgtgtttaaagaggcagggattcagttcgatgagtcgcgtttgtgccgacggtttcagccattcaacagctcgacccccgttctctattacaacaagacgccttcaagaaagcaggattagacccggaacagccgccgaaaacctgcaggatctggcggactatgccgcgaaactgaaagcctccggcatgaagtgcggctacgccagcggctggcagggctggatccaactggaaaactttaggcctggaacggcatgatgccttacgacgccgatgcgaaagatgcgccacaaaagccattatcggcggagccagcctgtgggtgatgcagggtaaagataaagaacgtataccggtgtggcgaagttcctcgatttcctcgcgaagccagaaacgctgccgagtggcatcagaaaaccggttatctgccaatcaccaaagcgcgtatgacctgacccgtgagcagggcttttatgagaaaaacccaggggggataccgcgacgcgtcagatgctga

SEQ ID NO: 28678 - DNA, 3266 bp, Homo sapiens
  SIMILAR (959)..(1939): 981254mologous to Escherichia coli K12 soluble lytic murein transglycosylase,accession number AE000509,Smith-Waterman Score= 1658.
tgtagagtttgattcagaccttctatattttcccgcttatccgtgccccatctcccattttccctcacccacgccgtcaccgccttgtcatctttctgacaccttactatcttacaaatgtaacaaaaaagttatttttctgtaattcgagcatgtcatgttaccccgcgagcataaaacgcgtgaattcgcgcattcggtacaacaagagagataaacgatgaaaccgttacattatacagcttcagcactggcgctcggactggcgttaatggggaatgcacaggcagtgacgaccattccgttctggcattctatggaaggggaaccgggtaaagaggtggattctctggcccaacgttttaacgccgaaaacccggattacaaaattgtaccgacctataaaggcaactacgaacagaatttaagcgcggggattgccgcatttcgtaccggcaacgcgccggctattttgcaggtttatgaagttggcaccgccaccatgatggcgtcgaaagccattaaaccggtgtatgacgtgtttaaagaggcagggattcagttcgatgagtcgcagtttgtgccgacggtttcaggttactactccgacagcaaaacgggccacttactctcccagccattcaacagctcgacccccgttctctattacaacaaagacgccttcaagaaagcaggattagacccggaacagcccgccgtaaacgctggcaggatctggcggactatgccgcgaaactgaaagcctccggcatgaagtgcggctacgcacgcggactggcagggctggatccaactggcaaactttagcgcctggaacggtctgccgtttgccagcaaaaacaacggctttgacggcacggacgcggtgctggagttcaataagccggagcaggtgaaacacatcgccatgctcgaggagatgaacaagaagggcgacttcagctacgtcgaggatgcgcttgtggaaaaagccaaacaagttacctggcggctgttggctgccggtgtctgtctgctgacggtcagcagcgtggcgcgagccgactcactggatgagcagcgtagtcgttacgcgcaaatcaagcaggcctgggataatcgacaaatggatgtggtcgaacaaatgatgcctggactgaaggattatccgctttatccctacctggaataccgccagatcaccgatgatctgatgaatcaaccggcggtgacggtcactaactttgttcgcgctaaccccacgcttcctcccgctcgcacgctgcaatctcgtttcgtcaatgaactggcgcggcgtgaagactggcgtggcttgttagcctttagcccggaaaagcccggaactaccgaagcgcaatgtaattactactatgcgaaatggaacaccgggcagagtgaagaagcctggcaaggggcgaaagagctgtggctaaccggcaagagccagcctaacgcctgtgacaagttatttagcgtctggcgtgcgtcaggtaaacaagatccgctggcgtatttagagcgtatccgtctggcgatgaaagcgggtaacacaggcctggtaacagtgctggcagggcagatgcctgccgattaccagactatcgcctcggcaatcatttcactggcgaacaaccctaatacggtactgaccttcgcgcgtacaactggcgcgaacgattttacccgtcaaatggcggcggtggcgtttgccagtgtggcgcggcaggatgctgagaatgcacggctgatgatcccatcgcttgcccaggcgcagcagcttaatgaagatcagattcaggagctgcgcgatatcgtcgcctggcgtctgatgggcaacgatgtcaccgacgagcaggcgaactggcgcgatgacgccattatgcgctcgcaatctacttcgcttattgaacgccgtgtatatcagcacaacattacgtttgcgctggatgactttggtacgggttatgcgacctatcgttacttgcaggcgttcccggtcgattttattaagaatcgatttagcgcaacgctcctggccacgctgattgccgccagtgtgaatgcagcgacggtcgatctgcgtatcatggaaaccactgatctgcatagcaacatgatggatttcgattattacaaagacaccgccacggaaaaattcggactggtacgtacggcaagcctgattaacgatgcccgcaatgaagtgaaaaacagcgtactggttgataacggcgatttgattcaggggagtccgctggccgattacatgtcggcgaaaggattaaaagcaggtgatattcacccggtctataaggcattaaatacgctggactataccgtcggaacgcttggcaaccacgagtttaactacggtctggattacctgaaaaatgcgctggcaggagcgaaattcccttatgtaaatgccaacgtcattgacgccagaaccaaacagccaatgtttacaccgtatttaattaaagacaccgaagtggtcgataaagacggaaaaaaacagacgctgaagattggctatattggcgtcgtgccaccacaaatcatgggctgggataaagctaatttatccgggaaagtgacggtgaatgatattaccgaaaccgtgcgcaaatacgtgcctgaaatgcgcgagaaaggtgccgatggtgttggcgtttcgggcacattccgggctatctgccgatccgtataaagtgatggcggaaaactcagtttattacctcagtgaaattccgggcgttaacgccattatgtttggccatgctcacgccgttttcccaggtaaagattttgctgatatcgaaggggctgatatcgccaaaggcacgctgaatggtgttccggcggtcatgcccggcatgtggggcgatcatcttggtgtggtcgacttaccactcagttatgcaccgcggtcaatggccgctacccaggctaaagcgcgagcccgaacgctctccgccttcgctctctccactccctcgcggcgcaaaccacccgcggcttacacctctccacccatcccgtcgcccacacaaatgccccaacacacccgacactccccacacttcaaccaacacccacacaacaccacccacacaaccaccacccccatcactctttctccatctaagcaccgtcaccacaacactaaccaccccccacacctgcaccacaccacctccatgaagcaaccctcccttggtagacttaccaggactccttactga

SEQ ID NO: 28679 - DNA, 2746 bp, Homo sapiens
  SIMILAR (1153)..(437): 911254mologous to Escherichia coli ribonucleoside triphosphate reductase,accession number L06097,Smith-Waterman Score =1186.
ctgtgcccaggtgagattcatccgcatcaatgtatgcaccaggcgaatgccttgtgcattcccctcaaaatgacataagtcctgacgaatcttgcgccgcagctcgttaagcggttcttccccgtcccgtaaacgtagtgccgccacgctgcagcgatcgtcagtcagaggctggctttcggcatcttccgggtgcaaacgttggcgaaaccagtcatttatcgccgcttcgccaaaatgaccaaacggcggattgccgatatcgtgcatcaggcatgacatctcaacaatgctttcaaagggaccggtcagttcatccaggccgtatgcttccagtaatttaagctctttcagacggcttaaaatttctttggcgatgtagcgccccacctgctggacttccatcgagtgggtaagacgcgtgcgcacggcggcattgcgctccagtggaaaaacctgggtcttttgttgcagacgacgaattgccggagagttgatgctgactaaccgacacacgggaggcgtcatggttaccacatttcgggcaagtgaagcctttgctggtgcactcgaactcaccggtaaagccacactcgtagcactcatcaatcggtgtattggtgccgtaatacggtacatgctgatagctgtaatcccagacatcttccagcgccttcaggttgtgctgaatgtttggatactcgccgtagcaaatgaaaccaccgttcgccagcggcgggtaaggcgcttcaaagtcgatcttgtcgtacgggttcaccttcttctccacatcgaggtggaaactgttggtgtagtaacctttatcggtcacgcccggcaccacgccaaactcagcagtatcgagacggcagaagcgatcgcacaggttttcactcggcgtgctgtagagactgaaaccataacccgtttcttctttccactgatccactgcctgacgcagacgttcaacaatggcgatacctttcgcgcgaagctgctcgttgtcgtaaacatgctcgccgccgaacagcgcgttaatggtttcgtggatgccgatgtaacccagcgaaatagacgcacgaccgtttttgaagatttcagaaacatcatcgtcagcattgagacgcacgccacaagcacccggtacgggtaatgcgttggtccgcctgcaatgcgggcatgttctggcgcggtccagccagttcaatggcttcatccgggaaaacttcggcagggtgaaccaagtcgagatctggtgcgtcaaaggccagcagctctttgtctgccacgccgccacaggattctgcgagggtataacggcaatatccagcgccgcctgtacagtacgggcaatggcctgcgggcttaaatcggtggatgatgcgctacctttgcggttctggtgataaacagtgatccccagcgcgccatcgctattgaattcaacattctccacttcaccataacgcgtgcttacgctaatgccggtggtcttgctgacggcaacttccgcaccgtccgatttgcctgaggccaactccagcgcagtggaaactgcttcttccagaatcttgcgctgcgcttcaacttgagagattactttcattgcaagtgccataatgtagagagtttctctgaagtctaacagagaaccgtttttcagtgcgcatcttaactgtcgcagatattgattgatggtcattccagtctgctggcgaaattgctgacgcaaaacgcgctcactgcacgatgcctcatcacaaaatttatccagcgcaaagggacttttcaggctagccgccagccgggtaatcagcttatccagcaacgtttcgctggatgttggcggcaacgaatcactggtgtaacgatggcgattcagcaacatcaccaactgcccgaacagcaactcagccatttcgttagcaaacggcacatgctgactactttcatgctcaagctgaccgataacctgccgcgcctgcgccatccccatgctacctaagcgccagtgtggttgccctgcgctggcgttaaatcccggaatcgccccctgccagtcaagattcagcttcagacgctccgggcaataaataatattctgcaaaaccagatcgttaacggaagcgtaggagtgtttatcgtcagcatgaatgtaaaagagatcgccacgggtaatgcgataagggcgatcgttgagtacatgcaggccattaccgcgccagacaatcaccagctcacaaaaatcatgtgtatgttcagcaaagacatccaatatgatggcggcgttttctaaaacgttggcgctggtgacagcatggtcggcgcgatgacactgaaactggcagaaaatgcctctcttgaagagatggttcgttttggcgtagcagcgtttgtaaacgtgcgccggagcggtattttcaaagccgccgatatcgtggctccagaagccaaaacctgaaaggccaatagacaaaccaccgcgcaggctttccgccattgattcgtagttagcgtaacaatcgccaccccagtgtaccgggaatttctgcgcaccgacggaggccgagcgggcaaacaagacagcttcttcctcaccaacggtgtccttgagcacgttccacaccagttcgttgtagatgtacgcataatggttatgcattttctgcggatcggaaccgtcaaaccactgaacatcagttgggatacgttcgccaaagtcggtcttaaagcaatcaacgcccat

SEQ ID NO: 28680 - DNA, 1510 bp, Homo sapiens
  SIMILAR (1216)..(1476): 911254mologous to Escherichia coli Outer membrane protein precursor,accession number D90821,Smith-Waterman Score=429.
atggctgtgggagggaacttgggagacaacggccagggggctggctacagcggcggagagagaagagagagtaagggagtgaaatggggatgcctggggtgcaggagtagagaaatgccgactaggcgacaagatggaagaacgtgtgtagaagaaatgacactggaggcgggagtgatgaaggggagtcgtgtaaagctggttcaggcgacagatacgagattcggacaaggggaaagtgtaatcctgaaggacgggattgcgggagaacaaagcccgagagactgtaggggaataggccgggagagtcccgccgacacacgtctacccttttcatttacacgttcccttgccacatcggcatccacgaaaccattaacgcgctgttcggcggcgagcatgttacgacaacgagcagcttcgcgcgaaagtttccacctcgatgtggagaagaaggtgaacccgtacgacaagtcgactttgaagcgccttacccgccgctggcgaacggtggtttcatttgtacggcgagtatccaaacattcagcacaacctgaaggcgctggaagatgctgggattacagctatcagcatgtaccgtattacggcaccaatacaccgttgatgagtgctacgagtgtggctttaccgatcttgacccgctgctgtaccagtgccaaactggctcgccgacgctccccagtcggatacggacccctagtgtccattagggcgtccaacccaccctacacggttgatttctgggcacattacaccgtgttttcacccccacacattcacttcatttctgatttatggcaagtttattaccacggatgtcggtacagacaacgcactaccgtgctgcacctgtctagtgtcgccagagctcagctgtgcatccaggaagccgcgcttcacttagtgcttgcacataccgtcgtcgtagaggagatcagacggatcatcgaaatcctggaaactaaagagccttggctagtctccgacacgattgtccctttaacccctccgggaatccgctgttcgtacccagtagccctgtacattcactgtagcgctttagaagttttcttggtacgtgtggaagagccacggtccgaaaacgcgcggaaatacattcatgcgtttcatcgtaacaccataggcggcggttaccaagactggttgaaattcccgaagcaacagtcatgtgctcagtggaacagcgaaaaccagaacgaatactattatggcgtatcgcgcaaagagtccgctcgcatcggtctgcgtggctataacccgaacgacagctggagcccttacctggagctgagcgaccagctgacaagctatctcggcgactggagtgtttacggtaccgcacgctacacccgtctgtctgatgaagttactgacagcccgatggtggataaatcctggactggcctgatttctaccgggatcacctacaaattctgataatgcatctttccagggcatttgtgcataa

SEQ ID NO: 28681 - DNA, 1306 bp, Homo sapiens
  SIMILAR (25)..(699): 981254mologous to Escherichia coli similar to purine nucleoside phosphorylase (deoD),accession number U70214,Smith- Waterman Score=1114.
atcgggcttatcgcgagtaaatctatgaaaatcggcatcattggtgcaatggaagaagaagttacgctgctgcgtgacaaaatcgaaaaccgtcaaactatcagtctcggcggttgcgaaatctataccggccaactgaatggaaccgagtttgcgcttctgaaatcgggcatcgctaaagtcgctgcggcgctgggtcccactttgctgttggaacactgcaagccagatgtgattattaacaccggttctgccggtggcctggcaccaacgttgaaagtgggcgatatcgttgtctcggacgaagcacgttatcacgacgcggatgtcacggcatttggttatgaatacggtcagttaccaggctgtccggcaggctttaaagctgacgataaactgatcgctgccgctgaggcctgcattgccgaactgaatcttaacgctgtacgtggcctgattgttagcggcgacgctttcatcaacggttctgttggtctggcgaaaatccgccacaacttcccacaggccattgctgtagagatggaagcgacggcaatcgcccatgtctgccacaatttcaacgtcccgtttgttgtcgtacgcgccatctccgacgtggccgatcaacagtctcatcttagcttcgatgagttcctggctgttgccgctaaacagtccagcctgatggttgagtcactgtcactgttcagggcgctggtcgccctgtcttttcttgcgccactgtggctcaaccccggcgccgcgcgtcatcacgctttctcccgccaacactgaacttgcctttgccgccgggatcacgccggttggggtcagcagctattccgactatcctccacaagcgcaaaagattgagcaggtttccacctggcaggggatgaatctggaacgcattgtcgcgctgaaacccgatctggtgattgcctggcgtggaggtaatgccgagcggcaggttgaccagctggcttcgctgggaataaaagtgatgtgggtcgatgcgacaagcattgaacaaattgccaatgcgttacgtcaactggccccctggagtccgcaaccagacaaggccgaacaagccgcgcaatccctgctggatcagtacgcgcaattgaaagcgcaatatgctgataaacctaaaaaacgtgtttttctgcaattcggcattaatccgccatttaccagtggaaaagagtcgattcagaaccaggtactcgaagtttgtggcggagaaaacatctttaaagacagccgggttcctgtccgcaagttagccgcgaacaggtgttag

SEQ ID NO: 28682 - DNA, 1023 bp, Homo sapiens
  SIMILAR (647)..(673): 1001254mologous to Escherichia coli lipoprotein-34,accession number X57402,Smith-Waterman Score=43.
atgcgtactcgagagaatatcgtcggcaacctgcggatcgttaatccggtttgtggttaccagcggcagcgagacgtggcctttcagtttgcgcgtgacccagctaaatgcgccgcgcggcacgggcgtggcaatggtcggaatacgtgcttcatgccagccaatgccggtgttgataatggtcgcgcccgccgcttcaactgcctgcgccagctctaccgtttcggcaaaagtcccgccgtcttcgaccaggtcgagcatcgacagtcggtagataataatgaagtcgttgccgacggttcgcgcaccgcacgcactacttctacggcaaatcgcatccggttgcggctggccaaaatccgtgacagcattcagggtcatataatccggcgagctgacagaaagtacattgccgagcgtcaaaattgccatcaggaaaatcatagcacatacgacgggcacgaagagcaaatcacccgcacatcggcctgtggacggttcttcgcaagccagcgacgcatcgacatacactgcgtgacgccgcagcctgccgccagcaacaggaatttatcttctgctttatcgtcgcagaggatcccgcgggtactcgaggcgagaattcatctgccactgacgccgcgaacctgcgcaaaatcgtgcctccaccactatgacgtacaaagtgcagctgatgacaccggtttaccaatgctggtcgtacgcgggccgttcaatgtggtttggcaacgtctgccagcggcgctggaaaaagtgggcatgaaagtgaccgacagcacccgttcgcagggcaacatggccgtaacttataagccgctgtctgacagcgactggcaggaactgggcgcgagcgatccaggcctggcatccggtgactataaactgcaggttggcgatttagataaccgcagcagcctacagttcatcgatccgaaaggtcatactctgactcagagtcagaacgacgcgctggtagctgtcttccaggctgcgtttagcaagtaa

SEQ ID NO: 28683 - DNA, 1525 bp, Homo sapiens
  SIMILAR (1524)..(748): 991254mologous to Escherichia coli fixB,accession number X71977,Smith-Waterman Score=1291.
  misc_feature (1)...(1525): n = a,t,c or g
tcagcaggggatggcgcgcgcattgagcagtttgatcgcaaaggtatggtgaacaacaagttcaactacttcattatgagcaaactggctgaagcgggtatcccgactcaaatggagcgtttgcttctccgataccgaatgtctggtgaaaaagctggatatggtgccggttgagtgtgtcgtgcgtaaccgtgctgctggctctctggtgaaacgtcttggaatcgaagaaggtatttgagctgaacccgccgctgttcgatctgttcctgaaaaacgacgccatgcacgatccgatggtcaacgaattcttactgcgaaacctttggctgggtgagcaaagagaacctggcgcgtatgaaagagctgacctacaaagcgaacgacgtgctgaaaaaactgttcgatgatgctggtctgattctggtcgacttcaagctggaatttggtcctgtacaaggcgaagtggtactgggtgatgagttctcccggacggtagccgcctgtgggnacaagaaacgctggagaaaatggacaaagacggtttccgccagagccttcggtgggctgatcggagcctatgaagccgtcgcccgccgcttgggttacacttgacttattttcctgtccacatcttgcgtgcactggcacggaaacaacggtctcggatatatcatgacagtcatcttcgcatttatcagttcctgtgtacttctctgacatgtcagctgcagggccaaaatgcagccgcgctaaagctgcggtcagcgccggaaggatcttcacggcgtcgccaacaatgccgtaatccgcgtactggaagatcggcgcatttttatctttattgatggcgaaaatggtttgcgacgcgttagcgccaaccatgtgctggatctgcccggagatccccaccgccaggtacagttcaggtttcagcatcaggttggagataccgacatagcgttcgtgctccatccatttttcgttttccgccaccggacgagaacaggccaactccgcacctatcgccttgcaaagctgttctgccagcgcaatgttctctttgctgccaataccgcgaccgacgctgaccaccagacgggctttgtcgagatcgacgctgttgctctggcgcgcctgggttgccgtgcgggtaatcgccacagccggagcctgccactccacggtgtgcgtttcgccagtgcgtgacgcgtctggctgagccgcatcgaacgtgccgctgctgatggtcagtaccgcatacggcgtggcaatgcgttcttcgccaatcgccagaccaccgtaaaccatgtgtttcactgtcgctttaccgtcctgtacgctgacggtgctggcatcgttagacaccgccgctttaaggcgataacccagttttgccgccagtaatttgccgcgacgggtgtttggcagcagcaccaggccgtctgcgccgtgctggcgaatagtgtcagccatgacaccggcgtaatcttcgatcatccgatcgtccgggttgccggttaat

SEQ ID NO: 28684 - DNA, 1005 bp, Homo sapiens
  SIMILAR (250)..(576): 1001254mologous to Escherichia coli 5'-phosphoribosyl-5- aminoimidazole-4- N-succinocarboxamide synthetase (EC 6.3.2.6),accession number M33928,Smith-Waterman Score=551.
atgtgtctgaaccggccagtcaaagggttgcgcaagtgcgcaacggcgctggaaaaatggcaagaagtgaccgacagcacccgttcgcagggcaacatggccgtaacttataagccgctgtctgacagcgactgccaggaactgggcgcgagcgatccaggcctggcatccggtgactataaactgcaggttggcgatttagataaccgcagcagcctacagttcatcgatccgaaaggagtgataaagatgcaaaagcaagctgagttgtatcgtggtaaagcgaaaaccgtatacagcacggaaaacccggacctgttggtgctcgaattccgcaatgatacgtcagcaggggatggcgcgcgcattgagcagtttgatcgcaaaggtatggtgaacaacaagttcaactacttcattatgagcaaactggctgaagcgggtatcccgactcaaatggagcgtctgctctccgataccgaatgtctggtgaaaaagctggatatggtgccggttgagtgtgtcgtgcgtaaccgtgctgctggctctctggtgaaacgtcttggaatcgaagaagccgaggcagccgctgcggcactgaagaagaaagcggaagcggcagaagcagctgcagctgaagcaagaaagaaagcggcaactgaaactgctgaaaaagccaaagcacaagctgataaaaaagcggctgctgaaaaggctgcagctgataagaaagcggcagcagagaaagctgcgaccgacaaaaaagcagcagaaaaagcggatgctgaaaaggcagcagctgataatatagcagcggctgaaaaagccgccgcagacaaaaaagtcaacaactcgttgcgattcatgcgatcgataaacgagtccgcgctgtttgtgcgccgggcgctggtcgcctttttggggattttgctgctgaccggcgtgcttatcgccaacctgtataatctgcaaattgttcgctttaccgactaccagacccgctaa

SEQ ID NO: 28685 - DNA, 422 bp, Homo sapiens
  SIMILAR (49)..(420): 801254mologous to Escherichia coli similar to,accession number D90883,Smith-Waterman Score=498.
ttaaacgtagaaatcctcggcgagtttgatgatgccgctttgatgaaagcttttggtgcgatgcacaatgcaatcttcgttgccccaacgctttatgcatatgacttttatgccgataaaacactggtaccgttgaccgatgcactggcgaatacgtggcaaaagcagttcccgcttgattacggcaaagggcgactgtggggctcggtggcgtttgtcattggctcggcgctgacgggcaaactggtcactatgtttgattatcgggtgatcctcgcgctgttgacgttgggcgtggcatccatgctgctcggctttctcatccgtccgacgattcagccacaaggggcaagtctccagcaggagagcaccggttggtctgcgtggttggcgctggttcgccagaactggcgctttctggc

SEQ ID NO: 28686 - DNA, 1740 bp, Homo sapiens; identical to SEQ ID NO: 24329
  SIMILAR (1167)..(871): 951254mologous to synthetic construct InsB peptide,accession number Z37515,Smith-Waterman Score=494.

SEQ ID NO: 28687 - DNA, 1452 bp, Homo sapiens; identical to SEQ ID NO: 15782
  SIMILAR (811)..(1449): 951254mologous to Escherichia coli orotate phosphoribosyltransferase,accession number X00781,Smith-Waterman Score=1024.

SEQ ID NO: 28688 - DNA, 298 bp, Homo sapiens
  SIMILAR (52)..(2): 1001254mologous to Escherichia coli tetrahydrodipicolinate N- succinyltransferase (dapD),accession number K02970,Smith-Waterman Score=87.
ctgaaacaaccacagaccccgccggaacgcgaccgtagtggatttcgccggttcacggtcgtaaatacgggtgctctgaccattgtatacgcccatggaaatgaccggaacttcttcgaaaatccagccgcggtaatacggagggtgcaagcgttaatcggaattactgggaactgcatctgatactggcaagcttgagtctcgtagaggggggtagaattccaggtgtagcggtgaaatgcgtagagatctggaggaataccggtggcgaaggcggccccctggacgaagactgacg

SEQ ID NO: 28689 - DNA, 870 bp, Homo sapiens
  SIMILAR (513)..(103): 911254mologous to Escherichia coli was o492p and o826p before splice,accession number U28375,Smith-Waterman Score=666.
ctaggcgcacgtgtcgcgtaaatagcaccggagcccacctcggtacactgttaggatcgcccccaacgcaatcgagctaccctgatgcaactctactctagaggatcccccggaatcagaaggctggaacatcgcttcgagaaggtgcagggcaaaccaggctttgaggtattcatcccaggctttaagcagggtaaactcggtagaccattgggtgttaaagcactcgtcttcggcatcgatacagggcttttccagctccaggcggtcaagaatttggacggtttttagttcgatgaagcgtccgccagtcagccaggaagtgacaatattttgcgcgagctgcgtgtgcgggccaccggcagggccgacgggagtggcacaggtttcaccgaagacgctaacagttttacctcttacaggtgagtaaaactgttgctcgggaataccaaagattgaaccgtgttggtggtattcatcaaatatgcgcggcaaaaggttctgagcactaatgttatggtacctttgtaggctcctgacctgtaacatttcagcctcttttgtaaatgccatcgacgaaatggtgtgcatggtgttcagatgaccaataacccgctgtaaatgctgctccagcgtacctgccgcgccttcgtgcggctgcatctccggcgcatccatgatattggcatcgccagaactacccggttcgtcatactccagtcgctgctgacaacgctgaatggcgatttcacaagactgtaaatactcttgtgccagttcaggtggcaatgcccggtgttcccgcgccagcgtggtcatggcattaatatgctcaacaataaactggctgtgcgttacccacagtttcat

SEQ ID NO: 28690 - DNA, 2343 bp, Homo sapiens
  SIMILAR (475)..(1410): 1001254mologous to Escherichia coli Citrate (pro-3S)-lyase ligase homolog,accession number D90702,Smith-Waterman Score=1618.
atggtccttttcggcaatgtgttcggtactgggggcttggcccttgtgtattaccgcatacaaaagactttttccagggctttgtattaccagttggcattggagcaggtgcatagccatcccaaggcacagggagctctgggccctcttctcaacattcactgtctcaaactcaccaagcacaactttgtggacattgctgatgccaagttgaagattcctagctctggatccaagtcagagggccatctccattcttccttttttcatcaacatgggtgttccaccaatgacaccaatgccaagtacaacagtcgtgctgctcagctctatagggagaaaatcaaatcgctcgcctctcaagcaacacggaagcatggcactgatgtgagtgacacagcgtgggcatcagcaatagcagaaccatcttctttaacatcaaggcctgtggaaaccactttggaaaataatgaagtcgaagtatttattaccgtaacccgcgatgaaaagcttatcgcgtgcggtggaattgccggaaatattattaaatgcgttgctatcagtgaatccgtccgcggtgaaggactggcgctgacattagccactgaattgataaacctcgcctatgagcggcacagcacgcatctgtttatttataccaaaaccgaatacgaggcgctgttccgccagtgcggtttttccacgctgaccagcgtacccggcgtgatggtgctgatggaaaacagcgccacgcgactgaaacgctatgccgaatcgctgaaaaaatttcgtcatccagggaacaagattggctgcattgtgatgaacgccaatccctttacgaatggtcaccgttatctgattcaacaggctgcggcacagtgcgactggttgcatctgtttttagtcaaagaagattcttcacgcttcccctatgaagaccggctggatttggtgttaaaaggcaccgccgatattccacgcctgactgtgcatcgtggctccgaatacatcatctcccgcgctacgttcccttgctacttcattaaagaacagagcgtcattaaccattgttacaccgaaatcgatctgaagattttccgtcagtacctcgctcccgcgctgggtgtaactcaccgctttgtcggtactgaacccttttgtcgcgttaccgcccagtacaaccaggatatgcgctactggctggaaacgccgactatctccgcaccgcccatcgaactggttgaaattgagcggctgcgttaccaggagatgccgatatccgcttcccgggtacgtcaactgctggcgaaaaacgatctcacggctatcgcgccgctggtccctgcagtcacgctgcattatttgcagaacctgcttgagcactcccgccaggacgcggcagctcgcacccttgagtctggggatgtgatgatacgcatcgccccactcgatacgcaggatatcgacctgcaaatcaatagcagcgttgagaaacagtttggcgatgcaattcgcaccaccattctggacgttctcgcccgctacaacgtgcgcggcgtacagctgaatgtcgatgacaaaggcgcactggactgcattttacgtgcacgactggaagccctgctggcacgcgccagcggattgccaatgatttccgcttcgctgcaacaacgtaaaactcgcacccgccgcagcatgttgtttgtgcctggtgccaatgccgcgatggtcagcaactccttcatctacccggctgatgccctgatgtttgacctcgaagactccgtagcattgcgtgaaaaagacaccgcccgccgcatggtttaccacgcgctgcaacatccgctgtatcgcgatattgaaaccattgtgcgtgtcaacgcgctggattccgaatggggtgttaacgacctggaagccgtcgttcgcggtggtgcggacgttgtgcgtctgccgaaaaccgataccgctcaggatgttctggatattgaaaaaaagatcctgcgtatcgaaaaagcctgtggtcgtgaacccggcagcaccggcctgctggcggcgattgaatctccgctggggattacccgcgcagtggaaatcgctcacgcttccgagcgtttgatcggtatcgccctcggtgcagaagactatgtgcgcaacctgcgtacagaacgctccccggaaggaactgaactgctgtccgcacgctgtcccatttggcaggccgcgcgctctgcgggtattcaggcgttcgataccgtctattccgacgctaacaacgaagccggatttctgcagaagccgcccacatcatacagctgggctttgacggcaaatcgctga

SEQ ID NO: 28691 - DNA, 1040 bp, Homo sapiens
  SIMILAR (588)..(292): 941254mologous to Escherichia coli was o492p and o826p before splice,accession number U28375,Smith-Waterman Score=496.
ctagctgacgaacgttatctctctctggggcatgcgatcattggggttgttgacgtagtcagtgtatgcgcacatgtgggggtgcgatcctttctttgtattgtcaacatgcgtgtgtggcttcagcagagggaagctggagataagactcgagtcaagctcttccacgtagtagaaaagttccaccaggtgaatgtcagcccagctcagcttgttgccaacaaggtagtcttgtctgtggctctttaagacccttggcaccccttgggatgggtaattctttgggttcaggggctgtccttcgaggttgtaaccgacgctcatattaaagatgaacgatttaccggaatcagaaggctggaacatcgcttcgagaaggtgcagggcaaaccaggctttgaggtattcatcccaggctttaagcagggtaaactcggtagaccattcggtgttaaagcactcgtcttcggcatcgatacagggcttttccagctccaggcggtcaagaatttggacggtttttagttcgatgaagcgtccgccagtcagccaggaagtgacaatattttgcgcgactgcgtgtgcgggccagcggagggccgacgggagtggcacaggtttcaccgaagacgctaacagttttaccttcagcagagggaagctggagataagactcgagtcaagctcttccacgtagtagaaaagttccaccaggtgaatgtcagcccagctcagcttgttgccaacaaggtagtcttgtctgtggctctttaagacctgggtgaacctggaatcatcatggttcgtacagcatcgactctggttctgaactggcactctgattataatttgcaagctgcagctggcgtacggagctcggacttcgtcatcatgggtcatagcgtacagggctctctcctttatgtctttcccgtagaggttgtatttgctggcaatgtagttgagaatggctctggtctgtaccaacttcatcccatcaatctcaaccattggtacttgctggaacatcaaactcccat

SEQ ID NO: 28692 - DNA, 2163 bp, Homo sapiens
  SIMILAR (274)..(1212): 1001254mologous to Plasmid R100 transposase of Tn10,accession number AP000342,Smith-Waterman Score=1636.
atgggcagcggggacaagttgggcttgggagactataagaccttgagaatgggttcaagctgccagacggaaatccgccttttcggtgaatcgagccatgaagaacacaatcatgaaaagattcagcgagcaactagacagccggctcgttggtctaggggacctgagtttccatctcctggaccctcctctccttcccctcagcttttgcttttccctctgggaatatcgtggtcccaccccctgcccggtccccttcctccaggtgtgaagagctttatctgttcgggcaatacgatgcccattgtacttgttgactggtctgatatccgtgagcaaaaacggcttatggtattgcgagcttcagtcgcactacacggtcgttctgttactctttatgagaaagcgttcccgctttcagagcaatgttcaaagaaagctcatgaccaatttctagccgaccttgcgagcattctaccgagtaacaccacaccgctcattgtcagtgatgctggctttaaagtgccatggtataaatccgttgagaagctgggttggtactggttaagtcgagtaagaggaaaagtacaatatgcagacctaggagcggaaaactggaaacctatcagcaacttacatgatatgtcatctagtcactcaaagactttaggctataagaggctgactaaaagcaatccaatctcatgccaaattctattgtataaatctcgctctaaaggccgaaaaaatcagcgctcgacacggactcattgtcaccacccgtcacctaaaatctactcagcgtcggcaaaggagccatggattctagcaactaacttacctgttgaaattcgaacacccaaacaacttgttaatatctattcgaagcgaatgcagattgaagaaaccttccgagacttgaaaagtcctgcctacggactaggcctacgccatagccgaacgagcagctcagagcgttttgatatcatgctgctaatcgccctgatgcttcaactaacatgttggcttgcgggcgttcatgctcagaaacaaggttgggacaagcacttccaggctaacacagtcagaaatcgaaacgtactctcaacagttcgcttaggcatggaagttttgcggcattctggctacacaataacaagggaagactcactcgtggctgcaaccctgcttactcaaaatctattcacacatgaagaagcaccggctaactccgtgccagcagccgcggtaatacggagggtgcaagcgttaatcggaattactgggcgtaaagcgcacgcaggcggttcatggaacgggactgcatcaagtgataattttccgaacatctttattcttcctcaaaacgatttcatggcgctggcggcggcggttgctccgccagaactggaagcactgctggcggcggggaaagtctccgttaagatccaggaaccttgcgatgaaatcctcttctcacgcgccaaagtctggaacggtgagaagtgggcgtgtgtcaccatcgtcggcgggcataccaacattgtgcatatcgagacgcacgatggtgtggtgtttacccagcaggcgtgtgtggcagagggcgagcaagagtctccgctgacggtgctttccagaacgacgctggctgagatcctgaagttcgtcaatgaagtcccgtttgcggcgatccgctttattctcgattccgcgaagctaaattgtgcgttatcgcaggaaggtttgagcggtaagtgggggctgcatattggcgcgacgctggaaaaacagtgcgagcgcggtttgctggcgaaagatctctcttcatccattgtgattcgtaccagcgcggcatccgatgcgcgtatgggcggcgctacgcttccggctatgagtaactccggctcgggtaaccaggggattggtaccgagctgaatgtatcatgtagattcccagccaccaacttgtttgtgcatgatccgacccagcaggctatgcagcgcaatcagcgccggttcgctgtccagacgttccccgtatggcgggttgctcaacactgtgccgtacggccctttcggcagcggattggtcagttgcgcgacatctttcacctcaaaggtgatcagttcaccaatcgccctgcaaagatcgtggcgttttaa

SEQ ID NO: 28693 - DNA, 4084 bp, Homo sapiens
  SIMILAR (3532)..(3098): 831254mologous to Escherichia coli Citrate lyase alpha chain (acyl lyase subunit) (citF) homolog,accession number D90702,Smith- Waterman Score=584.
  misc_feature (1)...(4084): n = a,t,c or g
atggcagccgattatgaaaatcagctcgacgagttttccctcgatgcgcccattgtcgcacatgaaaactatcaatgggctaactacgttcgtggcgtggtgaaacatctgcaactgcgtaacaacagcttcggcggcgtggacatggtgatcagcggcaatgtgccgcagggtgccgggttaagttcttccgcttcactggaagtcgcggtcggaaccgtattgcagcagctttatcatctgccgctggacggcgcacaaatcgcgcttaacggtcaggaagcagaaaaccagtttgtaggctgtaactgcgggatcatggatcagctaatttccgcgctcggcaagaaagatcatgccttgctgatcgattgccgctcactggggaccaaagcagtttccatgcccaaaggtgtggctgtcgtcatcatcaacagtaacttcaaacgtaccctggttggcagcgaatacaacacccgtcgtgaacaatgcgaaaaccaggtatccccccaacgtatcacgacggctaaactggccgcctctgtcggcgtttccgaagcggcactgtttcgccacttccccagtaagacccgcatgttcgatagcctgattgagtttatcgaagatagcctgattactcgcatcaacctgattctgaaagatgagaaagacaccacagcgcgcctgcgtctgattgagttgctgcttctcggttttggtgagcgtaatcctggcctgacccgcatcctcactggtcatgcgctaatgtttgaacaggatcgcctgcaagggcgcatcaaccagctgttcgagcgtattgaagcgcatctgcgccaggtattgcgtgaaaagagaatgcgtgagggtgaaggttacaccaccgatgaaaccctgctggcaagccagatcctggccttctgtgaaggtaagcaatcaaggctttcgggtgatgatagagatcactttgcagccgtaatcacgctcaacttcctgaatcggcggaatttgccccgcccgcgtcctgacgatcgatcgaaatcaacaacgccgcaatgcaatgttgtaggtctctttgacatgcgcttcgaggcgatccagttcttcggcaacgtcaattcgttgtgccagcagaaccagatcctgctccagacggatgttttccagttgcacctgagcatcttccagcttcgcgaccagacgctcacgctgccattgcaggatttccggcatatgggagcggactttgaccacttcggcgacgctgctcgatcaatgctttcagtgcctgaccttcgggttccgcgcgacaataaagtgttcagcgtaccattcaacgccgcgagaatttcaacggcaatggcgttaaagatcctgctccttggcttgcaggtcgactctagaggatccccctgtgaattcaatcggctgtggttcaccggtcagcagacgcgcacgttcgcgcatcctctcaatggaaaccactttaatgcccgcttcctgcagacgttctgccagttccggacgtgccgggttaactgcgataccgtggtctgtgaccagaatatcgacactggagcctggggtgatgcaggtcagtacgttatccaccagagtcggaatacgaccgcgtaccagcggcgcgacgatgatggaaagcgcagaggcaatcgcggtatcgcagtgaccaccggaagcaccacgcagtacgccgtcagagccggtcagcacgttaacgttgaactgggtgtcaatttccagcgcgctcagtaccaccacgtcgagacgatcaaccgatgcgcctttcgaaccccagttagcgtactggttggcgctgatttcgatgtgattggggttacgggccagcgattgcgcagcatggctgtcaaagctctgcacatccagcagtttgcggatcagacctttttcgtgcaggtcaaccatcgtcgcggtaataccgccaagggcgaagtcggcgcgaatatcgcggctacgcattttgtcttccaggaaacgggttaccgccagcgatgcgccgccggtgccggtttgcatggagataccttctttggagtagccagagttgacaatcacatncgcagcgctacgggcaataagcaggtcgcgccgggtaatggtcatacgggtcgcgccagcgccgattttttgagcatcggccacgcgggcaactttgacgaacaaaacaacctgatcttgctcaatgcttgccggattatgcggtttaagcgacagatcttcggctttgagctcggtaccccgctggtccctgcagacacgctgcattatttgcagaacctgcttgagcactcccgccaggacgcggcagctcgcacccttgagtctggggatgtgatgatacgcatcgccccactcgatacgcaggatatcgacctgcaaatcaatagcagcgttgagaaacagtttggcgatgcaattcgcaccaccattctggacgttctcgcccgctacaacgtgcgcggcgtacagctgaatgtcgatgacaaaggcgcactggactgcattttacgtgcacgactggaagccctgctggcacgcgccagcggtatcccggctctggcatgggagggattgccaatgatttccgcttcgctgcaacaacgtaaaactcgcacccgccgcagcatgttgtttgtgcctgaggcccaatgccgggatgggcagcaacttctttatctacccggctgatgccctgatgtttgacctcgaagactccggaacatttgcgtgaaaaagacaccggccgccggaatggtttaccacgccgctggaacaatccgttggttggggaatattgaaaccattgtgcgtgtcaacgcccctggattccgaatggggtgttaacgacctggaagccgtcgttcgcggtggtgcggacgttgtgcgtctgccgaaaaccgataccgctcaagatgttctggatattgaaaaagaagacctgcgtatcgaaaaagcctgtggtcgtgaacccggcagcaccggcctgctggcggcgattgaatctccgctggnggatacccgcgcagtggaaatcgctcacgccttcgagcgtttgatcggtatcgccagcagtacgtatacgaccgcgtaccaccggagcgacgatgatggaatgcgcataggcactgggggactcgcagggaccaccggatgcaccacacaattccccgccggagccggtcagcacgttaacgttgaactgggttgtaatttgcagcgcgctcagtaccaccacgtcgagacgatcaaccgatgcgcctttcgaaccccagttagcgtactggttggcgctgatttcgatgtgattgggggtacgggccagcgattgcgcagcatggctgtcaaagctctgcacatccaacaggtggcggatcaaacctttttcgtgcaggtcaaccattgtcgcggggattccggctatggcgaaatcagaccgaatatcgcggctacgcatttttgtcttcaggaaacgggttaccgccagcgatgcgccgccgaaggaccaacaatccaggaggcgattttcgccagaacacccagcaacagcagtgcggagatcacgcgaaccggccactcaatttctggtgccacatgggacatcagaacggtaaaggtttgcattacccctgcggagaggttggatttattaccccgaatgaccatcgcaatagacaaaccaccaacagagcttaagcagattgccggccacctcagcaggtacatagcccacgatcagacaccgcctattcgtgaacggcacgacgccgcaccgtgcgctaacgaaacccgctgtgtctgcacttcgaaggattacatgctggaactgctgctggcaggcgggatggatatcatccgcgccatgcgtgtattagtaccacccggcttgcagaacaacccggatatggacccggaactgcgtgccttctttgaccttaactccatgcatatggagcccggggatggccccgccggcattgtgatgttcgacgggccgtttgccgcctgtaaactcgaccgtaacggcttggttcggcggcgcttcgtataa

SEQ ID NO: 28694 - DNA, 2510 bp, Homo sapiens
  SIMILAR (801)..(1754): 991254mologous to Escherichia coli outer pore protein E precursor,accession number U70214,Smith-Waterman Score=1650.
atggtggttgcgaattgcatcgccaaactgtttctcaacgctgctattgatttgcaggtcgatatcttgcgtatcgagtggggcgatgcgtatcatcacatcccagactcaaaggacccacggcgcgatagcggtgaagacgttttttcgccacaagtgaccgagccgggaaccggatatcggcatctccttggtaaagcgaccgttcaatttccaaccaatccgattgggcggttccgggaggcatatcctggtttgatcattgggggggaaacggaccagagagggttcgatgtcccggaaaaacggggtgattcacaccgagtgcggggaggaatggcaatgccgggaaaaacttctgagtctaatcttgggggacactccgtgccagcagccgcggtaatacggagggtgcaagcgttaatcggaattactgggcgtaaagcgcacgcaggcgtcagatgtgaaatccccgggctcaacctgggaactgcatctgatactggcaagggtgagtctcgaagaggggggtatttttccaggtgtagcggtgatatgcgtagagatctggaggaataccggtggcgaaggcggccccctggacgaagactgacgctcagcggtccggccgggaactcaaaggagactgccagtgataaactggaggaaggtggggatgacgtcaagtcatcatggcccttacgaccagggctacacacgtgctacaatggcgcatacaaagagaagtgtttacaacgggactctcccgctgaatattcgcgcgttaattaaaatcaggaatgaaaatgaaaaggagcactcttgcattagtgtggatgggcattgtggcatctgcatctgtacaggctgcagaaatatataataaagacggtaataaactggatgtctatggcaaagttaaagccatgcattatatgagtgataacgccagtaaagatggcgaccagagttatatccgttttggtttcaaaggcgaaacacaaattaacgatcaactgactggttatggtcgttgggaagcagagtttgccggtaataaagcagagagtgatactgcacagcaaaaaacgcgtctcgcttttgccgggttgaaatataaagatttgggttctctcgattatggtcgtaacctgggggcgttgtatgacgtggaagcctggaccgatatgttcccggaatttggtggcgattcctcggcgcagaccgacaactttatgaccaaacgcgccagcggtctggcgacgtatcggaacaccgacttcttcggcgttatcgatggcctgaacttaaccctgcaatatcaagggaaaaacgaaaaccgcgacgttaaaaagcaaaacggcgatggcttcggcacgtcattgacatatgactttggcggcagcgatttcgccattagtggggcctataccaactcagatcgcaccaacgagcagaacctgcaaagccgtggcacaggcaagcgtgcagaagcatgggcaacaggtctgaaatacgatgccaataatatttatctggcaactttctattctgaaacacgcaaaatgacgccaataactggcggctttgccaataagacacagaactttgaagcggtcgctcaataccagtttgactttggtctgcgtccatcgctgggttatgtcttatcgaaagggaaagatattgaaggtatcggtgatgaagatctggtcaattatatcgacgtcggtgctacgtattatttcaacaaaatatttcatcaagggctaaaaaaaggtcgaaaaggccagtacctgtccaatgctgatctgcctagagaatcttcggatcagctcgcgcaaaatattgtcacttcctggctgactggcggacgcttcatcgaactaaaaaccgtccaaattcttgaccgcctggagctggaaaagccctgtatcgatgccgaagacgagtgctttaacaccgaatggtctaccgagtttaccctgcttaaagcctgggatgtatacctcaaagcctggtttgcctgcaccttctcgaagcttttactggtatactgcgtgtcttgcgctttgttgcggtgccaaaacctgcccgtgcgaagtgatttgtttttaaatcatatggttagagatatgaaacatactgtagaagtaatgatccccgaagcggagattaaagcgcgtatcgccgaactgggtcgtcagattactgagcgttacaaagacagcggcagcgatatggtgctggtgggtctgctgcgtggctcatttatgtttatggcggacctgtgccgtgaagttcaggtatctcatgaagtcgactttatgaccgcctccagctacggtagcggcatgtccaccacccgtgatgtgaaaatcctcaaagatgaccgcaggcagcgagttccagggggacttaagctttggcgcttctgccctggccctctgttggccactccgcgggtgctgtgcctgggcgcctccgtgctctcggccaactgcctttga

SEQ ID NO: 28695 - DNA, 1122 bp, Homo sapiens
  SIMILAR (513)..(337): 671254mologous to Escherichia coli caiE,accession number X73904,Smith-Waterman Score=174.
atgcgctataatcgggacttcttatatttaagtgcattatccgtgaacatggatgatgttcgtgggacccccaagatccccacggtatactgcagggagcaggaaaagaagactcgcaggcacagaaaaccacagccagacaaaagagaaagacgcgaaaaacagccacaagacaaaagaaacacgagaaacagagcgaagaaagcacgaacgaagacacgtaagcaagaaaagttgaagagactcaacacaagcacgacgccgaaagcacgagcggttcagttattcaaggctgtgtacaactctttactcaatcgtttaccgccacccccgctgcatctgcgaccaccgcaactcgtccaaccatactatgctcgtcccgcgcgcgggctgggtacccatcaacaactggcgtttctcgccgcgaaagcccgctttgacaagctcatggctggcaacaatgctctcttcgccaatgaccgcgccatcccaaactcacgactggttcatcccgtcccaactgcatcgcgaccaagtcaaaaaccatgcagagctcgcatccgatgcccgagtcgccatcgtctcctattgcgctttcatcgttttggtattcgggtcacccggcagctattcttcatttttcattaccgccgcccccaccccccccatatgcatacgcgcgcgccccccccccccccatatgaatacgccagcgcacgtggatttaccgctgccaaacgcgccgcgtacccgagaagcaagtaccggacgaggcatatgcgcctttatcaaacaaccatgatcggtatcaccggagataacatgcacgtcctgcggtgggcagtgagcacttctgctgccagtttcgtcaacatacagtatccagaccagtaccataatcgaaacgccagaatgaacgataaaggtgccgtgcgattccagttgatcatgcagattagactgatcgatatccgggataccgatttctggcatataatggcgacgcgagatcgatgtgcagtacccaaaggggatacggggaaacatggatcattcgaacctgaagcggatcttcatgacactgcgaggagaagcggcgacttaattccgatggcaaattag

SEQ ID NO: 28696 - DNA, 3732 bp, Homo sapiens; identical to SEQ ID NO: 10341
  SIMILAR (1392)..(523): 771254mologous to Escherichia coli Biotin sulfoxide reductase 2 (EC 1.-.-.-) (BDS reductase 2) (BSO reductase 2),accession number D90829,Smith-Waterman Score=1167.

SEQ ID NO: 28697 - DNA, 3090 bp, Homo sapiens
  SIMILAR (475)..(401): 401254mologous to Escherichia coli RhsC protein precursor,accession number D90709,Smith-Waterman Score=48.
  misc_feature (1)...(3090): n = a,t,c or g
gccactgcacccgctctgatgtacgtaggtttgctgatgttaagtaacgtctcgaagctggatttcaatgattttattgacgctatggctggcctggtgtgtgccgtgttcatcgttctgacttgtaatatcgttaccggtattatgctgggctttgtgacactggtcgtaggccgcgtctttgcacgcgaatggcaaaagctgaatattggtacggtgatcattactgccgcactggtcgcattttccgccggggtgggtggggcaatttaatagatttctccgcgcccttaaggggggcagttttctttcaaagaggattctcaccgctgacaacaatacgctgctggcggactcgcctgagttttctttcagtaagcaactgcagcgcctgtgttgggcaagattcaacgcaggctggcccctcttcccgctgttcacagagatcgcatttcacaatttgttgtcgggtatcccccggcaacgactgaatggtgatcattccaaacgggcacgcactgacgcaactctgacagccaatacaacgggcagaattggtctgcaccacctgctcgcccatcgtcagcgcccccacggggcaagcgccaacacaaggggcgttttcacactgatggcacatcaccggcgcactgatgctgtccagtcgctgtaccttcagccggggtaaaaagacatcggcattcaactcctgttctgaagggtgagcgaccacacaggctacttcacaagtacggcagccaatacagtcagccggattaacgataattaacgatttcatcacgatgccttcgtatcaaacagagttaacatatcgcgcgccgcctgccttcctgcggccattgcagtgacaaccagatccgcgccatgaactgcatcaccaccagcaaagacttttttcagatgcgtctgggtaggtaaatacccgacgtcaccggtttgaatcaggccccatttatcgagtttaattccgctgccctgcaaccacggcattgcatgcgcctggaaaccaaaggccataatcagaacatcggcgggcaattcaaactctgaacccgctaccggaggaggacgacggcgaccatccggccccggctcacccatggcggtacgaatcaggcccaccgcagttaaacgcccatcttcgtcacaagcgatatattgcggttgaaaattgaactgaaactcgacaccttcctcgcgcgcattaaccacctctttgcgcgagcccggcatactgatttgatcacgacgatacgcgcaggtcacgctggcggcattgaggcggatggaagtccgcaaacaatccattgtcgtatcgccaccgcccaatacggggatccttctgatgagtggcgtgaagctccccggctgataaatcgtctggatgcgggttctgtcgttctgtattgtggtcagccggtcgccgtcccagccgtaccaggtcacttgcggtttccgtgacagcgacatccagcccgtcaggtcccgttcacgccgccacacccgttttgccacctgcggccccagcgggtcgtaaagatagcgactttcgaccagcggctcttcatattgtgtccgcgtgtagntcaccagccggtgctgactgtcgtaatggtaccggtgagtccgctcatcatccgtgcggataacccattccgggatgaggtcggttttctctgtcagcctgccgtgacggtcataccggtaaagatagtgcgcgtcacgggcgatacggttatccggccacatgctgagggtgctgtccgggtgcagctccgggtcgggcaggcggttacctgccgggtctgtggcatacgggatgcggatatccagattcgctgcggtggtgtgaacgccggtcagcctgccggtggtgctgtagctgtaactccgggtctggcgcgggctgctgatgcggatgagttcgccgttgtcgttccaggtgtaatcgcggtcagacagcaggctgttcaggtgctggctctgtaactgcccggcaggggtataagcggtggtgagttcataacggccgaagtgcgcagcgtttcccggtgcaggcggtcgcgggtgtactccaccagggggatcctctagagtgagcccactcctgagcatgtgctctgtgtgtgtcccattagactgagaggaacaagtgccgaaggcagggacaaggtgtggagtacagatccccaatgatgggatggaggctgggtagaagagggaggcgtttgggtgacagccttgttcttggtaagctagaagtaggatgttttctcgctgggggcagtttctcaaattgcggacaataatttctgagcctgcttggacagcgaggtgcaggggggtcaacttggaggcatcctggactcttgaattcacattagcgtggacactgatcaggaacagcacactttcaatatcagagttctgaactgccacatgaaggaaattccggcccttgttatccaccttcttctctggggcacttggctgggggtgggcaattgggccctgcccttggccacctgggtcggccttctctgggaagcccttggcatagagtgtagctgcaagctgtcctgtgccccacaggtccagtccttgatggcacagcttggctgacagcgtccatctgcagacgccactgcacatgcgatcgcctataaccatccggatgtggtgtctgtcatcctgtagcagaaaggtaagtaagtgggaatactgtccatccttttgactgtgggacagcagtttaggatccttagttacagagttgatgttttttctgttggtgagtttcatatggctagtttcttcgccgacagtgaattcagcagtaagcgccgtcagaccagaaaagagattttcttgtcccgcatggagcagattctgccatggcaaaacatggtggaagtcatcgggggatcctctagagtcgacctgcagcatacgaacaattcgagctcggtacctcccctgatctataaggactgagtgccagctcctctgctgcgtgccacacgagccccttctgtgccctctctcctctaggcctggtaccttccccat

SEQ ID NO: 28698 - DNA, 1674 bp, Homo sapiens
  SIMILAR (38)..(661): 851254mologous to Escherichia coli Lactam utilization protein (lamB) homolog,accession number D90710,Smith-Waterman Score=879.
caacgttattttgaacaataagcgtggcggctgcccaatgaaaattgacttgaacgccgatctgggcgaaggctgcgccagcgacgcagagctattaacgctggtttcctctgccaatattgcctgtggatttcatgcaggcgatgcgcaaatcatgcaggcttgcgtgcgtgaagcaataaaaaatggtgtcgcgattggcgctcacccgagttttcccgacagggaaaattttggtcgcagcgccatgcagctgccgccagaaaccgtttacgcccagacgctgtatcaaattggcgcgctggcaacgattgcccgtgcgcaaggcggcgtaatgcgtcatgtcaaaccgcacgccccgttgtacaaccaggcggcgaaagaagcacaactgggagacgccctcgccagagcgggatacgcttgcgatccagcattgattctcgtcgggctggcgggaagcgagctgattcgtgcaggcaagcaatatggtctgacaacgcgcgaggaagtgtttgccgatcgcggttatcaggctgacggctcgctggtgccgcgaagccaattttccgctgccaaacgcgccgcgttacccgagaacaagtaccggacgaggcatatgcgcctttatcaaacaacgcatgatcggatcaccggagataacatgcacgtcctgcggatctcttccagtgcacagctggcggggaagtaacggaggtcggcgctttaccttcaccgattgcatttcacaattgttgtcgggtatcccccggcaacgactgaatgcgcccccacggggcaagcgccaaccaaggggcgttttcacactgatggcacatcaccggcgcactgatgctgtcagtcgctgtaccttcaaccggggtgacaaccagatccgcgccatgaactgcatcaccaccagcaaaacttttttcagatgcgtctgggtaaatacccgacgtcaccggtttaatcaggccccatttatcgagtttaattccgctgccctgcaaccacggctggcatgcgcctggaaaccaaaggccataatcagaacatcggcgggcaatcaaactctgaacccgctaccggacgaggacgacggcgaccatccggcccggctcacccatggcggtacgaatcaggcccctcgacacctttcaaaacataatcccggtgcggcgtgtaaggtgtgggaaccgtttagtcacagacaccgtcccgtctacctcccccgagtccagccttgggtgggtgctgcacagcgacttgcggccttaggtcttctcgctgtgccttcctttcctcctgagagatgctctccgcctaagaccgctaacagctcaattgggtctcattgatcccactcaccatctagagccctgttgcctcattaatccgttgtgccaccagctcacgggctgcaactgggaagagacgagacctgtttatccatcgccgacactgggatacgcagcaatctgcaaaatggggtagaaaccacaggaagaaagtggtaggcgacggcgcaggcacggtagaaaggcgaggccggccccaagctgggggagtattctagactgcaacaccgttcacacgctactagcaacagacgggtgtcatccggaccatgaggttcgctgtgtacgactccggaagttccggcgacaatag

SEQ ID NO: 28699 - DNA, 611 bp, Homo sapiens
  SIMILAR (3)..(389): 991254mologous to Escherichia coli ATP phosphoribosyltransferase,accession number U02070,Smith-Waterman Score=627.
  misc_feature (1)...(611): n = a,t,c or g
tggtttccaccggtgccacgctggaagctaacggcctgcgcgaagtcgaagttatctatcgctcgaaagcctgcctgattcaacgcgatggcgaaatggaagaatccaaacagcaactgatcgacaaactgctgacccgtattcagggtgtgatccaggcgcgcgaatcaaaatacatcatgatgcacgcaccgaccgaacgtctggatgaagtcatcgccctgctgccaggtgccgaacgcccaactattctngcgctggcgggtgaccaacagcgcgtagcgatgcacatggtcagcagcgaaaccctgttctgggaaaccatggaaaaactgaaagcgctgggtgccagttcaattctggtcctgccgattgagaagatgatggagtgatcgnnnnnnnnnnnnnnnnnnnnnnnnnnnnnnnnnnnnnnnnnnnnnnnnnnnnnnnnnnnnnnnnnnnnnnnnnnnnnnnnnnnnnnnnnnnnnnnnnnnnnnnnnnnnnnnnnnnnnnnnnnnnnnnnnnnnnnnnnnnnnnnnnnnnnnnnnnnnnnnnnnnnnnnnnnnnnnnnnnnnnnncacggttaccgcgctgaaggtgtctgcagagga

SEQ ID NO: 28700 - DNA, 1317 bp, Homo sapiens
  SIMILAR (1317)..(460): 841254mologous to Escherichia coli ATP sulfurylase (ATP:sulfate adenyltransferase),accession number U29579,Smith- Waterman Score=1251.
tcaggtgatggcaacgggctttacctgggatacacaaaaccgcgagtctgataccggcggctgacgcgaagtctgggaacatgcaaagcggatgcttggtgattcctcactggatatgggaatggatgatgaactgacgtatatggtggcgtatgagtatattggcaggttggggaaaacggccactatacactggaaggtgaagagttcaccgtcaatggtatggtcggccagcgtctggaaaaagatggcgttgcgctgactatcgcggacattaaggccaaaccaggaacacagtttgtcctgagccagcgtacccgaactgaagtgcgcagcgagctggaccaagcggaagaaaaactcaacgtttatcgccagcagcgcgattcggttgaccttaacctggaagccaaagccgttcttgagcagattgtgaacgttgataatcaactcaatgagctgacgttttttcagctccatagaccccgcctggtcgcggtcaatcacgcggccctgacgttcactggtggtggaaaccagcatctcttcgatgatttccggcagtgtttgtgcatttgactccaccgcaccggtcagcggccagcagcccagcgtacggaaacgcaccatccgttttttaatcacttcgcccggttgcaggtcgatacggttgtcatcaatcatcatcaacataccgtcgcgttccagaaccggacgttccgcagcgagatatagcggaacaatgtcgatattttccagccagatgtattgccagatatcctgctcggtccagttagagagcgggaagacgcggatgctttcgcccttggttaatttgcccgttgtagttgtgccacagctccgggcgctgatttttcggatcccagcgatggaagcggtcacggaaagagtaaattcgctctttagcgcgggatgtcgtaatttgttcagcgcctgtttcaggccttcagttttcataatatcggtatgtttcgcgctgccgtgcacgaatggattaatccccatcgccacgccttccgggtttttatgcaccagcagttcgcagccgtaggctttagcagtacgatcgcggaactcatacatttcgcggaatttccagccggtatcgacatgcagcaacgggaaaggcagcgtacctggataatacgccttgcgcgccagatgcagcatgacgctggaatctttaccgatagagtagagcatcaccggatttgagtattctgccgccacctcgcgaataatgtggatgctttccgcctccagttgccgcaggtgagtaagtcgtatttgatccat

SEQ ID NO: 28701 - DNA, 648 bp, Homo sapiens
  SIMILAR (648)..(64): 1001254mologous to Escherichia coli ATP sulfurylase (ATP:sulfate adenyltransferase),accession number U29579,Smith- Waterman Score=1053.
ttagccggacgttcgcagcgagatatagcggaacaatgtcgatattttccagccagatgtatgccagatatcctgctcggtccagttagagagcgggaagacgcggatgctttcgcctttgttaatttgcccgttgtagttgtgccacagctccgggcgctgatttttcggatcccagcgatggaagcggtcacggaaagagtaaattcgctctttagcgcgggatttctcttcgtcacggcgcgcaccaccgaaggcggcatcaaaaccgtatttgttcagcgcctgtttcaggccttcagttttcataatatcggtatgtttcgcgctgccgtgcacgaatggattaatccccatcgccacgccttccgggtttttatgcaccagcagttcgcagccgtaggctttagcagtacgatcgcggaactcatacatctcgcggaatttccagccggtatcgacatgcagcaacgggaaaggcagcgtacctggataaaacgccttgcgcgccagatgcagcatgacgctggaatctttaccgatagagtagagcatcaccggatttgagaattctgccgccacctcgcgaataatgtggatgctttccgcctccagttgccgcaggtgagtaagtcgtatttgatccat

SEQ ID NO: 28702 - DNA, 2046 bp, Homo sapiens
  SIMILAR (64)..(8): 941254mologous to Escherichia coli topoisomerase IV subunit,accession number U28377,Smith-Waterman Score=94.
atgtcgcctttctctgcaaccagttgcggcgatcttccgagcgtttcttcgccagcagcatatcatcatcgcgtcagtacgctgatcgtcttcatcatcgatagtcaactgcccagacggcgagtgttcggatcaagcgtgagcggtggcagtgcgactaaacgtgaccgtgtttcaccaacgcgcggaaatgttttacgaacaaaggcagagcagcgtggcaatgtgcagaccatcagagtccgcatccgcgaggatgataccgatcgctaccgaaatatcgtgcacttcctgcgaagccagcactcgtcggaagagacttcccaggtgttaaggatcttacctttcagtggcatatcgcctgatattcgcgatcgcgcgcctgcttggcagatccgcctgcgggtcaccttccacaaggaacagctcgcacataggcgcagcgatcccagatatcttccgccgacagctttacacgcgcggcagaatattgcggtattcacagaactcacgcatcgcgtccaaaggtcactgacgcagaccattaacatgggtaccgccctgcatcgttggctcgttgccgatgattaccgccaatacgctggcgggcggcattaccggcgtctggtgatcgctttcggaatcaaacgtctggcacctggtttgggttgtggttacgccgcaaagcgaaagccgcgcaacaggagcttgtccatgacattgagttactgcaacagttgtgcgaagccagcgccgtcagcggcgagaacaggaagttcgcgacattctgataaacacgctggaaccttgcgtgatgaaatcaccttcgatggtctgggcagctttgttgcccgtaaggggaataaggtccaaaagttgccgttgtcggacatatggatgaagtcggctttatgtcacccacatcgacgagagcggttttctgcgttttaccaccattggcgctggtggaatcagtcgatgctcaaccaccgggaagcggaggagtggtatcgcgggcggatgtttacccgcaagccgcgccagtggcggatgatgtattggttacttccagcatcaaccgattggtttagccaaacggattggttcgcgattgaaaacagctatccgcgtgaactggtgcgcgatgggaaactttttaccggcgaacactctgtcctttaccgtacccgttacgatcaacaatctgatgctggattatgcgtcttgcctgatccaaaaagaacccgtcggcatggcggttatttgtcctggttattcccccgttgtaaaatctctcctaaacttaacgtgttgcaaccgtggcaactcgatctctcttacgatgaaagtgccatgctggcaatcctctccggcgtcagttggggggcgagcgcgatgtcgctaaacgtctgtatgcccgtcatccgcgcgtggatttattgtcgtaacatcctggcagatgctgtatgcggcgctggtgatgagtgtggtcgcttactgtgttatggcgctggcctacagtgcgattctggcgacggcactggcgtggagcttaatgttgttcgtattgaaaaacttgcctgccagtattgccagcttaagcacatggccgttaccgtttacggcgtactcttttcctggtggctgctcggcgaaatccgggggccgttgaagcaaaatcttcgccatatcttcgtgaaccagtttctgcaaatcgaccttctggctcgcaatgcgcggatcaccacatcggaacatacaccgcgttcttgcggaaatcaccgccaggataacttgcgccacagccagcggttgcagttcgatatgatcgcgcaagcctttgttgtcgacattcagcattcgcgggtattcgtcgcgcagggcaaatgtacagcacatcaaggccgagaatcggctctcgatgccgttacgttccgctaccagtccgccactaaagaaactgccgctgggagaaccgcgaaacgtggacgtagcgggaatatcggtggaccacctcactcatcttccatcccctataaaaattga

SEQ ID NO: 28703 - DNA, 1338 bp, Homo sapiens; identical to SEQ ID NO: 17868
  SIMILAR (496)..(954): 961254mologous to Escherichia coli similar to Desulfurolobus ambivalens hypoth. 28.3 kDa protein in sor 3' region,accession number U00006,Smith-Waterman Score=747.

SEQ ID NO: 28704 - DNA, 1353 bp, Homo sapiens
  SIMILAR (199)..(783): 991254mologous to Escherichia coli similar to Desulfurolobus ambivalens hypoth. 28.3 kDa protein in sor 3' region,accession number U00006,Smith-Waterman Score=984.
atggaagcgccgccgatcgaagacgtttcgagccgtgacctgaaccggcgaaggaattacggccacccggcggatctgttttggttctactccgtcctgcgtgcgttgccggaagtttacgccagtagcgatgcccacgagaagtttgttaaagacttcgtggcggcatggtcgctgaacgttctttaccagcgtatagtgggcgaacgaaaactacacactggatctctcatgtctgccgcaggaaagagcaacccactggcaatcagtggcctggttgtgctcacacttatctggagttatagctggattttcatgaagcaagtcaccagttacatcggtgccttcgactttaccgccttacgctgcattttcggcgctctcgttttattcatcgtccttttattacgtggtcgcggaatgcgcccgacaccgtttaaatacaccttagccattgccctgttacaaacctgcgggatggttggtctggcgcagtgggcgttggtcagcggaggtgcggggaaggtggcgatcctgagctataccatgccgttctgggtggtgattttcgccgcgttgtttctcggtgaacgcctgcgacgtgggcaatatttcgcgattctgattgccgctttcggcttatttttggtgttgcagccgtggcaactcgatttctcttcgatgaaaagtgccatgctggcaatcctctccggcgtcagttggggggcgagcgcgattgttgctaaacgtctgtatgcccgtcatccgcgcgtggatttattagtcgttaacatccatggcaaatgcatgtatgcaggcagctggccagccagcttccactctcccacggtgccatgcctcgctgcaggcgtcccggacacagttcgaacccagataggctcgcaaacgtcatcgcccggagggtcctccggggaatgtcaaatcgccagcctgtcagcccgtgttgtccgtgaaggtgacgagtttagcttcgaatttggccttgatgaaaagttaatacaccgcccgggagaaaacgaagatgccccggttacccacgtctatgctgtcgcaagactgaaagacggaggtactcagtttgaagttatgacgcgcaaacagattgagctggtgcgcagcctgagtaaagctggtaataacgggccgtgggtaactcactgggaagaaatggcaaagaaaacggctattcgtcgcctgttcaaatatttgcccgtatcaattgagatccagcgtgcagtatcaatggatgaaaaggaaccactgacaatcgatcctgcagattcctctgtattaaccggggaatacagtgtaatcgataattcagaggaataa

SEQ ID NO: 28705 - DNA, 2110 bp, Homo sapiens
  SIMILAR (1623)..(1051): 961254mologous to Escherichia coli No definition line found,accession number U00039,Smith-Waterman Score=882.
tcacccctttgacgcccagccgttcagttcactgatggcagttgcagcatcggcgcgcagggtatcctgtaacgcaatgacaccaagcacgtcatcgttacgtactaccagcactaccgtttgcccggcgctttccagttcgttaattaaaccagtaaatgcatcagcgggatgtttcccggcagcgcaaatcaatacgcgctcaccgttaacctgcgcttcaatgccagacccgaccagcgcccgctgtgattcggcggtgggaatggcgagttcagcaacctgtgcttcgcgtacgatggcttgcgccagtggatgcgtcgcgccttgctcgaccgccgccgccagtgtcagcagttcagattcaccctttgacgcccagcgcgttcagttcactgatggcagttgcagcatcggcgcgcagggtatcctgtaacgcaatgacaccaagcacgtcatcgttacgtactaccagcactaccgtttgcccggcgctttccagttcgttaattaaaccagtaaatgcatcagcgggatgtttcccggcagcgcaaatcaatacgcgctcaccgttaacctgcgcttcaatgccagacccgaccagcgcccgctgtgattcggcggtgggaatggcgagttcagcaacctgtgcttcgcgtacgatggcttgcgccagtggatgcgtcgcgccttgctcgaccgccgccgccagtgtcagcagttcagattcactaatacccgttgccggatgaatcgcggtaacgcgcggtttaccgacggtcagcgtaccggttttatcaaacgccacctgagtaacacgacccagctgttccagcgccgctccgcctttaatcaacgccccacgacgcgctgccgccgccagcccggaggtaatcgccgcaggcgttgagataactaacgcacacgggcagccaatcagcagcagcgtcagccctttataaatccactcctgccagctggcggcaaacagcagcggtggcaccagcgtcaccagcagagcgacggccataaatcgcgggcgtatagataacggctgaaacggtcgataaaccgctcaatgggagcgcgacgctcttcggcttcttcgatcagtttcagaatccggtcaatggcgctggctcccggttctgacagcacttccaacgtcaccagacggtctacgctggtggcaccagcagggactttatcgcccgttgcgcgctccaccggaatggattcgccggtcagggcgctttcatcaaaactggcaaacggtgagagcagtttaccgtcggcaggcaaacgcccacctgcggcgacttcaatcacatcgccagggcgcaggctgttaatcgccacctcttcccgctcacccttacgcaggcgcgtggcggtttctggtttcagcgccattaacgcgctaacgccctgacgcgcgcggctggcggcccagccttccagtcgttcaccaatcaaaaacagcagcaacaccatcgcagcttcagccgttgcgccaataaacagtgcaccaatagcggctacgctcattaaggtttcaatggcgaagtagctgccggatttgatcaaccgtaatgcctgatcgagcaatcgggtacagcccaaccagcgtggtcgcgataaacgccagttgcccgaacggatgattgaatttttcgtgggatgagctaaggctttcagcttttttagatacataagccgcgtttcaagaaatcgaacttgcctttcaagatcctcaatgcgtcggtcttttgacagctccaatgctgatgccgctttttctggatcaactgatattgcaatgtttcttttggtgccaatcttgagcgcgcgtaaaccagcttctccgcgctcttcatagaccttcagccacctggctacagaaccactaccagcaagcataaagtgagcagcagcctgattaagggacatgtgctgctcgatcacagctttcacgaccttaatacgcaactctggatcagcactaacgcctttaggtttgggaattaaacctttttctccatgtttttcatagagggcaacccatgtcctgacctgggttcgggggacaccaaaacgtgccgagatgatc

SEQ ID NO: 28706 - DNA, 1131 bp, Homo sapiens
  SIMILAR (1131)..(739): 911254mologous to Escherichia coli ATP phosphoribosyltransferase,accession number U02070,Smith-Waterman Score=610.
  misc_feature (1)...(1131): n = a,t,c or g
gtaaaggatctccttttcacacccgttcagcgcggtaacgtggnnnnnnnnnnnnnnnnnnnnnnnnnnnnnnnnnnnnnnnnnnnnnnnnnnnnnnnnnnnnnnnnnnnnnnnnnnnnnnnnnnnnnnnnnnnnnnnnnnnnnnnnnnnnnnnnnnnnnnnnnnnnnnnnnnnnnnnnnnnnnnnnnnnnnnnnnnnnnnnnnnnnnnnnnnnnnnnnnnnnnnnncgatcactccatcatcttctcaatcggcagcaccagaattgaactggcacccagcgctatcagtttttccatggtttcccagaacagggtttcgctgctgaccatgtgcatcgctacgcgctgttggtcacccgccagcggcagaatagttgggcgttcggcacctggcagcagggcgatgacttcatccagacgttcggtcggtgcgtgcatcatgatgtattttgattcgcgcgcctggatcacaccctgaatacgggtcagcagtttgtcgatcagttgctgtttggattcttccatttcgccatcgcgttgaatcaggcaggctttcgagcgatagataacttcgacttcgcgcaggccgttagcttccagcgtggcaccggtggaaaccagatcgcaaatcgcatccgccagtccggcacgcggggcgacttcaacagaaccgttcagtaagcaggatttaaaagagatgcctttctggtcgagataacgcttgagcaggtgaggataagaggtggcaatacgtttccggtttaagaagagcgggacggtcccaggcttcatcaaccggcgttgccagcgaaagacgacagccgccgaaatccagacgacgcagggtaaagtagcgtggatcttcaccctgggcgcggcggttaagcagctcttcttccagcacgttttcgccgataatcccaaggtctaccacgccatccattaccagaccgggaatgtcgtcgtcacgcacgcgcagaatatcaatcggcatgttttctgccatcgcgatcaggcgctgggtgtgaagattaattttaatgccacagcgcgccagcaattcgcgtgagtcatcacttaaacggccggatttctgcatagctatgcgtaaacgagtgttgtctgtcat

SEQ ID NO: 28707 - DNA, 3094 bp, Homo sapiens
  SIMILAR (2153)..(2701): 921254mologous to Escherichia coli similar to Desulfurolobus ambivalens hypoth. 28.3 kDa protein in sor 3' region,accession number U00006,Smith-Waterman Score=842.
  misc_feature (1)...(3094): n = a,t,c or g
atggtggaacgctatatagcgctggccatgacaaangcattatgcgcacagcacaagatctgccgcagccattgtttggccgcagttgcagcactagagacacggttgtctatcaaatacgacttactcacctgcggcaactggaggcggaaagcatcacattattcgcgaggtggcggcagaattctcaaatccggtgatgctctctctatcggtaaagattccagcgtcatgctgcatctggcgcgcaaggcgtttatccagcgattgcggtacgtgtgccaaccataaatgtgacggcaatcgatttaagcgtgacggtgaagaaacctgtaaaagccaatgaagtcaacctgttgctgcaaaaagagcacaagattttaaccacgatccgcacagtgccattgtcgatggcaccaaacccgggtcagtggcgcacacctgatcaaaacgttggtctggtgcgtaacgaatggggctttgctaaccgaatgctcgacacgacgttagctatgctactgttgctttcaggctttcgagcgatagataacttcgacttcgcgcaggccgttagctccagcgtggcaccggtggaaaccagatcgcaaatcgcatccgccagtcggcacgcggggcgacttcaacagaaccgttcagagagcggaccgtcccaggcttcatcaacggcgttgccagcgaaagacgacagccgccgaaatccagacgacgcaggtctaccacgccatccattacagaccgggaatgtcgtcgtcacgcacgcgcagaatatcaatcggcatgtttctgccatcgcgatcaggcgctggcgcatgttgattcagctcggtcaccgctttgacttatcttccggcaacaggcccgctttaaactccagccccagctccccggcattgcgcccgctgcgcgtggattatcgccgttcgttaattaaaccagtaaatcatcagcgggatgtttcccgcagcgcaaatcaatacgcgctcaccgttacctgcgcttcaatgccagacccgaccagcgcccgctgtggattcggcgggggaatggcgagttcagcaacctgtgcttcgcgtacgatggcttgcggcgtggatgcgtcgcgccttgctcgaccgccgccgccagtgtcagcagttcgattcactaatacccgttgccggatgaatcgcggtaacgcgcggtttacgacgcgccgctccgcctttaatcaacgccccacgacgcgctgcgccgccagcccggaggtaatcgccgcaggcgttgagataactaacgcaccgggcagccaatcagcagcagcgtcagccctttataaatccactcctgcagctggcggcaaacagcagcggtggcaccagcgtcaccagcagagcgacgccataatcgcgggctttcagaatccggcaatggcgctggctcccggttctgacagcacttccaacgtcaccagacgtctacgctggtggcaccagcagggactttatcgcccgttgcgcgctccacggaatggattcgccggccagggcgctttcatcaaagagcgaccagcagattcacacagttgccccccccccccttgcgccccttcaccgccgcaagctcccttttctggctactattcggcccggttctttcaccccccaatccaggccttcccttacccgacgatcacccggagaactatcggcaagcggaatagcttccgtaccgacgtattcattggtccacggctaaataacccagctttactgccaaaagccgccgtagaggctcggggggtaagacagttctcatcctcggtggcagtcgtggtatcggtgccgctatcgtacgtcgtttcgtcaccgatggggccaatgtacgattcacctatgcggggtcgaaagatgccgctaaacgcctggcacaagagactggagcgacagcagtattcacagatagtgctgacagagacgctgtcattgatgtcgttcgtaagagcggcgcattggatatcctggtggtaaatgcaggtattggcgtctttggcgaggccctggaattaaatgccgacgatattgatcgccttttcaaaatcaatattcatgctccttatcatgcctctgttgaagccgcccggcagatgcccgaaggcgggcgcatcttaatcatcggctccgtgaatggcgatcgaaagagcaacccactggcaatcagtggcctggttgtgctcacacttatctggagttatagctggattttcatgaagcaagtcaccagttacatcggtgccttcgactttaccgccttacgctgcatnttcggcgctctcgttttattcatcgtccttttattacgtggtcgcggaatgcgcccgacaccgtttaaatacaccttagccattgccctgttacaaacctgcgggatggttggtctggcgcagtgggcgttggtcagcggaggtgcggggaaggtggcgatcctgagctataccatgccgttctgggaagagattttcgccgcgttgtttctcggtgaacgcctgcgacgtgggcaatatttcgcgattctgattgccgctttcggcttatttttggtgttgcagccgtggcaactcgatttctcttcgatgaaaagtgccatgctggcaatcctctccggcgtcagttggggggcgagcgcgattgttgctaaacgtctaattctttcggacctaattgtcggcggtgggcacaaaccttccttgcttgcccggtgggaagtccccaaaaaagttaacccccccattttggcggcattcccaagggaaccacctttcgttggaaccccgaaggcccaggctttgcggaaaaattcctttccccaggaaccccttgctctggggcccccccgccacccaagtggccggaaatatcccctcgggaccccaaagaaagccaacccgggtttttggcccttggggaggtgcttagtccttgccacctggcttattctctccagaacaaggactaaggtacaaagaatacagtatgctgagagcagcggagaagacaaagatgacaccattcctgtcttcaaaggacgtaaaaactag

SEQ ID NO: 28708 - DNA, 1209 bp, Homo sapiens
  SIMILAR (352)..(1206): 1001254mologous to Escherichia coli K12 endonuclease IV,accession number AE000305,Smith-Waterman Score=1492.
atgaaagccggccgcggccagcggcccggcccgcgggcggcgcacgccgccggggcccgcgcgcggatgctgcgcggggcgggcgcctgggtgccgcggtggcccttacccacacccgttaaccttgccccgctacctattaattgcgttcctgccatgtatccccttatgactgtgaaatttaccaaacgcggaagtttatttgctgctacctttacttatatagtatacgcggctgctacgacttgtaaaacaatatttgctcatgggcctacccaaacggaaggcctatgcaatttgccgcggaatacgcgtctacataatgtgccacctggccgggcgagtcctcgcatgaaatacattggagcgcacgttagtgctgctggcggtctggcaaatgccgcaattcgcgccgccgaaatcgacgcaaccgcgtttgccttgttcaccaaaaaccaacgtcagtggcgtgccgcaccgctcacgacgcaaaccatcgatgaattcaaagccgcctgtgaaaaatatcactacacatcggcgcaaattcttccccacgacagttatctgattaacctcggacatccggtcactgaagctctggaaaaatcgcgcgatgcctttatagatgaaatgcagcgttgcgaacagctggggctttctttgctcaacttccaccctggcagccatctgatgcagatttcagaagaggattgccttgcgcgtattgccgaatccatcaacattgcgctggataaaactcaaggtgtgacagcggtgatagaaaacaccgccggtcagggcagtaacttagggtttaaattcgaacatctcgcggcgattatcgacggcgtggaagataaatcccgcgtcggcgtctgcattgatacctgccatgctttcgctgccgggtatgatttgcgtactccagccgaatgcgagaaaacattcgcggattttgcccgtactgtcggctttaagtatctgcgcgggatgcaccttaacgatgcgaaaagcacctttggcagccgcgttgaccgccatcatagcctcggtgaaggcaatatcggtcatgatgcgttccgctggatcatgcaggacgaccgtttcgacggcattccgctgatcctcgaaaccatcaacccggatatctgggcagaagagatcgcctggctgaaagcgcaacaaactgaaaaagcggtagcctga

SEQ ID NO: 28709 - DNA, 822 bp, Homo sapiens
  SIMILAR (1)..(522): 951254mologous to Escherichia coli OUTER MEMBRANE USHER PROTEIN PAPC PRECURSOR,accession number D90864,Smith-Waterman Score =887.
atgtcagggagttatagcagtgtctgggctgaagacgacattcagtttgattcccgttttctggaattaaaaggcgacacaaaaattgatctgaagcgtttttccagccaggggtatgttgagcccggaaaatacaatttacaggttcaactaaataaacagccattggcggaagagtacgatatttactggtatgctggtgaagatgacgttagcaaaagctatgcttgtctgacaccggaactggtggcgcagtttggtttaaaagaagacgtggcgaaaaatctgcaatggagccacgatggtaaatgcctgaagcccggtcaactggaaggcgtggaaattaaggctgatttaagccagtccgcattagtcatttcactaccgcaggcttacctcgaatatacctggcccgactgggatccaccttctcgttgggatgatggcatctccgggatcattgcggactacagcatcactgcgcaaacacaacacgcaaaactaaacacagaggatgacgcaatgaaagcactggctcggtttggcaaggcctttggcggctacaagatgattgatgtcccacaacccatgtgtggcccggaagatgtagtgattgaaattaaagccgcggcaatctgcggcgcagacatgaagcactacaatgtcgatagcggttctgatgagtttaactctatccgcggccatgagttcgcaggttgtattgcgcaggttggtgaaaaagtcaaagactggaaagtggggcaacgcgtcgtatcggataacagcggtcacgtttgcggtgtttgtccggcctgtgaacag

SEQ ID NO: 28710 - DNA, 718 bp, Homo sapiens
  SIMILAR (1)..(558): 961254mologous to Escherichia coli OUTER MEMBRANE USHER PROTEIN PAPC PRECURSOR,accession number D90864,Smith-Waterman Score =974.
atgtcagggagttatagcagtgtctgggctgaagacgacattcagtttgattcccgttttctggaattaaaaggcgacacaaaaattgatctgaagcgtttttccagccaggggtatgttgagcccggaaaatacaatttacaggttcaactaaataaacagccattggcggaagagtacgatatttactggtatgctggtgaagatgacgttagcaaaagctatgcttgtctgacaccggaactggtggcgcagtttggtttaaaagaagacgtggcgaaaaatctgcaatggagccacgatggtaaatgcctgaagcccggtcaactggaaggcgtggaaattaaggctgatttaagccagtccgcattagtcatttcactaccgcaggcttacctcgaatatacctggcccgactgggatccaccttctcgttgggatgatggcatctccgggatcattgcggactacagcatcactgcgcaaacacgacacgaagaaaatggcggcgatgacagtaacgagatcagaggcaacgggacgtcgatgtctccatggctcgttcagccattgctacaatgtcatgctcggtgccctaacactggctacgcagtcctacctatcgacctgggtctgaacttttgtggtaatattcttgatgttacgatgacctgtggtgtcttgcatcgcaatttgtctagcgcacatgtgtctgtgg

SEQ ID NO: 28711 - DNA, 1956 bp, Homo sapiens
  SIMILAR (1408)..(1953): 991254mologous to Escherichia coli OUTER MEMBRANE USHER PROTEIN PAPC PRECURSOR,accession number D90864,Smith-Waterman Score =952.
atgttgctgaaagagtgccggatgcggcgtgaacgccttatccggcctacaaatgctatcaacgcgctcggtcagtcccctcgccccaccggggaagagggttacggggggatattggacaaatttttaaaatttcttgggtccctggcatcccagcagatgtctttgtggttgatgaatggcggcgactggtttattgcgctggcagataatcaacagaaacaagcgaaaacggcgctggaaaaatgtcagcatttgccctttattcttgaagtacacagtcgcaccggcaagcatgttattgctcatgccgattatccagatgatgtttatgaatggcaaaaggacgttgatttgcatcaggtcttgtggagccgctcgcgattaggtgaacgccaaaaagggcagggaattacaggtgctgatcatttctggtttggtcatacaccgttgcgacatcgcgtggatattggccacctgcattatattgataccggtgtgcgtgccgggcgcagtattccgctgaagaaaaacgttgatgacgcgctgaaaaacccgaacgtcaccagcgtagagcatgtggtggtactgaagcgtactggcgggaaaattgactggcaggaagggcgcgacctgtggtggcacgacctgcgagatagcccgctaatcagtcccaaaatcaaccccagcgatccgccaattgaaaagccaatcagcgcccgccaggagctgatcgccagatgctgccacagttcgccgctggcggagagcgtccagaacgccgtcaccactccttccggtgaaggcaaaatacgcgtcgacagccagccaaccgaggaggccagttgccacaccgccacgatgcccaccggtaaaaaccaaggggcaacgcgcaataaccacttcttcactggcgttgccattatttcttccttagctttgcgcgactttacgggggataaaatcattcgccaccgcttcgccttgcggattcagcggctgcggctggggaatttccgggatggcgacatccagaagcgggaacagcaactcgccaacccgatacgcttcttccagatgcggatagcccgaaagcacaaaactgtcgatgccaagcgcggcatattcgttgattcgcgcagcgacctttttgagttctgcctcgagtttatcgatagccccacaaaaggtgtcatattcacgactgccaataccgattgcgccaaagcggactgcagaaagatcgggcttctgttcctgcaatgcttcatagaaaggagaaaggttgtccggaatatctccggcaccgtgggtggagctgataaccagccagatcccctgaggcagaggcagcagctgcatgcttcaggtcatgggagtggagtcgctattatgcctggcgggcggttaccgtcattaaaagccaaactggcgctgggcgaagattacctcaattccgatattttcgacggttttaattatgttggtggcagtgtcagcactgacgatcaaatgttgcctcccaatctgcgcggctacgcgccagacatttccggcgtggcacacaccacagcaaaagtgaccgtcagccagatggggcgtgtgatttacgaaacgcaggttccggctggaccgtttcgtattcaggatcttggtgattccgtctccggtacgttgcatattcgcattgaagaacagaacggccaggtgcaggaatatgacatcagcaccgcctcgatgccatacctcactcgcccaggccaggttcgctataagatcatgatgggacgtccgcaagagtggggccaccatgtcgaggggggatttttctctggtgctgaagcctcctggggcatcgctaacggctggtcgttatatggcggtgcgctgggtgatgaaaactatcagtctgcggcgctgggcgtcggtcgcgatttgtctaccttcgaggcttaa

SEQ ID NO: 28712 - DNA, 681 bp, Homo sapiens
  SIMILAR (304)..(654): 501254mologous to Baboon endogenous virus strain M7 gag-pol precursor polyprotein,accession number D10032,Smith-Waterman Score= 302.
atgaatgcagcatttgtaaggcaagcccagggtgacatcagagagaagctgcaaaagctagagggttttgcaggcatgaatgccacccagcttatagaagtggccaccgaggtgtacattaactgtgaccaagaggcaaaaaaggaaacagagcagaggcttaggaaaaaggccaacctgttagcggcagccctcacaaaaaggaaaattaacattgtaaagggacgcgaatgttcacatgggtgtgggcatggaagaggccaagttgaacagcgagccaagagatggctgaggctaaggggaggatgggtcaaggctttccccgtcaggactgagaaagcacgagaagtaactaaagtactgttaagagacattatccccggatttggactgcccctgactctagcgtcagacaatggaccagcattcatagccaagatagttcaagaactaacacagttattgaaaataaagtggaagttacacatagcctactggccacagagctcagaaaaagtggaacacatgaaccagacactcaaacagctactaaaaaaattttgccaagaaactcatctaaggtgggatcaggtcctgcccatggtcctcctccgagtgaggtacacccccaccaaacaaactgggtattcacctatgagatcttgttcggccaatttaaag

SEQ ID NO: 28713 - DNA, 966 bp, Homo sapiens
  SIMILAR (322)..(960): 961254mologous to Escherichia coli OUTER MEMBRANE USHER PROTEIN PAPC PRECURSOR,accession number D90864,Smith-Waterman Score =1122.
atgttcgacgccattagctatctggtgctggcagggctgtgcgcctcactgctgggcgatgcgctaaccctgttgccacgtcaacgtctgattgcgattaaggacgttttccgtccaggccatgccgattacacctacgaacaaaaatacggtctgcgcgattatcgcggcggtggacgttcttccgcccgcgaaaccgccatgcgcgtggcggcaggagctattgccaaaaaatatctcgccgagaaatttggtattgaaatccgtggctgcctgatgcgttgcactggcggcagcacagttaacggcgaggtttcaccccagccagatagacactaccgtcatcatcgacaactaaataaacagccattggcggaagagtacgatatttactggtatgctggtgaagatgacgttagcaaaagctatgcttgtctgacaccggaactggtggcgcagtttggtttaaaagaagacgtggcgaaaaatctgcaatggagccacgatggtaaatgcctgaagcccggtcaactggaaggcgtggaaattaaggctgatttaagccagtccgcattagtcatttcactaccgcaggcttacctcgaatatacctggcccgactgggatccaccttctcgttgggatgatggcatctccgggatcattgcggactacagcatcactgcgcaaacacgacacgaagaaaatggcggcgatgacagtaacgagatcagcggcaacgggacggtcggggttaacctggggccatggcgtatgcgcgctgactggcagaccaactatcaacatacgcgcagtaatgatgatgacgatgaatttggcggcgatgacacacaaaaaaaatgggagtggagtcgctattatgcctggcgggcgttaccgtcattaaaagccaaactggcgctgggcgaagattacctcaattccgatattttcgacggtttatga

SEQ ID NO: 28714 - DNA, 593 bp, Homo sapiens
  SIMILAR (2)..(592): 981254mologous to Escherichia coli K12 putative dehydrogenase,accession number AE000357,Smith-Waterman Score=953.
tgagtttcatgtcggtatcgtgggcttagggtcaatgggaatgggaccagccctgtcatatgtccgcgcaggtctttctacttggggcgcagacctgaacagcaatgcctgcgttacgttgaaagaggcaggtgcttgcggggtttctgataacgccgcgacgtttgccgaaaaactggacgcactgctggtgctggtggtcaatgcggcccaggttaaacaggtgctgtttggtgaaacaggcgttgcacaacatctgaaacccggtacggcagtaatggtttcttccactatcgctagtgctgatgcgcaagaaattgctaccgctctggctggattcgatctggaaatgctggatgcgccagtttctggtggtgcagtaaaagccgctaacggtgaaatgactgtcatggcctccggtagcgatattgcctttgaacgactggcacccgtgctggaagccgttgccggaaaagtttatcgcataggtgcagaaccgggactaggttcgaccgtaaaaattattcaccagttgttagcgggcgtacatattgctgccggagccgaagcgatggcacttgcagcccgtgcgg

SEQ ID NO: 28715 - DNA, 1384 bp, Homo sapiens
  SIMILAR (481)..(978): 881254mologous to Escherichia coli exonuclease V (AA 1- 1180),accession number X04581,Smith-Waterman Score=757.
atggccaatggggcccccccccgagtgctgcagcagctggttgaggaggatcgaatgagaagggcacacagtgggcatccaggatctccccgaggtagcctgagccgccaccccagctcccagttggcaggtcctggggtggaggggggtgaaggcacccagaaacctcgggactacatcatccttgccatcctgtcctgcttctgccccatgtggcctgtcaacatcgtggccttcgcttatgctgtcatgatgccgttgactccagagccgccctctgggcgcgtggaggggccccccgcatgggaagcagccccatggccctcactgccctgtgggccctgcatccccatcatgctggtcctggccaccctggctgcgctcttcatcctcaccaccgctgtgttggctgaacgcctgttccgccgtgctctccgcccagaccccagccaccgtgcacccaccctgagtatcccaggtcgcatgctcaacctgaatgcctttgaatccggcatgctgtttgagcagcagctgattgaagatgagtctctgctacgctaccaggcctgcgccgatttctggcgtcgccactgctacccgctgccgcgtgaaatagcccaggtcgtctttgaaacctggaaagggccgcaggcgttgctgcgcgatattaatcgttatctgcaaggcgaagcgccggttatcaaagcaccgccgcccgatgatgaaacgctggcttcccgtcacgcgcaaattgtggcgcgtattgatacggtaaaacagcagtggcgcgacgcagtgggtgaactggatgcgctgatcgaatcttctggtattgatcgacgcaagtttaaccgtagcaatcaggctaaatggatcgacaagatcagcgcctgggcagaagaagagaccaaacagttatcagttgccggagtcgctggaaaaattctcccagcgtttcttagaagatcgcacgaaggccgggggggcgatcgatcaactgcttgcagaaccattgtcgatccgcgatctggtgatcacccgcgcattggctgagatccgcgaaacagtagcgcgtgaaaaacgccgccgtggcgaattgggttttgatgacatgttaagtcggctcgattccgcgctgcgtagcgaaagcggtgaggtgttggcagcggcgatccgtacgcgattcccggtggcaatgatcgatgaatttcaggataccgacccccagcagtaccgaatttttcgccgtatctggcaccatcagccggaaaccgcattgttgctaattggcgacccgaagcaggccatatatgcattccggggtgcggatatcttcacttatatgaaggcgcgtagcgaagttcacgcccaactacacatttag

SEQ ID NO: 28716 - DNA, 1986 bp, Homo sapiens
  SIMILAR (1417)..(1983): 971254mologous to Escherichia coli Flagellar basal body P- ring protein precursor,accession number D90744,Smith-Waterman Score =915.
atgaaaaagatcctgacaaccccgatcaaagctgaagatctgcaagatattcgcgtcggcgatgtgatctacctgaccggtacgctggtgacctgccgcgacgtttgtcaccgccgtttgatcgaactgaaacgtccgatcccttacgatctcaacggcaaagcgattttcgtccgctgcattcttgatgctgatgcccagcgcgaaggtatcaatgcctcgacacgctacccgaaaaactgggtgcagtcgggggatccggcgcgcgaatccaccatgattcagtcacaaattaaccgcaatattcgtcttgatcttgccgatgccattttgctcagcaaagctaaaaaagatctctcatttgccgagattgccgacggcaccggtctggcagaagcctttgtaaccgcggctttgctgggtcagcaggcgcttcctgccgacgccgcccgcctgaatattgcatgccagcgcggcgcgtcgaagaggcggttatcaaaggaccgcgtggatgcaggcggcagctatgtgtttgtccagcgttgggaacacaacctgaagcagctcaaccggatgagcgttcacgatcaggagatggtgatcgggcgcaccaaagaggccaacgaagagatcgacggcgacgaacgtccggaaacctctcacctcacccgcgttgatctgaaagaagatggcaaagggctgaagattgttcgccagagcctgccgtacggcactgccagtggcactcacggtctgtacttctgcgcctactgcgcgcgtctgcataacattgagcagcaactgctgagcatgtttggcgataccgatgctgtagcgcgtaccatctcgggcaaccacgcgaatgacttcgcaaagacgatcagcaatacgcgtgcgcccgacggagataaagtcgtagtaaggagaaaggcgtttgaaatcggtatagataagcgatggcagagaatcaacaatgtaatcgccattaagcgtgaacggttcaatccatttagcctgattgctacggttaaacttgcgtcgatcaataccagaagattcgatcagcgcatccagttcacccactgcgtcgcgccactgctgttttaccgtatcaatacgcgccacaatttgcgcataacgattaatatcgcgcagcaacgcctgcggccctttccaggtttcaaagacgacctgggctatttcacgcggcagcttaagcaggtggcgacgcagcaaatcggcgcaggctcattcaacatgtctgcagccttcctctctacacagggcttccacgtggaccacacggccgagctgcggggaatccggtggaccagcagtttgcggcgggagacctcggactatcaccgcacgctgacgcccaccctggaggcactgatgatgtacgttggtgtctcatctccacttaaaaacgttgggactcaggtgtataagctggcgcagggcaatattctggttggcggcgcaggagcctccgctggcggtagcagtgttcaggttaaccaactgaacggtggacggatcaccaatggtgcggttattgaacgtgaattgcccagccagtttggcgtcgggaatacccttaatttgcaacttaacgacgaagatttcagcatggcgcagcaaatcgctgacaccatcaaccgcgtgcgtggatatggcagcgccaccgcgttagatgcgcggactattcaggtgcgcgtaccgagtggcaacagttcccaggtccgcttccttgccgatattcagaatatgcaggttaatgtcaccccgcaggacgctaaagtagtgattaactcgcgcaccggttcggtggtgatgaatcgcgaagtgaccctcgacagctgcgcggtagcgcaggggaatctctcagtaacagttaatcgtcaggccaatgtcagccagccagatacaccgtttggtggtggacagactgtggttactccacaaacgcagatcgatttgtag

SEQ ID NO: 28717 - DNA, 2118 bp, Homo sapiens; identical to SEQ ID NO: 17585
  SIMILAR (1)..(612): 991254mologous to Escherichia coli OUTER MEMBRANE USHER PROTEIN PAPC PRECURSOR,accession number D90864,Smith-Waterman Score =1102.

SEQ ID NO: 28718 - DNA, 8337 bp, Homo sapiens
  SIMILAR (4495)..(5598): 991254mologous to Escherichia coli similar to arylsulfatases,accession number L10328,Smith-Waterman Score=2022.
  misc_feature (1)...(8337): n = a,t,c or g
atgaaaattaatcgtattgttaatgagggatttatgaaaacgatgctggcagcttatttaccaggaaattcgaccgtcgatctgcgggaagttgcggtgccgacgccggggattaaccaggtactgatcaaaatgaaatcctccgggatttgcggaagcgatgtccactatatctatcatcaacaccgtgccacagcggcggcacccgataaaccgttataccagggctttatcaacggtcatgaaccgtgcgggcagattgtggcgatggggcaaggctgccgccattttaaagagggcgaccgcgtgctggtgtatcacatttctggcttccgcattcggttattctggcgacaaacagtccgcagggtgccgtggtggctgctcggttggtgtgagcgggtgccggaagcggatgaggtgctgcctgcgccgctgccgccgtaccgggtactgaccgggctggtggaccgcttcgggcgcacacagacgttccaccgcgaagccgccggtgaattcagcggcgaaatcaccggcgtgacggatggtgcctggcgtcacttccggctggtactgaccacgcaggcgcagcgggcagaagaagcccggcagcaggccatttccggcgggacggaaccgtccgcttttcctgataccctgccgggttacaccgaatatggccgggacaacggcatccgtctgtctgccgtgtggctgacgcacgacccggaatacccggagaatttacctgccgcgccgctggtgcgctatggctggacgccacgcggcgaactggcggtggtgtatgaccgtagtggcaaacaggtgcgcagctttacttacgatgataaataccggggccggatggtggcgcaccgtcacacgggccggccggaaatccgttaccgttacgacagcgacgggcgggtgacagaacagctaaacccggcaggcttaagctacacgtatcagtatgagacagaccgcatcaccatcaccgacagacttgaacgccgtgaagtgctgaaacgcaggcagagccgggatgatgacctttacccttatgtaatctcctcctctcnaaagtgtattcacacaaacctagatctgcgcagacggcgtattgaccgtttcagtccactcacacagtaccgcttcacgcaggcgcgccatctcttcttccagatgtgcgttcagccccagtttgtcgtcaatgatcactgctttcagtttgtcggcagtacggatgtagaacatcatgaagcggtcgagatatttgatcagcgtttcgcgatcgatatccgccgccagcagatccgcatgacgcggtttcatgccgccgttaccgcaaacacttcatcaacagcgacaagcgtgacccgaacgtgcagatggtgccagagcgcgaacagcaccgtccggcaacgccgtatgaacgtatcccataactctggtggaggacaacgcatgagccagtggaaagacatctgcaaaatcgatgacatcctgcctgaaaccggcgtctgcgcgctgttaggtgacgagcaggtcgcgattttccgcccgtatcacagcgatcaggtgtttgcgatcagcaacatcgacccgttcttcgagtccagcgtgctgtcacgcggactgattgcggaacaccagggcgagctgtgggtcgccagcccgctgaaaaaacagcgttttcgcttaagcgacggcttgtgcatggaagacgaacagttttccgtcaaacattacgaagcgcagagtgaaagacggcgtggtggtaccgagtcagattggccggaaagtagtggtcacttccgcttaaatcttgcgcaaacatttaactcgtttggcgcaattatcgcggttgtctttgggcaaagtcttattttgtctaacgtgccacatcaatcgcaagacgttctcgataaaatgtctccagagcaattgagtgcgtataaacacagcctggtattatcggtacagacaccttatatgatcatcgtggctatcgtgttactggtcgccctgctgatcatgctgacgaaattcccggcattgcagagtgataatcacagtgacgccaaacaaggatcgttctccgcatcgctttctcgcctggcgcgtattcgccactggggctgggggcgcaattctgctatgtcggggcacaacgggctgtggggctattggaatcgtaagtgtgaaaaaatccagagatacactcgatctcgtacccgtgctgtcgatcacatcaacgtcgtattcatcaacgtgaactttcagtgcgcctgccagcttctgcccttcagtcttcggtacagaaatgtagttttcgatatcaacggtatcgaggatctgaccaccaaaacgttcgcccatcagaccggtacggatgcctttacgtgcggactcttctgccgcacgtttttccgcgccagtatcaattttggcaacgatttcagtcaacgtcatgcggccctgaccaaactctttcccgtttacgaacactgccggaacgcccatcacgttgcgatcggtgatttcgttctggaaggtgccgccgtcaattgcagtgtgcttgatgcgcgggttcagtacgctcatcaggttcagcgcctgcaccacgtccgggcagttgtggcaagagagcgagtaataggtttcgaattcaaaatcaccgtcaatatggcgaatctgctccagcagagactgcgcttctttcgacggatgaccaccggtccacagcaacgccagtaccagcgaggtgaactcgtggcccagcggggagcctgcaaaacgtggcccctggttggaacctgggttggtgatcaggaaagacggcttacgcaccggcaagctgttatcttctttaaaggtgcagtcgctgttcctcttatgattggtgaccgactgggcctctcaaaagaagctattgcgatgctcattagctcggatctcttttgctgcgggatcgtcacattattgcaatgtatcggtatcggccgctttatggggatccgcctgccggtgattatgtcggtgacctttgctgctgtaacaccaatgatagccattgggatgaacccggatatcggcctgctggggatatttggtgccactatcgccgcgggttttatcaccacattattagcgccacttatcggtcgcttgatgcctttattcccgccactggttaccggtgtggttattacttctatcgggcttagcatcattcaggtgggtattgactgggccgccggaggtatctcctttgccgtcttaatttttatcttgctcattactcgctatgcgaaaggatttatgtccaacgtcgccgtattactggggattgtatttggctttttactttcgtggatgatgaatgaagtcaatttatccgggctacatgatgcttcatggtttgcgattgttacgccgatgtcgtttggatccggcaaaccaggcatcgttgatgcgctgaaagcagacaagaaagatccgtccgggccttatgtctggatcacctacgcggcggtgcaatctctggcgactgcccttgagcgtaccggcagcgatgagccgctggcgctggtgaaagatttaaaagctaacggtgcaaacaccgtgattgggccgctgaactgggatgaaaaaggcgatcttaagggatttgattttggtgtcttccagtggcacgccgacggttcatccacggcagccaatacctacgcgctgatagccatcggctacaccatggtttacggcattatcggcatgatcaacttcgcccacggcgaggtttatatgattggcagctacgtctcatttatgatcatcgccgcgctgatgatgatgggcattgataccggctggctgctggtagctgcgggattcgtcggcgcaatcgtcattgccagcgcctacggctggagtatcgaacgggtggcttaccgcccggtgcgtaactctaagcgcctgattgcactcatctctgcaatcgccattaaccccaggaatccgcacatgcgtattgaagaagatctgaagttaggttttaaagacgttctcatccgccctaaacgctccactcttaaaagccgttccgatgttgaactggaacgtcaattcaccttcaaacattcaggtcagagctggtccggcgtgccgattatcgccgcaaatatggacaccgtaggcacattttctatggcctctgcgctggcttcttttgatattttgactgctgtgcataaacactattctgtcgaagagtggcaagcgtttatcaacaattcttccgctgatgtgctgaaacatgtgatggtttctaccggtacgtctgatgcggatttcgaaaaaactaaacagattctcgacctgaacccggcattaaacttcgtttgtattgacgtggcgaatggttattccgaacacttcgtgcagttcgttgcgaaagcgcgtgaagcgtggccgaccaaaaccattgtgctggccaccaatatggtcggttgctatagcggtaaaccgctgaatacgcaaaatattgatagtctggcggcggaaggtattcgctttaattccgcctacacctgttcaccggtttgtacgcctgcacgggccggactatttaccggtatctacgctaaccagtccggcccgtggaccaacaacgtcgcgccaggcaaaaacatctccactatggggcgctactttaaggatgccggctatcacacctgttacatcggcaaatggcatctcgacggtcatgactatttcggcactggcgagtgtccgccggagtgggacgctgattactggttcgatggggcgaactatcttagcgaactgacggaaaaagagattagcctgtggcgcaatggcctaaacagcgtcgaagatttacaggcgaaccatatcgacgaaaccttcacctgggcgcatcgtatcagcaatcgggcggtggattttctgcaacagcctgcgcgcgcagacgagcctttcctgatggtggtttcgtatgatgagccgcatcacccgttcacctgtccggtggagtatttagagaaatacgctgatttttactacgagctgggcgagaaagcacaggatgacctggctaacaaaccggaacatcaccgcttatgggcgcaggcgatgccatcgccagtcggtgatgacgggctttatcaccatccgctctattttgcctgtaatgactttgttgatgaccaaatcggacgggtcatcaatgccttaacgccagagcaacgtgaaaatacgtgggttatttatacctccgatcacggcgaaatgatgggcgcacataagctgatcagtaaaggggcggcgatgtatgacgacatcacccgcattccgctgatcatccgttcgccgcaaggggagcggcgacaggtcgatacgccagtcagtcatatcgatttactgccgacaatgatggcgctggcagatattgaaaaaccagagattctgccgggggaaaatatccttgccgtgaaagagccacgcggcgtgatggtggaatttaaccgctacgagattgagcatgacagctttggcggttttattccggttcaactaaataaacagccattggcggaagagtacgatatttactggtatgctggtgaagatgacgttagcaaaagctatgcttgtctgacaccggaactggtggcgcagtttggtttaaaagaagacgtggcgaaaaatctgcaatggagccacgatggtaaatgcctgaagcccggtcaactggaaggcgtggaaattaaggctgatttaagccagtccgcattagtcatttcactaccgcaggcttacctcgaatatacctggcccgactgggatccaccttctcgttgggatgatggcatctccgggatcattgcggactacagcatcactgcgcaaacacgacacgaagaaaatggcggcgatgacagtaacgagatcagcggcaacgggacggtcggggttaacctggggccatggcgtatgcgcgctgactggcagaccaactatcaacatacgcgcagtaatgatgatgacgatgaatttggcggcgatgacacacaaaaaaaatgggagtggagtcgctattatgcgatctacggtaccagtcacctgaaagctcgtttgcccggcgcttaccaacgcactgacatccgcatggttcaaagactgatgatcggccagcggtacacatttttccggttgtacgccacacatcttcagcgtggcaaaaaagcgcggcggatgcccaatccccgccatcgccactacatgttcaagctgagcaacgtcacaacgcgtaccgggtgttgcgccagaatggcttttaccgcatcagaacgaacgggagaaatgtttattggttttgattacggtacagcaaactgttcagtggcggtcatgcgtgacggtaaaccgcatttgctaaaaatggaaaacgacagcacgctgctgccttcaatgctttgcgcgccaacgcgtgaagcggtaagcgaatggctgtaccgccatcatgatgttccggcagacgacgatgaaacgcaggcgctgttacgtcgggcgattcgttataaccgcgaagaagatatcgatgttacggcgaaaagcgtgcagttcggtctttcctcactggcacagtacattgatgatccagaagaagtgtggtttgtgaaatcaccaaaatcgttcctcggtgccagcggcttaaaaccgcagcaggtagcgctgtttgaggatctggtctgcgcaatgatgttgcacattcgccagcaggcgcaggcacagctgccagaagcgattactcaggcggtgattggtcgtccgatcaacttccaggggctgggcggtgatgaagcaaacacccaggcgcaagggattctggaacgcgcggcgaagcgtgccggattcacggacgtggtattccagtacgagccggtcgcggctgggctggattacgaagccaccttgcacgaagaaaaacgggtgctggtggtggatatcggcggtggtacgactgactgttcattgctgctgatggggccgcagtggcgttcgcgtctcgatcgtgaagccagcctgctgggtcacagtggttgccgtattggcggtaacgatctggatatcgcgctggcgtttaaaaacctgatgccactgctgggtatgggtggcgaaaccgaaaaaggcatcgccctgccgatcctgccgtggtggaatgcggttgccatcaacgacgtacctgcgcagagtgatttctacagtagtgccaacggtcgtctgcttaacgatctggtacgcgatgcccgcgaaccggaaaaagtggccctgttacagaaagtctggcgtcagcgtttaagctatcgcctggtgcgtagcgcagaagagtgcaaaattgctctttcaagcgtagcggaaacccgcgcctcactgccgtttatcagcaatgaactggctacgctgattagccagcgagggctggaaagcgccctcagccagccactgacgcggattctggaacaggcgcaactggcctggataacgcccaggaaaaaccggacgtatctacctgaccggcgctttaacgataactgcgaaggcgtcagctttcagagaagcaccaccaaccggcgcgccgtcgatatccggctgagcaaacagttctgcagcgttagacgcgtttacagagccgccgtactgaatgatcacttgttcagcgatgttagcgtcaactttagcgatgtggtcacggatgaatttgtgaacagcctgtgcctgagccggagttgcagatttgccagtaccgattgcccatacaggttcgtaagcgataaccgcaccttcgaatgccgcagcaccctgagttttcagtaccgcgtcgatctgacgtgcgcaaacttcttcagttttgcccgcttcattttcagcttcggtttcaccgatgcacagaaccggagtcaggccctgctctttcagcaccgcgaattttttcgcgatcagttcgtcagattctttgtggtaagtacgacgttcagagtgaccgatgatgatgtactgtgcgccgatgtctttcagcatagcagcagaggtttcaccggtgaatgcgccggacaggttcaggtccacgttttgcgcacccagcatgatgtggctgccttcagcttcgcgcttcgccatatcgatatacatttccggtggtgcgattgcaaccgcacagccagcaacacctgccagctctttacgcaggttagaaaccagctcgtgaaccatgtggcggctgccgttcagtttccagttacccatcactaa

SEQ ID NO: 28719 - DNA, 4762 bp, Homo sapiens
  SIMILAR (2530)..(3225): 981254mologous to Escherichia coli OUTER MEMBRANE USHER PROTEIN PAPC PRECURSOR,accession number D90864,Smith-Waterman Score =1238.
atgaatgcagcatttgtaaggcaagcccagggtgacatcagagagaagctgcaaaagctagagggttttgcaggcatgaatgccacccagcttatagaagtggccaccgaggtgtacattaactgtgaccaagaggcaaaaaaggaaacagagcagaggcttaggaaaaaggccaacctgttagcggcagccctcacaaaaaggaaaattaacattgtaaagggacgcgaatgttcacatggtggaacaaccccggttgatggaaaagatcccacgggtaccaaaatcgcgcgcaatatccgcattgtaaatctggatggtagccggactgttacagacggtgcgcatgaggtcgagaacattggtgacaacggcacggttaacaacaaaggagatattgttgtttccgatactggatcgattggcgtgctcatcaacggtgagggggcaacagtatccaatacgggtgatgttaacgttagccatgaagcgacagggttcagcatcactaccaacagtgggaagttttcgctggcagacagtatgcagattggcgatttctcgaccggggtagatcttaatggcaacaataacagcgtgacactggcggcaaaagatctaaaagtggtcgggcagaaagcgacgggcataaacgtttctggcgatgcgaatacagtgaatatcactggtaacgttctggttgataaggataaaaccgcagacaatgcggcggaatatttcttcgatccatccgtgggtatcaacgtttacggcagtgataataacgtgacgctggatggaaagttaactgttgtatcagacagtgaggttacttctcgtcagagtaatttatttgatggcagcgcagagaaaacgacttttgttggcggtaactgtaccgtaagcctgatgttgatgtcgttgggtggtttattcgccaatgatcttgttgattgggtgtccgttgcaacctaccaggccgcttccggcggtggtgcgcgacatatgcgtgagttattaacccagatgggccatctgtatggccatgtggcagatggacttgcggaccccgtcctctgctattctcgatatcgaacgcaaagtcacaaccttaacccgtagcggtgagctgccggtggataactttggcgtgccgctggcgggtagcctgattccgtggatcgacaaacagctcgataacggtcagagccgcgaagagtggaaagggcaggcggaaaccgacaagatcctcaacacatcttccgtaattccggtagatggtttatgtgtgcgtgtcggggcattgcgctgccacagccaggcattcactattaaattgaaaaaagatgtgtctattccgaccgtggaagaactgctggctgcgcacaatccgtgggcgaaagtcgttccgaacgatcgggaaatcactatgcgtgagctaaccccagctgccgttaccggcacgctgaccacgccggtaggccgcctgcgtaagctgaatatgggaccagagttcctgtcagcctttaccgtgggcgaccagctgctgtggggggccgcggagccgctgcgtcggatgcggcttttactgcaccaccagaaactggcgcatccagcatttccagatcgaatccagccagagcggtagcaatttcttgcgcatcagcactagcgatagtggaagaaaccattactgccgtaccgggtttcagatgttgtgcaacgcctgtttcaccaaacagcacctgtttaacctgggccgcattgaccaccagcaccagcagtgcgtccagtttttcggcaaacgtcgcggcgttatcagaaaccccgcaagcacctgcctctttcaacgtagcgcaggcattgctgttcaggtctgcgccccagtgatcggacatgattcggcgccacaaaatgccactcttagggatgatgaaacgctggcttcccgtcacgcgcaaattgtggcgcgtattgatacggtaaaacagcagtggcgcgacgcagtgggtgaactggatgcgctgatcgaatcttctggtattgatcgacgcaagtttaaccgtagcaatcaggctaaatggatcgacaagatcagcgcctgggcagaagaagagacaaacagttatcatgttgccggagtcgctggaaaaattctcccagcgtttcttagaagatcgcacgaaggccgggggggaaaccccgcgacctccgctgtttgaggcgatcgatcaactgcttgcagacccattgtcgatccgcgatctggtatgcatccgcgcattggctgagatccgcgaaacagtagcgcgtgaaaaacgccgccgtggcgaattgggttttgatgacatgttaagtcggctcgattccgcgctgcgtagcgaaagcggtgaggtgttggcagcggcgatccgtacgcgattcccggtggcaatgatcgatgaatttcaggataccgacccccagcagtaccgaatttttcgccgtatctggcaccatcagccggaaaccgcattgttgctaattggcgaagaagacgtggcgaaaaatctgcaatggagccacgatggtaaatgcctgaagcccggtcaactggaaggcgtggaaattaaggctgatttaagccagtccgcattagtcatttcactaccgcaggcttacctcgaatatacctggcccgactgggatccaccttctcgttgggatgatggcatctccgggatcattgcggactacagcatcactgcgcaaacacgacacgaagaaaatggcggcgatgacagtaacgagatcagcggcaacgggacggtcggggttaacctggggccatggcgtatgcgcgctgactggcagaccaactatcaacatacgcgcagtaatgatgatgacgatgaatttggcggcgatgacacacaaaaaaaatgggagtggagtcgctattatgcctggcgggcgttaccgtcattaaaagccaaactggcgctgggcgaagattacctcaattccgatattttcgacggttttaattatgttggtggcagtgtcagcactgacgatcaaatgttgcctcccaatctgcgcggctacgcgccagacatttccggcgtggcacacaccagagcaaaagtgaccgtcagccagatggggcgtgtgatttacgaaacgcaggttccggctggaccgtttcgtattcaggatctcggtgattccgtctccgcatggctggtggcacataaggatgatatagagcgcaattaccggggaccactggtacaagttgttgggtggtgtgacgccattttcggcgcaggttaatgctatcaaaatgtcattgcgtaagctggaaattaatggcaaagacgagcagggtttactgacagtggggactgtgcactccttgcagggggcggaaagggcgattgttctcttttctcctgtctactcaaaacatgaagatggcaggtttcttgatagcaacagcactatcctcaatgttgctgtctcacgcgctaaagatagttttctggtatttggcgatatggaccttatcgagatgcagcccgcattttcgccgcgagggttattggcaaaatatctcttttcttcagataataatgcgttgcaatttgagtttcagaaacgacaggatttaatttccgcacatacacaaatttcaacgctgcatggtgtggagcagcatgatgaatttttgaacaagactcttgccggagctcaaaatcaagaagccgatccaaccagagacagatacataaataccttccctacatcaccgaagttttcaacgcaagggtcacactgcgtaccgcccgctggcgcgggggaagaagagctggaacagatgatccgccgtcgtgaatttggcgaaggtgaacaattaccgtctgaacgcgaactgatggcgttctttaacgtcgggcgtccttcggtgcgtgaagcgctggcagcgttaaaacgcaaaggtctggtgcaaataaacaacggcgaacgcgctcgcgtctcgcgtccttctgcggacactatcatcggtgagctttccggcatggcgaaagatttcctttctcatcccggtgggattgcccatttcgaacaattacgtctgttctttgaatccagtctggtgcgctatgcggctgaacatgccaccgatgagcaaatcgatttgctggcaaaagcactggaaatcaacagtcagtcgctggataacaacgcggcattcattcgttcagacgttgatttccaccgcgtgctggcggagatccccggtaacccaatcttcatggcgatccacgttgccctgctcgactggcttattgccgcacgcccaacggttaccgatcaggcactgcacgaacataacaacgttagttatcaacagcatattgcgatcgttgatgcgatccgccgtcatgatcctgacgaagccgatcaccaccaacaaaaagaaataatatcgttgctgacctgtgcggcggagtgcattaccgaagagggatttttctgcgtagtgctgccagagcagattggtaatggttttacggagctggcattaagcatgggctggcatttacgtttgcggacggatgtggcggaaaacgaagcgcgactgccgcatcgggtgctgctggcattctccccgcaggcgggagaatgctttagcgatcgcttagtcattcgtgggccagaccagaactattccgaagcgtatacggcgctgacccaggctttttatctgtttatgtaa

SEQ ID NO: 28720 - DNA, 1311 bp, Homo sapiens
  SIMILAR (702)..(4): 991254mologous to Escherichia coli tryptophanase,accession number K00032,Smith-Waterman Score=1219.
tcagatatgcggcaacagtttaccggcatcaacgaatgccgcgtgaccgcccgcctgctggcagacaacgccaatctcttccagaccatcgaccagatactgtacctgcgcgatacgataagccagccagtcgagattcatgccgtcatacagacctaccgccagacgctccatcgcgccgccttccaggccgccatatgtcgggaagccttcctgcaccacgcaaagggttctgcactcggtgtacacatcaaagaagctgtcgtctttcatgcacagcaggccgcccatcggcaccatcgcatctttcttggcggacatcgccagcatatcggcatatttgtaggtttcgcgggtgatctgctcgatggtccagtctttgtattctgcttcacgctgcttgatgaaataggcgttttcagcaaagcgcgcggagtccattaccaccggaatatcgtatttcttcgcgatgctgtacatcgcttttaagtttgccagtgaaaccggctgaccacctgcagagttactggtgatggttgcaacgatatacggcacgttattcggaccaacttcttcaataccgcgttctaatccctcaaggtcaaagttgcctttaaagtcgtaacgcacgcccgtatcgaaggcttctttgatatagacgttacgcacggtacagccgttgatctggctatggccggccgtgatcgtgatcctggccggccgttgtggttggggtcggtcaagtcgaacatcggtcatacgcaagcggcggcgggtgtggctggtgtgatcaagatggtgatggcgatgcggcacgggcagctgccacgcacgttgcacgtggaatcgccgtcgccggaggtggattggtcggcggggacggttcaactccttacggagaacacgccctggcccaggagtggtcgtgttcgtcgggtgggggtgtcgtcgttcgggatcagtggtactaacgcgcacgtcatcctcgaacagcccccgggagtgccgagtcagtctgatgtctcctcgctggatgttgggtactcgctggcgttgacacggtcggcgctggatgagcgagcggtggtgctggggtcggaccgtgaaacattgttgtgcggtgtgaaagcgcttgtctgcccggtcatgaggcttctgggttggtgaccggatcttttggggcttgggggcgcatcgggtttgtgttttccggtcaaggtggtcaatggcttgggataggccgggggctttatcaggcttttccggtgttcgctgctgcctttgacgaacttgtgccgagctggatgacat

SEQ ID NO: 28721 - DNA, 284 bp, Homo sapiens
  SIMILAR (185)..(69): 401254mologous to Xylella fastidiosa ribonuclease III,accession number AE004037,Smith-Waterman Score=63.
atggtgtacacacccagaacaccaattgctgtacgtgtcgatctccactatcccaaaatagttgataacggtgacaatatctgttgcttccctaacctggaacctggggtgatatcccggatgcgtgaatccctcagagctaagctggaggctgaccgtacccgtaagccttccaacctgggccaaaaaccttcccggcccttccgccaaaggtttccaaaagtggaatttttcccctggccctttaagcccttccgcggaagtaagcttggggaattaaccag

SEQ ID NO: 28722 - DNA, 1188 bp, Homo sapiens
  SIMILAR (541)..(1188): 961254mologous to Escherichia coli K12 probable flavoprotein subunit, carnitine metabolism,accession number AE000114,Smith- Waterman Score=1016.
atgaaggattatgtaatggaaaactttaaacatctccctgaaccgttccgcattcgtgttattgagccagtaaaacgtaccactcgcgcttatcgtgaagaggcaattattaaatccggtatgaacccgttcctgctggatagcgaagatgtttttatcgatttactgaccgacagcggcaccggggcggtgacgcagagcatgcaggctgcgatgatgcgcggcgacgaagcctacagcggcagtcgtagctactatgcgttagccgagtcagtgaaaaatatctttggttatcaatacaccattccgactcaccagggccgtggcgcagagcaaatctatattccggtactgattaaaaaacgcgagcatgaaaaaggcctggatcgcaccaaaatggtggcgttctctaactatctctttgataccacgcaaggccatagccatatcaacggctgtaccgtgcgtaacgtctatatcaaagaagccttcgatacgggcgtgcgttacgactttacaggatattgcgccaatacgagcgtcaacgctattgaagcggcttgccagctaaagcaacaggcagcagaggcgcaggtgacagccttaagtgtgggcggtaaagccctgaccaacgccaaagggcgtaaagatgtgctatcgcgcggcccggatgaactgattgtggtgattgatgaccagttcgagcaggcactggcgcaacaaacggcgagcgcactggctgcagccgcccagaaagcaggctttgatctgatcctctgtggcgatggttcttccgacctttatgcccagcaggttggtctgctggtgggcgaaatcctcaatattccggcagttaacggcgtcagcaaaattatctccctgacggcagataccctcaccgttgagcgcgaactggacgatgaaaccgaaaccttaagcattccgctgcctgcggtagttgctgtttccactgatatcaactccccacaaattccttcgatgaaagccattctcggcgcggcgaacaagcccgtccaggtatggtcggcggcggatatgggttcaaacgcagaggcagcctggtcagaacaacaggttgccgcgccgaaacagcgcgaacgtcagcgcatcgtgattgaaggcgacgtggaagaacagatcgccgcatttgctgaaaatcttcgcaaa

SEQ ID NO: 28723 - DNA, 878 bp, Homo sapiens; identical to SEQ ID NO: 24376
  SIMILAR (422)..(877): 991254mologous to Escherichia coli Citrate lyase alpha chain (acyl lyase subunit) (citF) homolog,accession number D90702,Smith- Waterman Score=773.

SEQ ID NO: 28724 - DNA, 2439 bp, Homo sapiens
  SIMILAR (1398)..(706): 811254mologous to Escherichia coli FimD protein,accession number D90732,Smith-Waterman Score=984.
ttattgatagtgttttatgttcagataatgcccgatgactttgtcatgcagctccaccgattttgagaacgacagcgacttccgtcccagccgtgccaggtgctgcctcagattcaggttatgccgctcaattcgctgcgtatatcgcttgctgattacgtgcagctttcccttcaggcgggattcatacagcggccagccatccgtcatccatatcaccacgtcaaagggtgacagcaggctcataagacgccccagcgtcgccatagtgcgttcaccgaatacgtgcgcaacaaccgtcttccggagactgtcatacgcgtaaaacagccagcgctggcgcgatttagccccgacatagccccactgttcgtccatttccgcgcagaggggatcctttctgggggggaaatccagcgatggctggattatgtcgtcaattaaaaatgcggcgagtagattagcaaatatccacgctttcgcgagttcaggttcctttgcacgcaaagcatccaggtgcagcaaacttttgagccgcttaaaagccagttcaatttgccatcgcagacggtaacaatcagccacttgctctgctgaatattcatcttccggtaatgatgttagcaatagcacatggcccgctgcttccagcgtttccgcctgaactactcgtccttttcgacgattctcgctgagcagtcgggttttactgattaatgactgcagtttgccacgtttggtgtaaagcaaattgtaataacgcgaccacatcggcgtatcttcatcatcaccgtcattaaattcgtagccatccatatgtttatacatggtgtcggaaagggtgtagaaacccgacgtcgaatagcgatagcccatcaattgaaagttagtgcccaagtggttgagcgttttggcatacagaaaacgatatgactgacctttatgttcgctttgatctgctagcgtactcttcgcctgggtcgcatcgaacgaaattgctccgaaatcgccgaggttaaatcccagaccaaacatggcggcacggtaatattcagcatattgtccaccaccataccaggtcgttccccacggtccgccccactgcaacgtggcctgggcaaatttgctctcctgctgttcattactattggttctgtatttcgccagtgtcaccgcgtatttgattcgcccctgacgctggagtaatggcacactggagaacggtacgctgtagctattgacgctgccgtccgcggcgaacgcgttacgtttaatgttgtcgtcggtgacggcagatggccagaggacatcttcaatacggaaagagccagatttgtaatatgccagttccgcgctgttctggtctgcggttacagccaggatgcccattgccgcgccagcatgagcaccatcccagacggtcagcttgccagaagtggcatccagcatgagcggcgtcatggccctccccaacatcaagccaagccagattttaatgtgtttacttattgtctgtcttccccagtgaaatgtacgcttcatttcctccagcaccttaagacggggatctctagagtcgattccagcgagttcaacacccagcgcgttgagtgcctggaactggataacctgatggaaacggcgtatgcaacggctgtttctgccaacttccgtaccgaaagccgtggcgcgcatagccgcttcgacttcccggatcgtgatgatgaaaactggctgtgccactccctgtatctgccagagtcggaatccatgacgcgccgaagcgtcaacatggaaccgaaactgcgcccggcattcccgccgaagattcgtacttataatgcggagacaggaaaatgagactcgagttttcaatttatcgctataacccggatgttgatgatgctccgcgtatgcaggattacacccgttctggcttaaatcgacacggttttgtacccatatccttgcgcctgcgacggcaatcagcccgaacacaacaattgatgcaccaccaataaccgcggccggaatggtatgaatcagcgcaccaaatttcggtgaaaagcccaacagcatggcgatgacggcagcagcaacaaacaccagcgtcgagtagactttggtcacggccatcacaccgatattttcagcataggtggtcacgccgctaccgccgacagagccggaaagcatcgttgccagaccatcgcctacgaatgcccgccccatatacgggtccatattgcgtccggtcatcccggcgactgccttgagatgacctaagttttccgccaccagaatcaccgccacgggcgcaatcagcatcattgcctgaccattaaaagcaggagtggaaaaatgtggcagaccgaaccaggcagcatggctgacgagagtaaaatcgacggcttttcccggggatcctctagagtgcga

SEQ ID NO: 28725 - DNA, 6231 bp, Homo sapiens; identical to SEQ ID NO: 13733
  SIMILAR (4291)..(4734): 801254mologous to Pan troglodytes prot GOR,accession number D10017,Smith-Waterman Score=617.

SEQ ID NO: 28726 - DNA, 2173 bp, Homo sapiens
  SIMILAR (1771)..(953): 1001254mologous to Escherichia coli Citrate lyase beta chain (acyl lyase subunit) (citE) homolog,accession number D90702,Smith- Waterman Score=1366.
aggggatccatcgcaggttcgggtgaccgtcgaaagtaatgccaaacagatcccaggtttcacgctcataccagttagcgttcgggaacagtttggtgaaggtcggtacgtgcaggtcgttttctgccagcgccaccttcagcatgatgtcgcggttacgatcgatagaaatcagatggtagaaaacggaaaaatccgcggcaggtaacccttcgcggtgtgtgcgcagacgttcgtccatgccgtgtaagtcaaacagcatgacgtaaggtttcggcagtttctttaagaaatcgccaacttccagtaattgttcacgcttgatccacacaacgggaaccccggtgcgagtcgcctgaacagtaaaggcatccggcccaaaacggttgcgcagttcgccaatcaccggatcatcaagatgatcgcgggtctgccaggcgggttcttgcgcggttaagtcggtcatattgttcaccattgcaaatggtccgtggtgactgtcggcgcagtaagcacgggagatctcttccgccagtggaccacgcaggccggaggtataaatgcgggtaaccacgccctggcgaatgtgttctaccagcggcgcatggcaatcactcagggagctggacgccagggtcaggtttttaaagcccatcttcgcgatgacgtccatcaccatattgacggtcaggtcaccgccacggaaagcgtgatggaaggaaaccgtcatgccgtcctgtaaaccagagcgacgaatcgcttcttccaggttggcgcacagtttgcgatcgcgcgctttttcagcctggtaggtttgctttggcgagttctggaaagcggcaagatcgcattcagcgcgacgattccaggccgctacccgttcttgtcgttgagattgttcaattttctgcgtcattttgattgccttattcttcgcggatgccggaaagttcagacgggcgcgatcgataaccggaccgtccaccatcttgccgttcagggaaaccacgccgaggccttcgcgagcggcggcttcagcggcttctacgacgcggcgggcgtgatccacttctttctgggtcggtgcgtagaggttgtgcagcagatcaatctgacgcgggttgatcagcgatttgccgtcaaagcccagctgtttgatgtgggcggcttcttgcagaaatccggcttcgttgttagcgtcggaatagacggtatcgaacgcctgaatacccgcagagcgcgcggcctgcaaaatggaacagcgtgcgaacagcagttcagttccttccggggagcgttctgtacgcaggttgcgcacatagtcttctgcaccgagggcgataccgatcaaacgctcggaagcgtgagcgatttccactgcgcgggtaatccccagcggagattcaatcgccgccagcaggccggtgctgccgggttcacgaccacaggctttttcgatacgcaggatctctttttcaatatccagaacatcctgagcggtatcggttttcggcagacgcacaacgtccgcaccaccgcgaacgacggcttccaggtcgttaacaccccattcggaatccagcgcgttgacacgcacaatggtttcaatatcgcgatacagcggatgttgcagcgcgtggtaaaccatgcggcgggcggtgtctttttcacgcaatgctacggagtcttcgaggtcaaacatcagggcatcagccgggtagatgaaggagttgctgaccatcgcggcattggcaccaggcacaaacaacatgccgatatagacatgaaagccagccagcgaaaaaccaacataaattgcagcgataatcacgacggctaagagacaatccagcagcgatgaccagccgaccataaatccgacgtgcgggttaatcgacttttgcgcgtaggtataggccgaaccggcctccggaaactggcgaaccagtttgccgtagctgatagcggtaaacagcacacccgccagcgccagcaaataggacgccggaacgtgaccgtcgctaatgccggagacaataccaaaagtatcaaatacggtcatcggcgtgagataggccagacccatcatcaccacctgccacaatttcagtgattttcgcagacgggttttgccgggttgcgcagcaatattcagtggtgaattaatagccat

SEQ ID NO: 28727 - DNA, 2919 bp, Homo sapiens
  SIMILAR (1525)..(2109): 1001254mologous to Escherichia coli aceF,accession number V01498,Smith-Waterman Score=974.
atggatggctacgaatttaatgacggtgatgatgaagatacgccgatgtggtcgcgttattacaatttgttttacaccaaacgtggcaaactgcaggtcaatatctcccagcaattaggcgagtacggttcgttttatttaagtggtagccagcaaacttactggcatacggatcaacaggatcggctattacagtttggctacaaggtgtatctgtatctctcctcgatgagaaatccttggggaaacgaaggaaactccgcccgtccaaaatgtgccccccccggtatacgtccggtcccggccctgaaacaagagttctcccaagaagagctcccctcaccaccaagaggttatatgcagccagagaaaaaaaaacttcgtccggactggaataaaaagggctccggaatgggtgggttctgggtctcactgacttcaaaaatgaagccgcggacccttgcgctctatggagcagataatataattatcccattttacagacaagaaaacctggaacctggggtgatatcccggatgcgtgaatccctcagagctaagctggaggctgaccgtacccgtaaggtgcgtgaggataaacgcatttaccgttgccctttatttattatatgggcgaaagagtattctgaatcagacgcttactaccacctcggggattacgatcaggacgataaccttagagggatgatcacaggagcctggtacagcgccctgagactggagagagacgatcaccctggtctggtccattttcctgaaaactgtaagtatgtgctagacaccaatagtactgacttccagcagaactaccaggcgctgttaacccgactggactacctgaccaaagttgaaagcaaagtgtttggtgaaggagaccgtaacttcggctgtagccaaatcgaactggccgtggcgcagagcaaatctatattcctggtactgattaaaaaacgcgagcaggaaaaaggcctggatcgcagcaaaatggtggcgttctctaactattactttgataccacgcagggccatagccagatcaacggctgtaccgtgcgtaacgtctatatcaaagaagccttcgatacgggcgtgcgttacgactttaaaggcaactttgcacttgagggcattagaacgcgcaagttggtccgaatcaacgtgccgtatatcgttgcaaccatcaccagtaactctgcaggtggtcagccggtttcactggcaaacttaaaagcgatgtacagcatcgcgaagaaatacgatattccggtggtaatggactccgcgcgctttgctgaaaacgcctatatcatcaagcagcgtgaagcagaatacaaagactggaccatcgagcagatcaaccgcgacaactaccaatatgccgatatgctggcgatgtccgacaagacagatgcgatggatgacgaatgggtgactcaaaacgcgaccagacataaccgaaataaaatccgacctacgaagcaaaaacgaaacagaacgcgacccgagttggaagcgttccgtaaacagcagaacgaagaagcggcgaaacgtaagctggatgtgaagatcaccccggttgtcttcatcatgaaagccgttgctgcagctcttgagcagatgcctcgcttcaatagttcgctgtcggaagacggtcagcgtctgaccctgaagaaatacatcaacatcggtgtggcggtggataccccgaacggtctggttgttccggtattcaaagacgtcaacaagaaaggcatcatcgagctgtctcgcgagctgatgactatttctaagaaagcgcgtgacggtaagctgactgcgggcgaaatgcagggcggttgcttcaccatctccagcatcggcggcctgggtactacccacttcgcgccgattgtgaacgcgccggaagtggctatcctcggcgtttccaagtccgcgatggagccggtgtggaatggtaaagagttcgtgccgcgtctgatgctgccgatttctctctccttcgaccaccgcgtgatcgacggtgctgatggtgcccgtttcattaccatcattaacaacacgctgtctgacattcgccgtctggtgatgcaaacgggaagccgacggtacatggataatcagcggtatccatcgccgccacaatcaggttgtaaccaccagattttcaatggatttaatgcgctcgacgttggcgatactcatggcatttttatcccatgcgtcaacatcataaccattggctgccaggtaaagactgttacgaccattgccacagcccagatccagcgttttacccggtttaaccacttttcacgcttccagtacttcagaaactcgccaaagcaaacctaccaggctgaaaaagcgcgcgatcgcaaactgtgcgccaacctggaagaagcgattcgtcgctctggtttacaggacggcatgacggtttccttccatcacgctttccgtggcggtgacctgaccgtcaatatggtgatggacgtcatcgcgaagatgggctttaaaaacctgaccctggcgtccagctccctgagtgattgccatgcgccgctggtagaacacattcgccagggcgtggttacccgcatttatacctccggcctgcgtggtccactggcggaagagatctcccgtggtctgctggcagaaccggtgcagatccactctcacggcggtcgtgtgcatctggtacagaacggcgaactgaatatcgacgtggctttcctcggcgtcccgtcctgtgatgaattcggtaatgccaacggatacaccggtaaagcctgctgcggatccctcggctatgcaatagtcgatgccgacaacgcaaaacaggtcgtgatgcttaccgaagaactgctgccttatacggataatccggaagcctga

SEQ ID NO: 28728 - DNA, 2004 bp, Homo sapiens
  SIMILAR (391)..(978): 981254mologous to Escherichia coli K12 pyruvate dehydrogenase (decarboxylase component),accession number AE000120,Smith-Waterman Score=1019.
atgtccagagcaggaatgcttggggtggtgtgtgctttgctcgtctgggcttatctggccgtggggaagctggttgtgcggatgacgttcactgagctgtgcacgcatcatccatggagtctccgatcctcgacgttcgcgaacgccaggaacagcaagagcaggaagccgctgaattacaagccgttaccgctattgctgaaggtcgtcgttaatcacaaagcgggtcgcccttgtatctgtttgaaagccttgaaattgatgaccaaccacggcggcggcaactttaagaaacagtttgcccgtgctgataaatggggtgcccgcgttgctgtggtgctgggtgagtctgaagtggctaacggcacagcagtagtgaaggatttgcgctctgaacgtttcccaaatgacgtggatccgatcgaaactcgcgactggctccaggcgatcgaatcggtcatccgtgaagaaggtgttgagcgtgctcagtatctgatcgaccaactgcttgctgaagcccgcaaaggcggtgtaaacgtagccgcaggcacaggtatcagcaactacatcaacaccatccccgttgaagaacaaccggagtatccgggtaatctggaactggaacgccgtattcgttcagctatccgctggaacgccatcatgacggtgctgcgtgcgtcgaaaaaagacctcgaactgggcggccatatggcgtccttccagtcttccgcaaccatttatgatgtgtgctttaaccacttcttccgtgcacgcaacgagcaggatggcggcgacctgttttacttccagggccacatctacccgggcgtgtacgctcgtgctttcctggaaggtcgtctgactcaggagcagctggataacttccgtcaggaagttcacggcaatggcctctcttcctatccgcacccgaaactgatgccggaattctggcagttcccgaccgtatctatgggtctggcgagcaccctgaaacgtcgcgagcgcatctcggcccgtctgggggatattttaagccatctctacctcgcctctgtcgtgctgaagcgttatgactacgaaggccgtaatgaagccgacctggcgatagtgcactggggcgtacaacatgcgctgtatcacgctgaacaggcgatggatgatttactgcaaaacttccccaaccgcgtggttgccgggctgctgaatgtggtgatcttacctaccggacgtcattatctggcaccttctgacaagctggatcataaagtggcgaacattttacaagtgccgaacgccacccgttcccgcattggtcgcgggcagtacctgacgccgagcgagcataatccggttggcttgctggaacaaactctagtggatgtgattgccgacgacccaattcatcaaccggatctgaaaagagctggggaaaaacctgccgttacccgtctggatgaactggcgcacaacgcgcgaggatccccatccgcattgaaaccagagacacaaaacgcgcagctgacccactgcacgacctgcgtagcaagccgttttctgaacacatccagcccgttcggtatcggcatgaccttcgattacacggagtgctgggaaattggtgttcgtgacgactgcctggtaatgacacgcgttaagccggtgcatccagaatatgcgaagcactggaacatgaaaggcgtcatgaatgacaaaacccgcttccacgccgacaagtgggtagggtacagcaaggtgcttgcctgggtgagcttatcgcacaaagacaccttcacgggtgcgaaacggtttcaatacttccaaacgatgtacgacatggaacggcaaatcaacgcaaacctgccggttggcggcctttccaacgttgacacagagcgaactggcaaactgttccaacgcgatgacttttctgaggatagtcatgccaacgatccgaagttggttggtgatgattacgttccccaagcaccggagcaaaataactga

SEQ ID NO: 28729 - DNA, 638 bp, Homo sapiens; identical to SEQ ID NO: 24718
  SIMILAR (636)..(565): 1001254mologous to Escherichia coli histidine-tRNA synthetase,accession number M11843,Smith-Waterman Score=120.

SEQ ID NO: 28730 - DNA, 2325 bp, Homo sapiens
  SIMILAR (2223)..(1807): 981254mologous to Escherichia coli was o492p and o826p before splice,accession number U28375,Smith-Waterman Score=774.
ctaagtgtggtgacatacacatatggtcctagctattcgggaggctgagttgggaggagagacagagcatgggaggtcgaagaggcagtgagcttcagtaaaatcgacatctgcaatttgcggtgaagccaccagcaccagtgattgttcacccaactctcgtcgattcagagcatcatcattccctacacgataaaagacgccaacatcggcctcatcattcagtagcgcatcacggatcacgtaacagttcagcgactgcaacgataaacgcacttttggggcgcgttgccgaaaacgctgcaacacctgcggcattcggtaagagagcaacgtttcgcccgaaacaacgcgtagttccccgtccggatctgactcctttttggcagcctcacgaagcgtatccatcactcgggtaagttcataaatgtgcggcagcaacttttttccttcgcgggtaaggcacatccgtcggccaattttctcaaataactggactgaaaactcctgctcaagcgttttttccctggcgatatttgtggacttttggaaaatgtttcttggggcctgcggggggatattttttaacgaatttttctcccaataaggtccccaattaaaatcgggggttcccctgttgctggctattacgttaatccggaatttaaagccgatcctgttgtcgatatatacctgcgtggcttcaggtcgctgaatacacaaatctagcgcgctataggcaattagcatgagcatgagaacgaaaacgaccaggtagaagcggttaaacgcttttttgctgaaaatggcaaagtgctggctgttggggtgattttgggcgttggcgcactgattggctggcgctactggaacagccatcaggttgattctgcacgctccgcttctcttgcctatcaaaatgcggttaccgcagtgagcgaaggcaaaccggatagcatcccggcggcggaaaaatttgctgctgaaaataaaaatacttatggtgcgctggcttctttggaacttgcgcacattttgttgaccacaatgaactagagaagctgccgcccagttacaacaggggctggcaacacgacgatgaaatctcaagcgtgaaaatctgcgcttcaaacgtttctggcgatggtctactcggtcatcgtcgttccaggtatgttgggtaaagcaggcttcccgcctgcggcagttttcgttgcaacctgtctggttgccggactcggttctatcgtgatgggtctgtgggctaatctgccgttggcgattggttgcgccatctccctgacagcgtttaccgcattcagcctggtgctggggcaacatattagcgtacctgtcgcgctgggtgccgtgttcctgatgggtgtgctgtttacggtaatttctgccacgggtatccgtagctggattttgcgcaacttgcctcacggtgtggcgcacggcacggggattggtatcggtctgttcctgctgctcattgccgctaacggtgtcggtctggtgattaacaaccgcttgatggtctgcccgttgcgctgggtgatttcgcgaccagagatttttcagcgttgagatgaaatccgggcaaggggcgatgtttgccataattccgcgggaaagccccgagtaaaaatggttgtgcgagcagacaatccctggcatcacaatccggccatgcatctctttgaagctggcgtcggggtagcgttgcgtcagggcatcgccgatagcgacaatcacatcgttttcgatggcgatatcaacgccttcctgcacttttgccgggtgtagctccacgcggcccagcagataatgatgatgctggtggacatggctgatgatgcggcacatatcgttcagctccggtggtacgttgttaaactgacctttgctgtcgatgtttaacacccagctttggttattcagacgtactcgtacccggcaatcttccacaaggaagcctgggttgctgctgttatcaaagtcttgcgccaggctgaagacggtgattttgtctttgtacggtttaccgttccacggacagaactgagcgcagttgccgcattcgttacagtaagcgtcgaggtgcagcgtctggaaacggttctggaagcctgggaccgcaatggagacgttggcgcggttcgggcagacatccacacacttgctgcaaacgtatttacattcgaggcaacgagcggcttcagctgggtttcttgcacatccagacttcacatcccgccttgtgcatacagactgggagtcccttgggtagcgggggacaggaatgggattggctttggccat

SEQ ID NO: 28731 - DNA, 950 bp, Homo sapiens
  SIMILAR (567)..(902): 941254mologous to Escherichia coli K12 putative flavodoxin,accession number AE000355,Smith-Waterman Score=570.
atgaccaaccacggcggcggcaactttaagaaacagtttgcccgtgctgataaatggggtgcccgcgttgctgtggtgctgggtgagtctgaagtggctaacggcacagcagtagtgaaggatttgcgctctggtgagcaaacggcagttgcgcaggatagcgtaccgcgcatttgcgacgttactgggttaaggaaggagaaggacagcgtggaaatttacgagaacgaaaacgaccaggtagaagcggttaaacgcttttttgctgaaaatggcaaagcactggctgttggggtgattttgggcgttggcgcactgattggctggcgctactggaacagccatcaggttgattctgcacgctccgcttctcttgcctatcaaaatgcggttaccgcagtgagcgaaggcaaaccggatagcatcccggcggcggaaaaatttgctgctgaaaataaaaatacttatgtgtctttcgatgcgcatatcgcatctcgctgggcgaatgcacgagctagacgcacttatgagcgtggcactatcgtacgacgatcgatgagcactacgtgcgtgattttcacggcacggaatataaaacgttgcgcggcagcagctacaatagctacttcatccgcgaagaaaaaaacgtgctgatcgacaccgtcgaccataaattcagccgcgaatttgtgcagaacctgcgtaatgaaatcgatctggcggatatcgattacatcgtgattaaccatgcagaagaggaccacgctggggcgctgaccgaactgatggcacaaattcccgatacgccgatctactgtacagccaacgctatcgactcgataaatggtcatcaccatcatccggagtggaattttaatgtgggcaggaaaggaaacaaactcccagcccatggagaacccgacgtctcaggccgcctttcagtccactga

SEQ ID NO: 28732 - DNA, 500 bp, Homo sapiens
  SIMILAR (373)..(185): 771254mologous to Homo sapiens Human secreted protein, SEQ ID NO: 4889,accession number G00808,Smith-Waterman Score=285.
  misc_feature (1)...(500): n = a,t,c or g
agttacataggccaacttctccacacacaaagctgtcacatgattttatttcaggagaagctttcttctcctggaagttcagcctgtcatctggaacctgggtaaaagtttctccacaatgactgtcatctttaatttcattgactttctcttctatgagactcctgaagtttctcctggggttttggtactcatattcaatgttctggtctttccaactttttcctacagaggtcaggttcctgaaagtttccagcatcacttccttgtagagtttcctctgggaaatatccagcaaagcccactcctccatttcctggctttaagatgtcccggggtcctctatacacctcctgtgactacagcagggcatagcgtaggtgacagagtgacagaagcctgggcagaggaaccaggtccctctcggggctggaaagaccggatcccctcgtgccgaagtccgcagagggtcatttnnnnnnnnnctgncnncgtcccct

SEQ ID NO: 28733 - DNA, 407 bp, Homo sapiens
  SIMILAR (354)..(61): 921254mologous to Escherichia coli yojB,accession number U00008,Smith-Waterman Score=467.
  misc_feature (1)...(407): n = a,t,c or g
ggtgcgtcatcgtcgtgacttgntatccctgcgttacccacttatcgcctttctcacaaanggnanaannngngggacaaagtggggggtgcccgccgacagaccagaggccatcgtcgacagttttaaggtgtcgtaagggcaagcctgaacacactgaccgcaacgcacacaggcactggcaaaggcgttctcgtttatggctccgggcgggcgcaaccgcacgccagatgcgcgtgcggtttgctgttgtaaccccagcgccacacccacggcagccagcccgcctgctgtgcgaacgacatcgcgcagaaagcggcggcgaccattttgaggtttcgctgaccgggacataatggcttacaccttctccagtttgaccgcgcacttcttgaagtccgtctctg

SEQ ID NO: 28734 - DNA, 3342 bp, Homo sapiens
  SIMILAR (499)..(3309): 471254mologous to Homo sapiens zinc finger protein,accession number L11672,Smith-Waterman Score=2435.
atggagggggtcgctttcctcaccttcctcgctgcgcgggcggcggttggtaaccgccccgcgtctccccagattgtgcggaagcaacgggagggtcatggaggcatcctgactcgggacccagtggcctttgatgatgttgctgtgaacttcacccaggaggagtgggctttgctggatatttcccagaggaaactctacaaggaagtgatgctggaaactttcaagaacctgacctctgtaggaaaaagttggaaagaccagaacattgaatatgagtaccaaaaccccaggagaaacttcaggagtctcatagaaaagaaagtcaatgaaattaaagatgacagtcattgtggagaaacttttacccaggttccagatgacaggctgaacttccaggagaagaaagcttctcctgaagtaaaatcatgtgacagctttgtgtgtgcagaagttggcataggtaactcatcttttaatatgagcatcagaggtgacactggacacaaggcatatgagtatcaggaatatggaccaaagccatataagtgtcaacaacctaaaaataagaaagccttcaggtatcgcccatccattagaacacaagaaagggatcacactggagagaaaccctatgcttgtaaagtctgtggaaaaacctttattttccattcaagcattcgaagacacatgaactcacactgggagaagccctatgaatgtagcaaatgtgataaagcatttcatagttctagttcctatcatagacatgaaagaagtcacatgggagagaagccttatcaatgcaaagaatgtggaaaagcatttgcatataccagttctcttcgtagacatgaaaggacccactctgggaaaaaaccgtatgaatgtaagcaatatggggaaggcttatcctatcttataagttttcaaacacacataagaatgaactctggagaaagaccttataaatgtaagatatgtgggaaaggcttttattctgccaagtcatttcaaacacatgaaaaaactcacactggagagaaacgctataaatgcaagcaatgtggtaaagccttcaatctttccagttcctttggatatcatgaaaggattcacagtggagccaaaccctatgagtgtaagcagtgtgggaaagccttcagatctgcctcacagcttcgagtgcacggtgggactcacactggagagaaaccctatgaatgtaaggaatgtgggaaagccttcagatctacctcacaccttcgagtgcatggtaggactcatactggagagaaaccctatgaatgtaaggaatgtgggaaagccttcagatatgtgaagcaccttcaaattcatgaaaggacagaaaaacacataagaatgccctctggagaaagaccttataaatgtagtatatgtgagaaaggcttttattctgccaagtcatttcaaacacatgaaaaaactcacactggagagaaaccctatgaatgcaaccaatgtggtaaagccttcagatgttgcaattcccttcgatatcatgaaaggactcacactggagagaaaccctatgagtgtaagcaatgtgggaaagccttcagatctgcctcacaccttcgaatgcatgaaaggactcacactggagagaaaccctatgagtgtaagcaatgtgggaaagccttcagttgtgcctcaaaccttcgaaagcatggtaggactcacactggagagaaaccctatgagtgtaagcaatgtgggaaagccttcagatctgcctcaaaccttcagatgcatgaaaggactcacactggagagaaaccctatgaatgtaaggaatgcgaaaaagcattctgtaaattctcttcttttcaaatacatgaaaggaagcacagaggagagaagccctatgaatgtaagcattgtgggaatggattcacatctgccaagattcttcaaatacatgcaagaacacacattggagagaaacactatgaatgtaaggaatgcggaaaagcattcaattatttttcttccttgcatatacacgcaaggactcatatgggagagaagccatatgaatttcctttcagtatcatgaaaaaactcacactggagagaaaccctatgagtgtaagcaatgtgggaaagccttcagatgtgccccacaccttccgatatcatgaaagaactcacactggagagaaaccctatgagtgtaagcaatgtgggaaagccttcagatcttcctcactccttcaattgcatggtaggactcacactggagagaagccctatgaatgtcaggaatgtgggaaagctttcagatctatgaagaaccttcaaagtcatgaaaggacacaaacacacgtaagaatacactctggagaaagaccttataaatgtaagctatgtgggaaaggcttttattgtcccaaatcattgcaaagacatgaaaaaactcacactggagagaaactctatgaatgcaagcaatgtggtgaagccttcagtagttccagttcctttcgataccatgaaaggactcacactggagagaaaccctataaatgcaagcaatgtgggaaatcttttagttattctgctacccatcgaatacatgaaagaactcacattggacaaaagcattatgaatgtcaggaatgtgggaaagcattccatagtcccagatcctgtcacagacatgaaaggagtcacatgggagagaaggcttatcaatgtaaggaatgtggaaaagcattcatgtgtccccgttatgttcgtagacatgaaaggacccactctaggaaaaaactttatgaatgtaagcagtgtgggaaagcattatcctctcttacaagttttcaaacacacataagaatgcactctggagaaagaccttatgaatgtaagacatgtgggaaaggcttttattctgccaagtcatttcaaagacatgaaaaaactcacagtggagagaacccgtataaatgcaagcaatgtggtaaagccttcactcgttccggttcctttcgatatcatgaaaggactcacactggagagaaaccctatgagtgtaagcaatgtgggaaagccttcagatctgccccaaatcttcaattgcatggtaggactcacactggagagaaaccgtatcaatgtaaggaatgtgggaaagctttcagatctgcctcacaacttcgaatccattgtaggattcaccctggagagaaaccctatgaatgtaagaaatgtgggaaagccttcagatatgtccagaactttcgatttcatgaaaggacacaaacacataagaatgcactctggagaaagaccttataa

SEQ ID NO: 28735 - DNA, 534 bp, Homo sapiens
  SIMILAR (252)..(383): 361254mologous to Gallus gallus high mobility group protein HMG-17 (AA 1-90),accession number Y00416,Smith-Waterman Score=71.
atgatggaagatgaaaggcttgccctgcacttcaaaggtacagctgagctcgggcagacaaaaggaaagcaagcccagtgccagagcagcacgaagagcaccttccagcgaggccggtcactcagaggtgtctcacctaccctttccccaacatcacaacagcctcggaatttggaccagcaactggcttcagagcaaggagaagtgggagaggctccactgtgtgctgtaatccagggtgttatccccgtgctaggccggagccggagccgcgaggaacaccccccagtgtcagcgctccccgggctgcacaggaagcgccagcgagacaaagaggccgggcctgtgctcgctgacacggtgcccttccggccccacgcgggaaaagggacatttctccgctgtttggaaacgctcactcggcgagccccaaaccctcgctggacctttgggctccccctccgtaagctgcagggcgccgtggcccacagcaggcctgagatccgaacacactcggtgccgaaccgaacctaa

SEQ ID NO: 28736 - DNA, 779 bp, Homo sapiens
  SIMILAR (395)..(3): 961254mologous to Escherichia coli yejZ,accession number U00008,Smith-Waterman Score=668.
gtcgcagactgattgagggcaaagcgcctgcgttttctgttcgctaagtcggcaatcgggttcagcgggcagacccagctgcaaaataatcgctttcccgccagggcgtatagcacggtgataatcaccgcaccggtcaacgccaccgtggcaggcagatgaccactggcaagactttgcagcgtcatcagcggatcggtcagcggaacggtgtcgaataacaggctactgctgtagttgccgtgcaagatccacacaccaaaccatggaccgctcaaaaacatccccagcacgaagaactgacaaaggcgacgtaacaccagccaacggtgactgcgccaccagccttttttctccagcgcctcgcgcccggggtcacgtttacgatttgccattggtccccttcaaccagccgaagcgggaatggtgacctaaatcccctttcgccagtgacaacgggaacaccttgattgccgggtgttccaagaacgcatactttttcgcacttaccgcaaccggtacaggcgtcgctgtgaaccgtcggcagaaagcgggcggtgcttaccggtacgcgtgttgcgctccagctccagggtgatggcctcatcaattttcgggcattcgcgataacaaacatcgcagcgcagcccctgaaagttgagacagttttcctggtccaccagtaccgccagccccatccgcgcgtcgtcgatcgattcaatctcacgatccagcgcaccgcttgggcacactttggcgcacggaatgtcctcacacat

SEQ ID NO: 28737 - DNA, 2123 bp, Homo sapiens
  SIMILAR (2007)..(55): 521254mologous to Homo sapiens gonadotropin inducible transcription repressor-4,accession number AB021644,Smith-Waterman Score=1777.
tcaaagaatcttgtcaggtctgaacgctttcccatactgcttacattcatagggtttttctccagtgtgagtccttccatgcatttgaaggtgcgaggctgatctgaaggctttcccacattgcttatattcatagggcttctctccagtgtgagtcctttcatgatattgaagggaactagaagaaatgaaggctttcccacttggcatacactcatagggtttctctcccatgtgagtcctttcatgatattgaaaagaagtggaagaaataaaggcttttgcacattgcttacattgatagggtttctccctagtgtgttctttcatgatattgaaaagaactggaagaagtgaaagctttgccacattgcttgcattcatagtgtttccttccagtgtgagtcttttcatgtattcacagggtttctctccagtgtgtgtccttttatgaaatcgaagatttttgacagatctgaaggctttcccaaattgcttacactcataggggttctctccagtgtgagtcctttcatgatatcgaaaggaagtgaaggaaacaaaggctttcccacattgcttacactcatagggtttctctccagtgtaagatttttcatgtatttgaaatgacttggcagaataaaagcccctcccacatatcttacatttataaggtctctctacagagtgcattatgtgtgtttgtgtcctttcatgaattcgaaggttctgggcagatccgaagggtttcccacattccttacatgcatagggcttctctccattgtgtgtcgctttcccacattgcttacactcatagggtttctctccagtgtgagtccttacatgatatcgaagggaactggaatgaggtaaggctttaccacactgcttacatttatagggtttctctccactgtgaattttttcatgtctttgaaatgaattcacagaacaaaagtcttttccacatatcttacattcataaggtctttctccagagtgcaatcttacgtgtgtttgaaaacttgtaagagaggataatgctttcccacactgcttacattcatagagatttttcctagagtgggtcctttcatgtatacgaacataacggggacacgtgaatgcttttccacattccttacattgataagccttttctcccatgtgaatcctttcatgtctacgataggatctgggactatgaaatgctttcccacactcctgatattcataaggcttttctccagtgtgagttcttttatgtattcgatgggtagcagaataactaaaggatttaccacactgtttacattcacatggtttctctccagtgtgaattctttcatggataagatataatctgagacaatggaatgctttcccacaaaacttacatttataaggtccatccccactgtgcattaccatgtgtcttcgaacacttgaatgggaaataaaggtttttccacatactttacaagcattgggtttctctccagtgtgatccctttcttgtgttctaaaggaggggcggtatctgaaggcttttttaggttgttgacacttacatggctttggtccatattcctgatactcatatgccttgtgtccaatgtcacctctgatgttcatattaaaagatgagttacctaggccaacttctccacacacaaagctttcacatgattttacttcaggagaagctttcttctcctggaagttcagtctgtcatctggaactggggtaaaagtttctccacaatgactgtcatctttaatttcattgactttttcttctatgagactcctgaagtttctcctggggttttggtgctcatattcaatgttctggtctttccacctttttcctatagaggtcaggttcctgaaagtttccagcatcacttccctgtagagtttcctctgggaaatatccagcaaagcccactcctcctgggtgaagttcacagccacatccttaaaagccactgggtccatttctcggcttccagggtgttccggcgtcctctgcgtggctcccgcgactagtgtaggtcacagtgcaggttacagagcgacagaagctatggtggaggcacctagtccctctcgaa

SEQ ID NO: 28738 - DNA, 1715 bp, Homo sapiens
  SIMILAR (257)..(577): 581254mologous to Homo sapiens zinc finger protein (583 AA),accession number X51760,Smith-Waterman Score=284.
gggccgctggatgtgggtgggccggcagcgggactccggcgtcctgtcccgtccctgcccgtcgactgcggccttgcccgaagcccttttgtgcagctccgcgcccgcagcccgacgccccagcttgtgcggggccacgggagggtcatgcgcggatttcgactcgggtgtggatttcgtccgtagaggaagcagcggtctgtggggcccacagcctccactttctcctgttaaaaattatactgagatgtttcaggacccagtggcttttaaggatgtggctgtgaacttcacccaggaggagtgggctttgctggatatttcccagaagaatctctacagggaagtgatgctggaaactttctggaacctgacctctataggaaaaaagtggaaagaccagaacattgaatatgagtaccaaaaccccaggagaaacttcaggagtgtcacagaagagaaagtcaatgagattaaagaagacagtcattgtggagagacttttaccccagttccagatgacaggctgaacttccagaagaagaaagcttctcctgaagtaaaatcatgtgacagctttgtgtggtgaagttggcctaggtaactcatcttctaatatgaacatcagaggtgacactggacacaaggcatgtgaatgtcaggaatatggaccaaagccatggaagagtcaacaacctaaaaaagccttcagatatcacccctccttgagaacacaagaaagggatcacactggaaagaaaccctatgctttgttaaagaatgatgggaaaaaaccattattttaccattcaagcattcaaagacacatggtagtgcacagtggggatggaccttataaatgtaagttttgtgggaaagcattccattgtctcagtttatatcttatccatgaaagaactcacactggagagaaaccgtatgaatgtaaacaatgtggtaaatcttttagttattctgctacccatcgaatacatgaaagaactcacattggagaaaagccttatgaatgtcaggaatgtgggaaagcattccatagtcccagatcctgtcacagacatgaaaggagtcacatgggagagaaggcttatcaatgtaaggaatgtggaaaagcattcatgtgtccccgttatgttcgtagacatgaaaggacccactctaggaaaaaactttatgaatgtaagcagtgtgggaaagcattatcctctcttacaagttttcaaacacacataagaatgcactctggagaaagaccttatgaatgtaagacatgtgggaaaggcttttattctgccaagtcatttcaaagacatgaaaaaactcacagtggagagaaaccgtataaatgcaagcaatgtggtaaagccttcactcgttccggttcctttcgatatcatgaaaggactcacactggagagaaaccctatgagtgtaagcaatgtgggaaagccttcagatctgccccaaatcttcaattgcatggtaggactcacactggagagaaaccgtatcaatgtaaggaatgtgggaaagctttcagatctgcctcacaacttcgaatccatcgtaggattcacactggagagaaaccctatgaatgtaagaaatgtgggaaagccttcagatatgtccagaactttcgatttcatgaaaggacacaaacacataagaatgcactctggagaaagaccttataa

SEQ ID NO: 28739 - DNA, 2313 bp, Homo sapiens; identical to SEQ ID NO: 10082
  SIMILAR (400)..(1173): 481254mologous to Homo sapiens zinc finger protein (583 AA),accession number X51760,Smith-Waterman Score=684.

SEQ ID NO: 28740 - DNA, 2604 bp, Homo sapiens
  SIMILAR (181)..(2142): 571254mologous to Homo sapiens gonadotropin inducible transcription repressor-4,accession number AB021644,Smith-Waterman Score=2068.
tttcgtgggtcgctttcctcaccttcctcgctgcgcgggcggcggttggtaaccggtcagaccagcccgagagggacctggtgcctgtacccaggcttctgtcgctctgtcgcctgcgctatgccctgctgtagtcacaggagctgtagagaggaccccggtacatctgaaagccgggaaatggacccagtggtctttgaggatgtggctgtgaacttcacccaggaagagtggacattgctggatatttcccagaagaatctcttcagggaagtgatgctggaaactttcaggaacctgacctctataggaaaaaaatggagtgaccagaacattgaatatgagtaccaaaaccccagaagaagcttcaggagtctcatagaagagaaagtcaatgaaattaaagaagacagtcattgtggagaaacttttacccaggttccagatgacagactgaacttccaggagaagaaagcttctcctgaagtaaaatcatgtgacagctttgtgtgtgcagaagttggcataggtaactcatcttttaatatgagcatcagaggtgacactggacacaaggcatatgagtatcaggaatatggaccaaagccatataagtgtcaacaacctaaaaataagaaagccttcaggtatcgcccatccattagaacacaagaaagggatcacactggagagaaaccctatgcttgtaaagtctgtggaaaaacctttattttccattcaagcattcgaagacacatggtaatgcacagtggggatggaacttataaatgtaaattttgtgggaaagccttccattctttcagtttatatcttatccatgaaagaactcacactggagagaaaccatatgaatgtaaacaatgtggtaaatcctttacttattctgctacccttcaaatacatgaaagaactcacactggggagaagccctatgaatgtagcaaatgtgataaagcatttcatagttctagttcctatcatagacatgaaagaagtcacatgggagagaagccttatcaatgcaaagaatgtggaaaagcatttgcatataccagttctcttcgtagacatgaaaggacccactctgggaaaaaaccgtatgaatgtaagcaatatggggaaggcttatcctatcttataagttttcaaacacacataagaatgaactctggagaaagaccttataaatgtaagatatgtgggaaaggcttttattctgccaagtcatttcaaacacatgaaaaaactcacactggagagaaacgctataaatgcaagcaatgtggtaaagccttcaatctttccagttcctttcgatatcatgaaaggattcacactggagagaaaccctatgagtgtaagcagtgtgggaaagccttcagatctgcctcacagcttcgagtgcacggtgggactcacactggagagaaaccctatgaatgtaaggaatgtgggaaagccttcagatctacctcacaccttcgagtgcatggtaggactcatactggagagaaaccctatgaatgtaaggaatgtgggaaagccttcagatatgtgaagcaccttcaaattcatgaaaggacagaaaaacacataagaatgccctctggagaaagaccttataaatgtagtatatgtgagaaaggcttttattctgccaagtcatttcaaacacatgaaaaaactcacactggagagaaaccctatgaatgcaaccaatgtggtaaagccttcagatgttgcaattcccttcgatatcatgaaaggactcacactggagagaaaccctatgagtgtaagcaatgtgggaaagccttcagatctgcctcacaccttcgaatgcatgaaaggactcacactggagagaaaccctatgagtgtaagcaatgtgggaaagccttcagttgtgcctcaaaccttcgaaagcatggtaggactcacactggagagaaaccctatgagtgtaagcaatgtgggaaagccttcagatctgcctcaaaccttcagatgcatgaaaggactcacactggagagaaaccctatgaatgtaaggaatgcgaaaaagcattctgtaaattctcttcttttcaaatacatgaaaggaagcacagaggagagaagccctatgaatgtaagcattgtgggaatggattcacatctgccaagattcttcaaatacatgcaagaacacacattggagagaaacactatgaatgtaaggaatgcggaaaagcattcaattatttttcttccttgcatatacacgcaaggactcatatgggagagaagccatatgaatacaataaaagcaaaggtggctttatcatggtgagctacatctcgcaggagttgggatccacatctgcagactatacaaagacaacacagattaaaagcacaatcatcattgaaatcacagagcctccaagtgtttttatctattttaatgggttaatagctgctaatccatctgcagctccttcaagcactccagttcctggcattaagggcaaggcgagggaaaggatggaacttggtgaagtgtcagcagttagggaagagaaagttgatggattatcatga

SEQ ID NO: 28741 - DNA, 1364 bp, Homo sapiens
  SIMILAR (1)..(579): 1001254mologous to Escherichia coli Hyf F,accession number M63654,Smith-Waterman Score=976.
atgagttattctgtgatgttcgctttactcctgctcacgccgctgcttttttcgctgctctgttttgcctgccggaaacggagactttctgcgactcgcacggtgaccgtattacatagcttagggatcacactgctgctgattctggcactctgggtggtccaaactgccgctgatgcaggagaaatattcgctgcgggactgtggcttcatattgatggtctgggcggtttgttcctcgccattcttggtgtgattggctttctcaccggtatttactcgattggctacatgcgtcatgaagtggcacacggcgagctttcacccgttacgctgtgcgattactacggtttcttccatctgtttttgttcaccatgctgctggttgttaccagcaataacctgattgtgatgtgggcggcgatcgaagccaccaccttaagctcggcgtttctggtaggcatttacggtcagcgttcatcgctggaagctgcatggaagtacatcattatttgtactgttggtgtcgcttttggtctgttcggtaccgtgctggtatacgccaacgccgccagcgtatgcggtaccgaccacgggggccgaatgatgcgcagttggaatggcgggcagctgatcagcaaattactggcaataactcccggataaactggtgctggatttcggcagtcaagccgaagacaacatcgccgtgctaaaggcacagcacatttccatttcccgccgaaactcagggtgcgaaagtcgagtttactgttgaccaactacagcagagtgaatacttgcagcttccggcatttattaccgtaccgcctcccaccttatggtttgtacaacgacgccgatatttccgcatctccgccccactccatccgccttatttttgccagaccaaactggcggataacagtacgttacgtttccgcctgtatgatttgtcgttaggcggcatgggcgcattactggaaacagcaaagcctgccgaattacaagaaggcatgcgcttcgctcagattgaagtcaacatggggcaatggggtgtttttcactttgacgcccagttaatctccatcagcgagcgcaaagtgattgatggcaagaatgaaaccatccccactccccgtctgagcttccgttttcttaacgtcagcccgacggtggagcggcaattacagcggattattttctctctcgagcgagaagcccgggaaaaagcggacaaagtgcgcgactgatttacatcgcgtccagtgcctgctcaagtttgtagatatagcgcggcagcctgcggcgcagggtgatttcgcgctacgtgttcgaggaaaacgtcagcatcccaaatcgtt

SEQ ID NO: 28742 - DNA, 2284 bp, Homo sapiens
  SIMILAR (155)..(709): 981254mologous to Escherichia coli K12 ferredoxin-type protein: electron transfer,accession number AE000309,Smith-Waterman Score=974.
gagtgtcacagaagagaaagtcaatgaaattaaagaagacagtcattgtggagaaacttttaccccagttccagatgacaggctgaacttccagaagaagaaagcttctcctgaagtaaaatcatgtgacagctttgtgtgtgaagttggcctagcgaaacctcaaaatggtcgccgccgctttctgcgcgatgtcgttcgcacagcaggcgggctggctgccgtgggtgtggcgctggggttacaacagcaaaccggacgcgcatctggcgtgcggttgcgcccgcccggagccataaacgagaacgcctttgccagtgcctgtgtgcgttgcggtcagtgtgttcaggcttgcccttacgacaccttaaaactggcgacgctggcctctggtctgtcggcgggcacgccatattttgtcgcacgggatattccttgcgaaatgtgtgaggacattccgtgcgccaaagtgtgcccaagcggtgcgctggatcgtgagattgaatcgatcgacgacgcgcggatggggctggcggtactggtggaccatgaaaactgtctcaactttcaagggctgcgctgcgatgtttgttatcgcgaatgcccgaaaattgatgaagccatcaccctggagctggagcgcaacacgcgtaccggtaagcacgcccgctttctgccgacagttcacagcgacgcctgtaccggttgcgttcttcgggctggggaggtttttgagcggcccatgtttgggtgtggggatcttgcacgggcactacaggcagtagccctgttattcgacacccttcccgctgaccgatccgctgatgacgctgcaaagtcttcccagtggtcatctgccctgccacggtggcgtgaccgctgggtctgcccgctgaacccgattaccgacttagcgaactggttacgcaggcgctttgacctcaatcagtctgcgacgatccctcgccacattcgctacgtgctgttggtggtcattctggtgggatcagccttaactggcacgctcatttgggaatggatcaaccccgtttctctgatggggcgtagcctggtaatgggcttcggcagcggcgcgctgcttattctcgcgctgtttttatttgatctactggtcgatgaacaacggctggtgcgggcacatttgtccgggccatatgaggccactgagcttgagactgctaacagacggcgtgtggcagctccccttagcacagcgactacgaaaccgcagtatgcagtccctgcctggcggcacgtagccacccggcatgaaggacgcacattcaggaagaaccctgatgcgttccagaccgccttggctctggggagctccgtggggggcttggaactgataatgagatttcacgatcagaatcggggggcctatacacagccttccttcagcactctgtatgccagtgagaaatttgaactggtttccgggaccaccatcttactcctcagggtctggactggaacctactgcagagagcaagatcgcctgtttggcggtagcacacaatgccagctggtgtctgcagaaattagaaggaagcacacagtggagcctctcccacttctccttgctctgaagccagttggtggtccaaattccgaggctgttgtgatgttggggaaaggttggaatggcgggcagctgatcagcaaattactggcaataaccccggataaactggtgctggatttcggcagtcaagccgaagacaacatcgccgtgctaaaggcacagcacattactcatggtgcgaaagtcgagtttactgttgaacaactacagcagagtgaatacttgcagcttccggcatttattaccgtaccgcctcccaccttatggtttgtacaacgacgccgatatttccgcatctccgccccactccatccgccttatttttgccagaccaaactggcggataacagtacgttacgtttccgcctgtatgatttgtcgttaggcggcatgggcgcattactggaaacagcaaagcctgccgaattacaagaaggcatgcgcttcgctcagattgaagtcaacatggggcaatggggtgtttttcactttgacgcccagttaatctccatcagcgagcgcaaagtgattgatggcaagaatgaaaccatcaccactcccgttctgagcttccgttttcttaacgtcagcccgacggtggagcggcaattacagcggattattttctctctcgagcgagaagcccgggaaaaagcggacaaagtgcgcgactga

SEQ ID NO: 28743 - DNA, 1048 bp, Homo sapiens
  SIMILAR (569)..(1021): 981254mologous to Escherichia coli dye,accession number M10044,Smith-Waterman Score=775.
atgaaactcatcagtaacgatctgcgcgatggcgataaattgccgcatcgtcatgtctttaacggcatgggttacgatggcgataatatttcaccgcatctggcgtgggatgatgttcctgcgggaacgaaaagttttgttgtcacctgctacgacccggatgcgccaaccggctccggctggtggcactgggtagttgttaacttacccgctgatacccgcgtattaccgcaagggtttggctctggtctggtagcaatgccagacggcgttttgcagacgcgtaccgactttggtaaaaccgggtacgatggcgcagcaccgccgaaaggcgaaactcatcgctacatttttaccgttcacgcgctggatatagaacgtattgatgtcgatgaagcgcgaggaaaaatcatcatcgccttcagcgaagcaagaagagacagagcaaggagaacaggcacagagaacggagagagagacacgcaagaacagaaacagaacagacaggacgagctagacgagaagaagagcaagaacaagacagcacacagagaaacagcaacgaggacagaaacaggcgaatgttgcgttgatgttcctgactggccgtgacaacgaagtcgataaaattctcggcctcgaaatcggtgcagatgactacatcaccaaaccgttcaacccgcgtgaactgacgattcgtgcacgcaacctactgtcccgtaccatgaatctgggtactgtcagcgaagaacgtcgtagcgttgaaagctacaagttcaatggttgggaactggacatcaacagccgttcgttgatcggccctgatggcgagcagtacaagctgccgcgcagcgagttccgcgccatgcttcacttctgtgaaaacccaggcaaaattcagtcccgtgctgaactgctgaagaaaatgaccggccgtgagctgaaaccgcacgaccgtactgtagacgtgacgatccgccgtattcgtaaacatttcgaatctacgccggatacgccggaatatcacccggatggaccacgcccgtaa

SEQ ID NO: 28744 - DNA, 1100 bp, Homo sapiens
  SIMILAR (819)..(322): 251254mologous to Plasmodium falciparum S-antigen,accession number M81799,Smith-Waterman Score=108.
agcctgatgccggctgcagcgagggagggcacgctggcactggggaacacgaccgtgccaaggctggaggtgcatttggcccctgcaaggccatcgccctgctgaccctaagcaggcagccagcagggcacggccggaggctgcacggcttctccactgcacggcttgccggcctcggggcaaaactgaaaaacacagagaagcgaaaaaaggaaaaggcagacgttccagaatttcaccattcccaattcttctgcacgaccttccggaatttcaccattcccaattcttctgcacgaccttccggaatttcaccattcccaattcttctgcacgaccttccggaatttcaccattcccacttcttctgcacgaccttccggaatttcaccattcccacttcttctgcacgaccttccggaatttcaccattcccacttcttctgcacgaccttccggaatttcaccattcccaattcttctgcacgaccttccggaatttcaccattcccaattcttctgcacgaccttccggaatttcaccattcccaattcttctgcacgaccttccggaatttcaccattcccaattcttctgcacgaccttccggaatttcaccattcccaattcttctgcacgaccttccggaatttcaccattcccaattcttctgcacgaccttccggaatttcaccattctcaattcttctgcacgaccttccggaatttcaccattcccaattcttctgcacgaccttctggaatttcaccattcccaattcttctgcacgaccttccggaatttcaccattcccaattcttctgcacgaccttctggaatttcaccattcccaattcttctgcactgctcttatgttcagagtctgtggtgagcgggaatgagagtgaccctgtgtcgccaagggatttgctgtgctcagcagccagggtggcggcagaatgcatgcttctggaagagtccttcctgctcatgaccggctctgagcggctcccgaggccagactggctttgtttgccaatcttgagagtcaaaggaaacgtggctctttcagctgcttcagcaaaagagaagctctga

SEQ ID NO: 28745 - DNA, 3177 bp, Homo sapiens
  SIMILAR (2218)..(2730): 991254mologous to Escherichia coli BasR,accession number D14055,Smith-Waterman Score=877.
atggctagcggtcgacttaacgcgttagctccggaagccacgcctcaagggcacaacctccaagtcgacatcgtttacggcgtggactaccaggcgtcagtcttcgtccagggggccgccttcgccaccggtattcctccagatctctacgcatttcaccgctacacctggaattctacccccctctacgagactcaagcttgccagtatcagatgcagttcccagtaattccgattaacgcttgcaccctccgtattaccgcggctggattttcgaagaagttccggtcatttccatgggcgtatacaatggtcagagcacccgtatttacgaccgtgaaccggcgaaatccactacggtcgcgttccggcggggtctgtggttgtttcagaaagttgacgcgaaaactcgcggcaaagtcggcattaacgaactgctgcgtaccatcgactaaaagtatgcacacgggcagcacgacgctgcccgatttttttgcagggatgagcgatgatttcacgccgccgatttttgcaggctactgccgcgacgatagccacgagctcaggtttcggttatatgcattactcctgatttctgacgcgattgctcttggcatagaacaaaagcccgatttgatattactgggcggcgattacgtattatttgatatgtcgctgaatttttcggcgtttagtgacgtactctccccccttgccgaatgtgcgccgacgtttgcctgcttcggcaaccacgatcgccctggcagaattgcggcagcaagtattggaccgctcaacaataccgtcaggaagaaagccagcaccagaagctccgattcgattcagggagttaaacgcccgcagtggcgatcccaggtgcatgacagaggcaataaacccgacgcccatcaacagccagaggaaaaacatgccacggacaatacgctgacggtctgcgtcatttttggcggcgaaccagccaattccgctaacaatcagcgcgcctactacgcattgacccaatacggtgggtattacacgggcagttttcaaccagggttccagattcgggaacgaatttttcccagaacggtgagccgatgcgatcttcgaacaggatccgaatgcacgcgttgcttgcgaaacctacgtaatttcggtgatgaaaaagatatcgagcttcaagaaactgaatgcgccgtcatcagagcattggtgcaggtatcgcactggcaatccactctggccgctgcgggccaggtactgaccatcatcgttcgtactattaccgttgctttccagcacgctgcggataaggctgctgataacggcaacctgacagcgatttcctggatccacgtttcttctctgttcctgcaagcaatgcgtgtggctattccggccgtcatcgttgcgctgtctgttggtaccagcgaagtacagaacatgctgaatgcgattccggaagtggtgaccaatggtctgaatatcgccggtggcatgatcgtggtggttggttatgcgatggttatcaacatgatgcgtgctggctacctgatgccgttcttctacctcggcttcgtaaccgcagcattcaccaactttaacctggttgctctgggtgtgattggtactgttatggcagtgctctacatccaacttagcccgaaatacaaccgcgtagcggtgcgcctgctcaggcagctggtgagcgaaatggttgatacaactcaaactaccaccgagaaaaaactcactcaaagtgatattcgtggcgtcttcctgcgttctaacctcttccagggttcatggaacttcgaacgtatgcaggcactgggtttctgcttctctatggtaccggcaattcgtcgcctctaccctgagaacaacgaagctcgtaaacaagctattcgccgtcacctggagttctttaacacccagccgttcgtggctgcgccgattctcggcgtaaccctggcgctggaagaacagcgtgctaatggcgcagagatcgacgacggtgctatcaacggtatcaaagtcggtttgatggggccactggctggtgtaggcgatccgatcttctggggaaccgtacgtccggtatttgcagctcttggtgccggtatcgcgatgagcggcagcctgttaagtccgctgctgttcttcatcctgtttaacctggtgcgtctggcaacccgttactacggcgtacgcctggtggtactggatttagggttacccgacgaagatggactgcattttctcgcccgtatccggcagaaaaaatataccctgccggtactgatcctcaccgctcgcgatacgctgaccgacaaaatcgccgggctggatgtcggtgccgacgactatctggtgaagccttttgcgctggaagagttacatgcccgtatccgcgccctgctacgacgccataataatcagggcgaaagtgagctgattgttggcaatctgacgctgaacatgggtcgccgtcaggtatggatgggcggtgaagagttgattctgacgcccaaagaatatgctctgctgtcacggttaatgctcaaagcaggcagtccggtgcatcgggaaattctctacaacgacatctataactgggacaatgaaccctcgaccaacaccctggaagtgcatatccacaatctgcgcgacaaagtgggcaaagcccgtatccgcaccgtgcgcggctttggctatatgctgctgatcagcgtcttctggctatggcatgaaagtaccgagcagattcagctgtttgagcaggcgctacgcgacaatcgcaacaacgatcgccacatcatgcgtgagatccgcgaagcggtcgccagcctgattgtccccggcgtctttatggtcagcctgacgctatttatctgctatcaggcggtacgccgcatcacccgcccgctggcggagctgcaaaaagagctggaagcgcgcaccgccgacaacttaacgcccattgccattcacagcgccaccctcgaaatcgaagcggtggtttcggcgttaaacgatctggtcagtcgcctgaccagcacgctggataacgaaaggttgtttaccgctgacgtcgcgcacgaactgcgaacgccactggcgggggtgcgtttgcatctggaactgctggcgaaaacgatcacattgatgtag

SEQ ID NO: 28746 - DNA, 1287 bp, Homo sapiens
  SIMILAR (328)..(1284): 991254mologous to Escherichia coli BasS,accession number D14055,Smith-Waterman Score=1580.
atgggaaccgggtgcgactcgacgaacgcatcctcctacgcaattggtgaccggagcgtcgacgtcggcgaagtggacgtggcaatcagcactaaaaatcggcgctatacgatggcagtaagtcagttagcaagtgcagagcctgatgccggctgcagcgagggagggcacgctggcactggggaacacgaccgtgccaaggctggaggtgcatttggcccctgcaaggccatcgccctgctgaccctaagcaggcagccagcagggcacggccggaggctgcacggcttctccactgcacggcttgccggcctcggggtgcgtggggaatgggcgctacgcgacaatcgcaacaacgatcgccacatcatgcgtgagatccgcgaggcggtcgccagcctgattgtccccggcgtctttatggtcagcctgacgctatttatctgctatcaggcggtacgccgcatcacccgcccgctggcggagctgcaaaaagagctggaagcgcgcaccgccgacaacttaacgcccattgccattcacagcgccaccctcgaaatcgaagcggtggtttcggcgttaaacgatctggtcagtcgcctgaccagcacgctggataacgaaaggttgtttaccgctgacgtcgcgcacgaactgcgaacgccactggcgggggtgcgtttgcatctggaactgctggcgaaaacgcatcacattgatgtagcaccgttagtggcacggcttgatcagatgatggagagcgtctcccagctgctgcaactggcgcgtgccggacagtcattttcttccggtaattatcaacatgtaaaactgctggaagatgtcattctcccctcgtatgacgaactcagtaccatgctcgaccagcgacagcaaaccctgctattgccagagagcgccgccgacatcaccgttcagggtgatgcaaccctgctgcggatgttattgcgaaacctggtagaaaacgcccatcgttacagcccgcaaggcagcaacattatgattaagctgcaagaagatgacggagcggtcatggcagttgaagatgaaggaccaggtattgatgagagtaaatgcggggagttgagtaaagcgtttgtacgtatggacagccgttatggcgggattggtctggggttaagtattgtcagccgcattacacagttgcatcacgggcagtttttcctgcaaaaccggcaagagacttccggcacgcgggcctgggtacggctgaagaaagatcagtacgtggcaaaccagatataa

SEQ ID NO: 28747 - DNA, 5415 bp, Homo sapiens
  SIMILAR (2062)..(2799): 1001254mologous to Escherichia coli regulatory protein,accession number L43490,Smith-Waterman Score=1240.
  misc_feature (1)...(5415): n = a,t,c or g
atgacgttgacctcgggttctaccggtttgccgaaagccgctgtccatacttatcaggcccatcttgccagtgcgcaaggtgtgttatcgctgattccgtttggcgatcacgatgattggttgctctctttaccgctgtttcacgtctccggtcagggaattatgtggcgctggttatacgctggtgcgcggatgacggtacgtgataaacagccattggagcaaatgctggcaggctgtactcacgcttcactggtgccaacacaactctggcgtttgctggttaaccgtagttccgtttccctgaaagcggtgttacttggcggcgcggctatcccggtcgagttgacggaacaggcgcgcgagcaggggattcgttgcttttgcggctatggtctgaccgagtttgcctccacggtgtgtgcgaaagaagccgacggcctggcagacgttggttcgccgctgccgggtcgggaagtgaaaatcgttaataatgaagtgtggctgcgggctgccagtatggcagaaggttactggcgtaacgggcaactggtttcactggttaatgacgaaggctggatattgttcaacaagttccggcatcacctgcgccagcggtgtgttggcgtcatagtggcgtttgaaggagcaaagggtgttaaccagagttccccatttcccacgggttacgcccatagagaacaggaacataatttggaagtcagtggtgcgggtagttcaccatcttcacccattcccggagcaaggatgctgattttaatcgggtcgagcatactccagttatccggaatatctttgaagccgtgccagctttcgcccggatgcatcctgggcgcgtctgcgcggcctgaacgacaaacagaccgaacgtcgccacatcctgcgcaatgcctcgctgccgatgatcaccgccgtggggatgcatatcggcgaactgattggcgggacgatgattatcgacaacatctttgcctggccggggcacaacgcattgatgaaatcgcgtttgctaagcggcagagatggcaacttttggtgcaaaagtactgcatccggcaacgttgctacccgcagtacgcagcgatatcccggtctttgtcggatccagcaaagacccacgcgcaggtggtacgctgcctgaatatgctgcattctcgcggtttcctcgcggaagttttcggcatcctcgcgcggcataatatttcggtagacttaatcaccacgtcagaagtgagcgtggcattaacccttgataccaccggttcaacctccactggcgatacgttgctgacgcaatctctgctgatggagctttccgcactgtgtcgggtggaggtggaagaaggtctggcgctggtcgcgctcattggcaatgacctgtcaaaagcttgcggcgttggcaaagaggtattcggcgtactggaaccgttcaacattcgcatgatttgttatggcgcatccagccaggccaatgtctggcgaattaacaccattgggaattccgcagacaccgtctgcagaattcccatcggcaaagatttggcagacgctgtctgccaaatctttccccttgcccagtcggatttcggtggcgtaggattattacaaacgcccaccgcgcgtatggcacgggaaggggagttgagtctgaactatcgcgataacgatcagtaccgttattactcagcttcagtgcaactcttcccgtggctggaaacaacgctgcgctacaccgacgtgcgcacccggcagtacagcagcgtcgaagcgttctctggcgatcaaacgtataaagataaagccttcgatctcaaactgcgtttgtgggaagagagttactggctgccgcaagtggcggttggtgcgcgggatatcggcggtacggggctgtttgatgcggaatatcttgttgccagcaaagcctgggggccgttcgattttacgctcggcctgggctgggggtatttgggcaccagcggtaatgtggaaaatccgctctgtacagccagggggttaagccactgtgcacgaggtccgggaatgaaagatgaacgtcgccctatttgcgaagtggttgcagagagtatcgaacggttaattatcgacggcgtactgaaggtcggtcagccgcttccctcggaacgtcgactgtgtgaaaagctcggcttctcacgctccgcactgcgtgaagggctgaccgtgctgcgcgggcgcgggattattgaaacggcgcagggtcgcgattctcgtgtcgcacggcttaatcgggtgcaggacaccagcccgctgatccatctgttcagtacgcagccgcgaacgctgtacgatctgctcgacgttcgcgcattactggagggcgaatcggcaaggctggcggcaacgctgggaacgcaggctgattttgttgtgataacccgctgttatgaaaaaatgctcgccgccagtgagaacaacaaagagatttcgctgatcgaacatgcgcagttggatcacgctttccatctcgccatttgtcaggcttctcacaatcaggtgctggtgtttacgctgcaatcattgaccgatctgatgtttaattcagtgtttgccagcgtaaataatctctaccatcgaccacagcaaaaaaagcagatcgatcgccagcatgcgcggatctacaacgcggtgttgcagcggctgccgcacgtcgcccagcgcgcagcacgcgatcatgtgcggaccgtgaaaaagaatctccacgatatcgagctggaaggccaccatttgattcgctcggcgcgcaatcaccgggccgatgcggctgaactgatactcgtcgcgcacgcccatcagcggtactcgcgcagttcgcacaccgctgactttcaaacgccacagcaattttgcccagccgaagggaaagagcgatccgttcagatcggcaatcgcctcgttgatgttcggcaagccgacaataaacgcgcagggtgcagaatcaatctcagcgatataggttcgttttcggttttaacggcctttcctgatcgccgtgttattggcctgcatcaggccttaattccggtttacctcgcgttaatggacagccaggtattcaacagcttatgtcccatccgttcgatggcaggcgcgggccaggtgggcgcggcgctggcactctactgtcgggcgccaccgcacagtgcgctacgcagtcaggtacgcggggcgattattcccggcctgctgggcgttggtgaaccgctgatttacggtgtcaccctgccccgcatgaagccgtttgttaccgcctgtttaggcggcgcggcgggcggtttgtttatcggcctgatagcctgttgtagcgtcagcgccgcaaaataccctgttctgacagaaagctcgccagagaaagcagggtttaacgtcgaacggcttaaccagatggatcgctggattagccagcaagttgatgtcggttatcccagcgtaaacctgctgatcattaaagataatcagattgtgtatcgcaaagcctggggagcggcgaaaaagtacgatggcagcgtgttgatggaacagcctgtcaaagccaccaccgggacgctgtatgacctggcctcaaacaccaaaataatggtcatcgcggaccagacgcggaaacgaaaggtgttacccgcgacttcggcccgaacgcgaagccactggcggggggcgtttgaatctgaacggctgcggaanacgcatcacattgatgtagcaccgttagtggcacggcttgatcagatgatggagagcgtctcccagctgctgcaactggcgcgtgccggacagtcattttcttccggtaattatcaacatgtaaaactgctggaagatgtcattctcccctcgtatgacgaactcagtaccatgctcgaccagcgacagcaaaccctgctattgccagagagcgccgccgacatcaccgttcagggtgatgcaaccctgctgcggatgttattgcgaaacctggtagaaaacgcccatcgttacagcccgcaaggcagcaacattatgattaagctgcaagaagatgacggagcggtcatggcagttgaagatgaaggaccaggtattgatgagagtaaatgcggggagttgagtaaagcgtttgtacgtatggacagccgttatggcgggattggtctggggttaagtattgtcagccgcattacacagttgcatcacgggcagtttttcctgcaaaaccggcaagagacttccggcacgcgggcctgggtacggctgaagaaagatcaaggcgcgtatccgatgagtgaaaaggtggtgttcagtcaactgagccgtaaatttattgatgagaacgatgccacgcccgccgaggcgcagcaggtggtctattacagcctggcgattggtcaccaccttggggttatcgattgcctggaagcggcgctcacctgcccgtgggatgaatatctggcatggattgccactctggaggcaggcagtgaagcccgccgcaaaatggaaggcgtgccgaaatatggtgagatcgtcatcgacattaaccatgtgccgatgctggccaacgcattcgataaagcccgggcagcgcaaacttcgcagcagcaggaatggagtacaatgctgttaagtatgctgcatgatattcatcaggaaaacgccatctatttgatgggcgtattcatcatgcttatcttttttccggcacccgtggcgtcggaaaaacctctatcgcccgactgctggaccacgacccatactttgaggatgattggtgagaactcaggactcgtctcatacatgagagaaaaggccgtaagccccaactgttggaatgtcattcattattcaggatttcttcacttggaactgttgagctcctatgatgtagatgttaatcagatcataaataccatatgcgaatggattagtttgattaagaccagaggcgttaggcgacctgaatttcagactttactaacgggatctggatcagagcatggtgaaaggttcatcatgaatcgcccaacgctcttcttcaccgatctcgcctttcatgtcgaccggttcacccagtacgttcatgatacggcccagagtcgctttacctaccgggacttcaatcgggtgttcgaggtcttttacatccagaccgcgacgcagaccgtcggaggaacccattgcgatgcacctggctggtggtttccgggagccgtacagtcggtgcctgccgcggcgctgattgccgttgccgcggcacctgggttggcgtcattcctgccgttcgcgcgacgggtgccaaggactgtcgtggcacttctggctcaggcagcggcatacgcggatggcatgccagcccgcgcagatggttcattcaattcaccatag

SEQ ID NO: 28748 - DNA, 2913 bp, Homo sapiens
  SIMILAR (382)..(1125): 1001254mologous to Escherichia coli lipase like enzyme,accession number D90259,Smith-Waterman Score=1326.
atgaaaaccggcatcgtgaccaccttgattgcattatgtttgccggtatccgtttttgccaccacgctgcggctttcaaccgatgtcgatcttctggtactcgacggcaagaaggtttccagctctctgctgcgcggtgcggacagcattgaactggataatggaccgcatcagttagtgtttcgcgttgagaagacgattcatctttccaatagtgaagaacggctgtatatctccccaccgctggtggtcagttttaatacccagctcatcaaccaggtcaattttcgcctgcctcgcctggagaatgagcgggaagctaaccattttgatgccgcgccgcgccttgaattgttggatggcgatgcgacgccgattccgccggaaaacaaactacctgttctggaccttatttctgctgaaatgaagaccgttgtgaatactcttcagccggatttaccgccctggcccgcaacgggaacgattgctgagcaacgacagtattacacgcttgagcgccgattctggaatgcgggcgctccagaaatggcaaccagagcttacatggttccaacaaaatatgggcaggtggaaacacgtctcttttgtccgcagccagatagcccagcgacgctattttatttgcatggaggcggttttattctcggcaatctcgatacccacgatcgcatcatgcgcctgctggcaagctacagccaatgtacggtgattggtattgattacaccctttcacctgaagcgcgttttccgcaagcgatagaggaaattgtggctgcttgttgttatttccaccagcaggcggaggattatcaaatcaatatgtcccgcattggctttgccggtgattccgcaggtgccatgctggcgctcgccagtgcgttgtggttgcgtgataaacagatcgattgcggtaaagttgcgggcgttttgctgtggtatgggctttacggattacgggattccgtgactcgtcgtctgttgggcggtgtctgggatggcttaacgcaacaggatttgcagatgtacgaagaggcatatttaagcaacgacgcggaccgcgagtcgccgtattactgtctgtttaataatgatctcactcgcgaaggcgtaaagacaggaaatgttatggatgacaccagccgggacccggcaataaccgaagatgaaatcagggcgctgcaattttctgccggggatgtagcggaaatagagcagacgattctctcttttgtcgatgcctgccacacccgtaaagtggcgatggtggtgggtagcaccattaacaccctcaaagatcgcgatgagtggatgattgatggacgcgggattaacaacgtctgcgatgtgttgatgtatctcgaagaagacgatacccgtgatgttgtggaacggcgctgcactggaaacgctgtctctggacactgcatctgcaaccggaaacggtctgtggatgaccctctggctggcaattccggtaatggtgattgccacgctataaaccagcaggatcgggtagatagcgaagaagtagagcaggaggtttattttgccaaggtcgaggatgtgcctgggaaaaagaaacacaagtctcagatcctactgcagcgtttcgtcaatgacatgggcgctaaagccaatcaaaaccagcgacggatattgctgtgccagttgtcgggcaagcgtaatgccgtcgatatccggcagatcaaaatccaccagtgcggcagcaaacgcaatgttcatgcactgaatcgccaccgcgaacagctggcggcgcaggtcaaagcgcgtacagctgaattgcaggaactggtgatagaacaccgacaggcacgggcggaagcagaaaaagccagccaggcaaaatcggcgtttctggcggcgatgagccatgagatccgcacaccgctgtacggcgcagaacagagcgtgcataatgactggaaagcgacgcagatcaaagtggaagatgtactgtttgcgatggtgaaagaagtagaaaatcgcccagctgtttcgctgaaaaccagcccggagctggcggagctgctacgtcagcagcacagcgatgtgcgtccaagccgccatctgaataaagcgcactggagcaccgtgtatctcgacggttcgctgccagattcgcaaatctattatctggtggatgcgtcttatcagcaggcggtgaatttactgccggaagaaaaacgtaaattgctggtcagggcagccgaatctgggatcagcaaggcaaggagtatgtcgatttcgcgggtggcgatgcaggaaccggcgtttaacagccattatctggcagatatgaaactgtgggtaacgcacagccagtttattgttgagcatattaatgccatgaccacgctggcgcgggaacaccgggcattgccacctgaactggcacaagagtatttacagtcttgtgaaatcgccattcagcgttgtcagcagcgactggagtatgacgaaccgggtagttctggcgatgccaatatcatggatgcgccggagatgcagccgcacgaaggcgcggcagcgccggagactttagtgacagataacttttcagcgccggaagtaatggcattcgccgctgtttatcggccacacgcgggcgatgcggctgaaatgccagtagcagaattgcccaaccggattatccggatgctggcgggcgattttttccagtgcgccaatttgcttttccatcgtaaaacgcgttggcaggcgatggtaaagaatgtcatcagccagcacgcgcaggcgagcggcgacggtttgcgcattccagcggataacttcttccgcatggctacgctcgaccagcttttgcacctcttccggctgatgcaaactgaccgaaatatgttcctgtactaa

SEQ ID NO: 28749 - DNA, 750 bp, Homo sapiens
  SIMILAR (750)..(526): 961254mologous to Escherichia coli sohB,accession number M73320,Smith-Waterman Score=358.
tcatccaacggtatcatgataatattttcgcatctcctcctgcataatggtttccggtgcgcggttgccggattgaacaagtattacaggagaattaaggggaacgcggaactcatctccatcaagcgcagcttgaatatcctcttcggatacggccagagtggtttcattaccgaataaatctttgtctgtcagttgctggggagtgtttttattaatattagactcctgtcccgataccatgcgcacccgcgcattctgtgcgacggctgcattgttcagcgcctgaccttctgcgttggcgctaaacccatcaccgctggcgatcacattgacgcgttgtcccgctttggcaaagttcttttctggattttccgttttatcgaccagaccaccaaccgcttcaattccgccataggcaaaaatggcaaataccacaaacgatagcattgccagaccggactgataacccgggttcggtgatgcaaggaaattaatatccttgaactttttcatctgggtatgaactgcttgaatcatgtaaccgccgctggcagcgactttgtctaccgtaacagttaaaggaatgtttttatcgcgcagacgctgcagttgcgaagccgccagcccgtaaccatgcaccatgccaccagggctttccagacggagcacaacctgatcctgcggtttgaatgctgcgagtacagccgttatctcttcacgtagcgagttcacttcatgggcgtccat

SEQ ID NO: 28750 - DNA, 1338 bp, Homo sapiens
  SIMILAR (169)..(603): 951254mologous to Escherichia coli Flagella basal body p-ring formation protein FlgA precursor,accession number D90743,Smith- Waterman Score=682.
atgttagttagtaaaagcaacggatttaacgctagcgcagttttgggtagtggaagttataatgaaaataaatcttctaaacacatggagctactagctcatagtattttaaaattaattgtcataaagttgggtgccgagtctcgaattggtattctatgttttagaaatgtgttggcacgctccggaacggacacacgatattacaaggttaatgtacagcccacaggaaattatgtggttgccccgatgcccattgcgcggggaggaaagctggaagctggcaatgtcaaactgaaacgcggacggctggataccctgccaccgcgtacggtgctggatatcaatcaacttgttgatgccattagcctgcgcgatctatcacccgatcaacctatccagttaacccagtttcgccaggcatggcgggtaaaagcgggacaacgcgtcaatgtgatcgccagcggtgatgggtttagcgccaacgcagaaggtcaggcgctgaacaatgcagccgtcgcacagaatgcgcgggtgcgcatggtatcgggacaggtagtcagcggcgttgttgatgcagatgggaatattcttataaacctctccggcggaaattaataaaaactattaccagttacctgtggtgcagagcggtacacaaagtaccgccagccaggccaatcgtctgttatgggtagagcaggtcactgttcctgactatctggcggggaatggtgtggtttatcaaaccagtgatgtgaagtatgtgattgccaacaacaacttgtgggccagcccgttggatcaacagttgcgcaacaccctggttgccaacctgagtacgcaactgcccggctgggtggttgcctcccagcctctgggaagcgcccaggacacgctcaatgttaccgtaacggagtttaacggtcgctatgatggcaaggtcattgtcagtggtgagtggctgttgaaccaccagggacaactgatcaaacgtccgttccgtctggaaggagtgcaaactcaggatggttacgatgagatggttaaagtgctggccggtgtctggagtcaggaagccgcttctattgcacaagagataaagcgtctaccttaattataaagatttgtaaatataaccgtctccggtatgttgcctgaggcggtttttttgtctctaacgtgcggaaaaatttgttcctcttcacattttttgtacaaccgacatgcccgtgtagctcacaaatatgacagtggcgtgaattttgcgcattgacggcagttatgattcgcggtattgcttaactgtgattgcacatttagtaatcactgttttct

SEQ ID NO: 28751 - DNA, 1584 bp, Homo sapiens
  SIMILAR (1410)..(700): 881254mologous to Escherichia coli acriflavine resistance protein,accession number M96848,Smith-Waterman Score=1060.
ttagtagtggttgttagggccatgaggtctgcgttgttgctttgaatgcgtgttacagagtgattttgcggatgttgccgctgtttctccgccactgtcttgggctctacgagccccagataccgccgctaccccctccgcatttctgctgttctgtgagttttcgtttattgcgtgggtgtgatattgtaatggggctagcgtgttttgccggttgggatagattgtgcggaaatcgggtattgatggtttagccggcaatgttttcgtgatcatgatcgttgtcgcattcgagtggacgctgtagcagggggggcatatctttctgggtagtctgggagttcggtcctgttgcgtgtttggctgcaagcgtggtgtgactgtgagtgtccgtcgtatggttgtggttgagtccgtccggtcaagggtgtctcggttgccgtgtttggttgtagagcggcctagccgccctttgtgaaggtgatctgtgatgacgcgtcgcgcgacgctaagccggtacggacccggagtcgtcaggcgaggtcgaggtgagtctgatggatagcggtatagtagtagcgccaatgaacgcataaccgtcctgttcacccgcgcgttgtgtcccgatgtcaagtaatggcaagttgggccaggtacagggtttgcaccgtactgggaatagcagggcagtagaagcaccgtccagtcataaccaatgcccgcaggtaattttgacgcaaggttttccatcaacgccatggcatcgccggaactggttcctggcgcggcttccccctgaatctccattgacggcagaccgttgtagcgttccagtcgcggagagccatacacccaatgtgaagtggtaaaggccgagaatggcaccatttcgccgttggcgctgcggacataaagtttatcgacatcttctggcagcatacggaatttggcatccgcctgaacatacaactttttcacgcggccacggtcgatgaagtcgttaacgtaagtcccacccagcgccgttgaaatggtctgattgatgtcagaaagtgaaacacctaatgcctgcgccttttcctggtcaacttccagtttaaactgcgcggtgtcttccaggccattagggcgcacgctgactaagctggcaggatgttgcgccgccataccaagcaactggttacgggcctgggttagggcatcgtgacccagcccagcctgatcaattaactcaaagtcgaaacccgttgccgtgcccagttcaacaatggctggcatattgaatggaatgacaaaaccgtcgcgatcttgcccaaattccattctgtgattcaaaggatggaaacctcttttggaacaatctctagttttgcgtcgttttaacctaaccccgttattatactccccgctaggacaatcttttgtgggggaatgagtctcgatgagatcaaggcgccgaccgattcctagcatgtggaaggtttcaaaggaacgctgtctgaaggaccgcaagggcccctggggacccgaaaccagtagggctgacaaagaccgccacgctactacatcgcaagcctggaccat

SEQ ID NO: 28752 - DNA, 2916 bp, Homo sapiens
  SIMILAR (2245)..(2880): 981254mologous to Escherichia coli glutamate dehydrogenase,accession number K02499,Smith-Waterman Score=1093.
atgagcggagagatcttctgcacgcacgttacgaaaagcaccgcccttcgaacggcccatcggggtgcgaattgcatcgacaatgacaacctgttccattgtgactccttaagccgttttcaggtcgccaaccggacgggctggctcaaccggaggatagtacggttcgttatgacgcgctttattacgcagaccttccggcacttcatacagcgggccgaggtgctgatattgctgtgccatatcgaggtattttgcgctaccgagggtgtccagccagcggaacgcgccgccgtggaacggagggaagcccaggccgtagaccagcgccatatccgcttccgccggagtggcgataatgccttcctccagacagcgcaccacttcgttgaccatcgggatcatcatgcgggcgataatctcttcttcgctgaaatcgcgcttcggctggctcacttctgccagcaggtcttcaacggcggcgtcttcttctggggatcctctagagtgcgactgcaggacagcagctcactatggcaacaacgtcggggtattttttacataatgcagcaggcggtgccagatagagagttactgaaagcaccaaccgccaggtgcgcgcattgtccgtggatggccatgaatggcattcaggccatcgcagaggcattagaacaggaaggaagcaatcacgaggttcatgtttatgaaaggctgcgagagagggcgctggtgccgctcaatcattcagctgtatgccagcctgctattacaggtgtttttctttgccgcgaatatttacggttggtatgcgtggtcgcgacaaaccagtcagaacgaggcggagttgaaaattcgctggtgcacagtgccgacgacactcagttggttgcggaacaggggtggctggttggcgcgcgccgcgttccctcaccacattacgattgccgcccggatgacgaaacacccaccctgctggtggtgcacaatattagcctgccgccaggcgagtttggcggtccgtggatcgacgcattattcactggaactattgatccgcaggcacatcctttctttgctgagatcgcccatttgcgcgtctccgctcactgtttgattcgccgtgatggtgaaatagtccagtatgttcctttcgataaacgtgcatggcatgcgggagtctctcagtatcaggggcgcgaacgctgcaatgatttttctattgggattgagcttgaaggcaccgatacgctggcgatatgccgatgcacagtatcaacagcttggttagtcaatgaccttttgcaccgctttgcggtgctttcctggaagaacaaaatgtcatatacaccgatgagtgatctcggacaacaagggttgttcgacatcactcggacactattgcagcagcccgatctggcctcgctgtgtgaggctctttcgcaactggtaaagcgttctgcgctcgccgacaacgcggctattgtgttgtggcaagcgcagactcaacgtgcgtcttattacgcgtcgcgtgaaaaagacacccccattaaatatgaagacgaaactgttctggcacacggtccgaaaaatcctttgagtgtcagatttatagtacaaatttcttttataaaatccttactgtatctctttgccatcgcgcgtttcttctttgccatttctggtctggataccggtagcccgtttaccgctatcggcgcgacccgtgaagcgatgcttggcgtgctggtcgaaccgatgctgctgcttggtctgtgggttgccgcacaggttgccggttccaccaacatcagcaacatcaccgacaccgtttatcactggccgctgagccagagcatcccgctggtactggcgctttgtgcctgtgcgttcgccacctttatcgaaatgggcaaactgccgttcgacctggcggaagccgagcaggagctgcaggaaggcccgctctctgaatacagcggcagcggctttggcgtcatgaaatggggtatcagcctgaaacagctggtggtgttgcagatgttcgtcggggtgtttattccgtggggacaaatggaaaccttcaccgccggtggactgctgctggcgctggtgattgccatcgtaaaactggtggtcggcgtcctggttatcgcgctgttcgaaaacagcatggcccgtctgcgtcttgatattactccgcgcattacctgggctgggtttggctttgcatttttagcgttcgtctgggttgatgatcgcaaccagatacaggtcaaccgtgcatggcgtgtgcagttcagctctgccatcggcccgtacaaaggcggtatgcgcttccatccgtcagttaacctttccattctcaaattcctcggctttgaacaaaccttcaaaaatgccctgactactctgccgatgggcggtggtaaaggcggcagcgatttcgatccgaaaggaaaaagcgaaggtgaagtgatgcgtttttgccaggcgctgatgactgaactgtatcgccacctgggcgcggataccgacgttccggcaggtgatatcggggttggtggtcgtgaagtcggctttatggcggggatgatgaaaaagctctccaacaataccgcctgcgtcttcaccggtaagggcctttcatttggcggcagtcttattcgcccggaagctaccggctacggtctggtttatttcacagaagcaatgctaaaacgccacggtatgggttttgaagggatgcgcgtttccgtttctggctccggcaacgtcgcccagtacgctatcgaaaaagcgatggaatttggtgctcgtgtgatcactgcgtcagactccagcggcactgtagttgatgaaagcggatatcccaagcaattaaagactgattctcacctccagatagagctatga

SEQ ID NO: 28753 - DNA, 2400 bp, Homo sapiens
  SIMILAR (1360)..(2328): 871254mologous to Escherichia coli Glycosyl transferase (lgtD) homolog,accession number D90739,Smith-Waterman Score=1471.
  misc_feature (1)...(2400): n = a,t,c or g
attacgaattcacggtccgttcccgtggatcgagttgagggttactatcttgacaacgacaaagttaacgtggatagagtctttacggttaacggctttagcttcagcggccaggcacaaaacgccggtatggccttcgtcagtctgaaaccgtgggaagagcgtaatggtgacgaaaacagtgcggaagcggtaatccatcgtgccaaaatggaattgggcaagatccgcgacggttttgtcattccattcaatatgccagccattgttgaactgggcacggcaacgggtttcgactttgagttaattgatcaggctgggctgggtcacgatgccctaacccaggcccgtaaccagttgcttggtatggcggcgcaacatcctgccagcttagtcagcaccatttcaacggctctgggggggacttacgttaacgacttcatcgaccgtggccgcgtgacaaagttgtatgttcatgcggatgccaaatgtcggatgctgcccagagatgtcgatgaactatatgtccgcagcgccaactgcgaaatgggccattctcagacttaccacttcaattggcgtatggctctcgtgactggacgctacacgttcagctctgccatcggcccgtacaaaggcggtatgcgcttccatccgtcagttaacctttccattctcaaattcctcggctttgaacaaaccttcaaaaatgccctgactactctgccgatgggcggtggtaaaggcggcagcgatttcgatccgaaaggaaaaagcgaaggtgaagtgatgcgtttttgccaggcgctgatgactgaactgtatcgccacctgggcgcggataccgacgttccggcaggtgatatcggggttggtggtcgtgaagtcggctttatggcggggatgatgaaaaagctctccaacaataccgcctgcgtcttcaccggtaagggcctttcatttggcggcagtcttattcgcccggaagctaccggctacggtctggtttatttcacagaagcaatgctaaaacgccacgggatgcgcgtttccgtttctggctccggcaacgtcgcccagtacgctatcgaaaaagcgatggaatttggtgctcgtgtgatcactgcgtcagactccagcggcactgtagttgatgaaagcggattcacgaaagagatactggcacgtcttatcgaaatcaaagccagccgcgatggtcgagtggcagattacgccacagaatttggtctgggcgtagagagcgtcagagaaacaatgcgctgcccgtactgggtgcaacttctgacacaaatccagcacgatatcagtaacggtcaacccatctggctggcgctaaaaaataccgtgagaacaggagaggcatccggctctctggatctcatgttagacaacctcgcccatcatcatcgggaaaacacaatggcgctggcggataacctcgcagccttactggaaccggcgttgctgatcataacgggaggaattattgaccgcgatgcggcggcatatattgtggaaccgatgttgtacaacccgcgtgtgggtgccgtaaccggtaatcctcgtattcgaacacgttctaccctggtgggtaaaattcaggttggcgagtattcctcaattattggtttgatcaagcgaacccagcgtatctatggaaacgtatttaccgtttccggtgttattgccgcatttcgtcgcagcgccctggcagaagtgggttactggagtgacgatatgatcaccgaagatattgatattagctggaagctgcagttgaatcagtggacgattttttacgagccacgggcactgtgctggatattaatgcctgaaacgttaaaagggctgtggaaacagcgcctgcgctgggctcagggcggtgcagaagtattcctcaaaaatatgacaaggttgtggcgcaaagaaaactttcgaatgtggccgctgttttttgaatactgcctgacgacaatatgggccttcacctgcctggtcggtttcattatttacgcagtccaacttgccggtgtaccgttaaatattgaattgacacatatcgctgcgacacatactgccggaatattattgtgtacgttatgtttactgcaatttattgtcagcctgatgatcgagaatcgctatgagcataatctgacttcatcgcttttctggattatttggttcccggttattttctggatgctgagcctggcaacgacattggtatcatttacacgagtcatgttgatgcctaaaaagcaacgcgcccgttgggtaagtcccgatcgcgggattctgagaggttaatatgaacaatttaattattacgacccgacaatcaccagtacgtttactggttgattatgttnctgcacc

SEQ ID NO: 28754 - DNA, 373 bp, Homo sapiens
  SIMILAR (170)..(69): 1001254mologous to Escherichia coli hexosephosphate transport protein,accession number M89479,Smith-Waterman Score=167.
gtcaacattgacggcaccatcgtcattggtgaaggtgaaatcgacgaagcaccgatgctctacgacttttcgcttaacgctgattcatcgattcgccattcgagatggctgacaataccgcgcccttccagctccatttcccgcatcagtgagcggatggcctgctccaggccgctgaacaatgcccgcctgagtacgaatagcagtgatggtctgaccgatatcatcatgcagctcacgcgccacatcacggcgcacgctctcttcggtttccagcaaccgttcagccagatgctgattgcgcgccagttccttttgcagcgactggttaagttcacgcaaccgctggatgccagcgccaagcaacaaccct

SEQ ID NO: 28755 - DNA, 702 bp, Homo sapiens
  SIMILAR (121)..(699): 961254mologous to Escherichia coli Glutathione-dependent formaldehyde dehydrogenase (EC 1.2.1.1) (FDH) (FALDH),accession number D90701,Smith-Waterman Score=964.
atgcttgacagcagacacaagggaaccctgctgggttatggggccccactggccatcccgacatgctgccccgattcagaccttcatctggtagggtacgtagctaacgtaaatcagccttatccctaccgctcgcatttcgccgccgaccgtaccggcgcgatcccgattaattttgatgaagacagcgatccggcacagtcaattattgaacaaacggcaggtcaccggggcgtggatgcagtaatagacgccgtcggttttgaagcgaaaggcagcaccacggaaacggtgctgactaacctgaaactggagggcagcagcggtaaagcgttgcgtcagtgtattgcggcggtcaggcgtggcggcattgttagcgtaccgggcgtctacgctggatttattcacggtttcctgtttggcgacgcctttgataaagggttgtcgtttaaaatgggacagacccacgttcacgcatggctgggagaattattaccgttaattgagaaaggattactgaaaccagaagaaattgttacccactatatgccgtttgaagaggccgcccggggatatgagattttcgacaaacgtgaagaggagtgccgtccggtgattctggtacccggtgcacaaagcgcagaggcggcgcagaagacggtttcaggtctggtgaatgcgatgccgggcggaacaatatga

SEQ ID NO: 28756 - DNA, 2109 bp, Homo sapiens
  SIMILAR (1482)..(1324): 811254mologous to Escherichia coli similar to fructose- specific phosphotransferase enzyme II,accession number L19201,Smith -Waterman Score=221.
atggaattgagcgacaaagctgttcgccacgctgaattcctcgcccaggatgacggagttattcatctacttcacgtactacccgggtcagccagcctgagcctgcaccgttttgccgctgatgtgcgtcgttttgaagagcatctgcaacatgaagcacaagaacgtctgcaaacgatggtcagccacttcaccatcgatccttcccgcattaaacaacatgtccgtttttcacttactagtattaggaccatgcaagttctggaacacctggggcaggatcagtgcctgaaaaacaaaagtctattcccgattccatggggaagcttctacgcagcaccattgttactgttgacgctgattaccctggcgttgctcccactcttcctgtacattacctatcgagtcggcaccattcgtcgcgagatctccaagagcacgcagcgcagcctggcggatatgagtgcgctgaccgaggaaacgctctcggtgtctggtatgttgctgaccaaggcattcggacggcagacacgtcataacaagtctgtgcaggattatctgaaagtgcttaaggaaaaaaatgcgcagcagccttcagctgaatccgcccccggcgtcgctatcgcacctggcggcagaccggtctgcacttacgcgcaaacgaaagtctactcctttggtttgccaagtattttcaccttcatgcaaaccatcccgtcaacgggaattgatttcaccgtctgggccagcgttattggcggtgtcattgccatcggttgcgcatttgtcgttgcgctgtaccgttatcgctttcgtggtaagccgttcgttagcggaatgctgtttgtggtgatgatgtcaccagatatcgtgatggcgatttcgctgctggtgctgtttatgctgctgggtattcagcttggcttctggtcgctgctgttctcgcatatcaccttctgtcactcgagtctctctataagcagcgaggcatcgccagcaccagataacgaacccacggatcaggccgatcaggtagatccaaccaggtgccacgtgattccgaaagcgatcaccagcacgccggtatgccgccccagtatggcggtaatcatcggcaacggagctgccagagccctctttttcctgtcgggtaaacagtttgggcgcaatgaacgtcgcaagacccgccgcgacgggcggcatcagcgcgacaacgccgacgatggcgtaccagtcataaatgtgtttttccagcatgagaagcagaagaaccaggcggttttattgatggggccgcccatatcgaacgccagcatcgcaccgaccagaaacgctgccgcaaacttcattgatggaggaatgatagcaaaccagaaacgccggagcgaaagccggtttatcggcaatcgacgaggcaatataagcgcccatgatggggatcataaaggtgaagccaaggtaaccgatggattcaactacccagtcttcacggaagttcgcggtgattggcgtttcgatgatggagccatccggcttcgccatcagaccacgcataccagcaagctgacgaatctgtgccgcagaaccactgctgcacctctgttagacgcgtacactagaccctgcgttatcctatgtctggtgaaaacgctagtcgatagccgaggctgtcgattgactgcaagtctggtcgcaatcgcctgctggggcagcacggcagggtttagccgtattaggcgcgcgtctatccagctatccgtcgacgtcactagacttcgacttgcgcctacggtacgattcgagcttgcggacgaggcgggtatcagactcacatcaagagcgcggctaagtacgcgtgtatccatcagaactcacggggcatacacgcagcgaaacgaaccatttgaagccaaagtaccagttgatccgctgaaaaagaaaatcgccagtgtgtttcttgaatcttttttgttctattccggtttagccgccgataccgcacgaataaaggtcgatttacccgcgtttggcatccccaacataccgacgtcagccagcagcatcagctccagcagcagctcgcgcttatcgatagcgatatcaccgtaa

SEQ ID NO: 28757 - DNA, 1165 bp, Homo sapiens
  SIMILAR (1)..(753): 991254mologous to Escherichia coli Nodulation protein V (EC 2.7.3.-),accession number D90844,Smith-Waterman Score=1276.
  misc_feature (1)...(1165): n = a,t,c or g
atggtggcgttttatcgccatgccgggcgcatgtggccgggaattgcgctgagctgttcgctgggaaatatcgccgcatccatcctgcttttttccaccagctcgctgaacatgacctggacgaccatcaatattgttgaagccgtggtcggggcagtgctgctacgtaaattgctgccgtggtataaccccttgcaaaatctggctgactggctgcgtctggcactcggcagcgccattgttccgcctctgttggggggtgttctggttgtcctgctgacgcccggagacgatcctctcagggcatttttgatatgggtactgtcagaatccatcggcgctctggcactggtgccgctgggattgttatttaaaccacactatctgctgcgccatcgcaacccacggttgctttttgagtcgctgctcacgttagccatcacactgacgttaagctggctttcgatgctgtatctgccgtggccttttactttcattattgtgctgttgatgtggagcgccgtgcgtctgccacgaatggaagcctttttgatcttccttaccacggtgatgatggtgtcgctgatgatggccgcggatccctccctgcttgctacgccgcgtacgtacctgatgagccatatgccgtggctaccgtttttgctgatcctgctgcccgccaacatcatgaccatggtgatgtatgcctttcgtgcggaaccgaaacacatttccgaaagcgaaaaccacttttcggaaacgcgatggaataattccgctaatccgtctgctcagccgattaactatggctatcaaccgctgtttgaagatcgtcgaccacgcaatattggcgatacgctgaccatcgtgttgcaggagaacgtcagcgccagcaaaagctcctctgcgaatgccagccgtgacggtaaaactaattttggctttgatactgtgccgcgctatttgcaggggctgtttggtaacgctcgtgccgatgtcgaagcctccggtggtaacacgttcaacggaaagggcggggccaatgccagcaatacctttagcggcacgttgacggtgacggttgacccagttactggtcaacggcaacctgcatgtggggggtgaaaaacaaattgccattaataagggtttgatcgaccnctag

SEQ ID NO: 28758 - DNA, 945 bp, Homo sapiens
  SIMILAR (489)..(22): 981254mologous to Escherichia coli K12 putative GTP-binding factor,accession number AE000399,Smith-Waterman Score=816.
ttaatcatcagtgattaacgcttggtaaatgaactcaacgccttcttcgtcgtcttcgtcccagtcgtcatcacagtcttcatcatcctcttcagcaatctcttcaagctgctggcgatgataatcatcccacatgaattcgactttctctggctgtttcgcttcttcagcctgcacgaccgggttttcaatgataaaggtcatcacatcccagcagagatctttcacgcccagtccactcgccgcagagatcagataatatttatcttcccagcccagcgcctcagcgatcgctttcgctttctcttcggcttctaccttatccagcagatcgatcttgttgaacactaaccaacgcggtttcgtcgccagatcctggctgtatttttccagctcgctgataataatacgcgcgttttcaaccggatcggtaccgtcaatcggatcgatatcgatgaggtgcaacaggacacggcaacgttccaggtgggtacgtaacgcgcgtctaggaagaacttcggccggggcaaaacgctggaagctgatactgcgtggatccagcgcggtatgcagagcggtggtgttaatgagaacgcggtggcttccggcaaagcgcgggggcgtcaggaaaagaatcaccgtgcatgcctgccggataacaaaggtccggtttccggtccgaagatcatcgacggtgcagagcttctgatcccgatggctggcctcatcaacaaagaagatgagctggcgcgtctggcgaaagaagtggcgaagattgaaggtgaaatcagccgtatcgagaacaaactggcgaacgaaggctttgtcgcccgcgcaccggaagcggtcatcgcgaaagagcgtgagaagctggaaggcttgtttctgagcatgaacgcccgcaagccaacatgttagttgaagcatcagggcgattagcagcat

SEQ ID NO: 28759 - DNA, 2718 bp, Homo sapiens
  SIMILAR (1524)..(916): 991254mologous to Escherichia coli ribonucleoside triphosphate reductase,accession number L06097,Smith-Waterman Score =1133.
ttatgcccagggcggtattgccgccgtgtttgatgaaactgacagcattgaacccgtgacacgttcccacatttcaggcaggttcagcgtcagataacccgattgcgttgcgccacctgtcgcggtaggaattggcaaaccgtagttattaaacgcacgattaagatcgctgctgtagttacctttgaagtcaattttcacttcagaacggtaggtcagtgcatagcggttatttttatccagttcatacaggattccggcgttccagccaaagccccactggttaccgttcagatgagcgattttggtattactgtcaataccgttggcggtagctgccaatgcttgcccttgctgagtttggccagcaggagattgcataatttggccagcaaccaactgccccagatcgcccccgacagagccgcctgcataagtatcgttaaactctgtagccagaccatagttagaggtaatagaagcgccccaaccaaattggtcgtaatcggtgcaacaaagtgcatgttcgacctggccaggttgctgggtcgatctagaggatccccaagtctgggtgtggtacgaatggacaacgaaaagagcttcgttgttgccgatattccaggactgattgaaggcgctgcggaaggcgcaggtctgggcattcgcttcctgaagcacctggaacgttgccgcgtcctgttgcacctcatcgatatcgatccgattgacggcaccgatccggttgaaaacgcgcgtattattatcagcgagctggaaaaatacagccaggatccggtcgtgcaggctgaagaagcgaaacagccagagaaagtcgaattcatgtgggatgattatcatcgccagcagcttgaagagattgctgaagaggatgatgaagactgggatgacgacagcgttaaacggacgtgcatccgggctacctaaatatccgcacacgcggcgagttaccgacacacgggaggcgtcatggttaccacatttcgggcaagtgaagcctttgctggtgcactcgaactcaccggtaaagccacactcgtagcactcatcaatcggtgtattggtgccgtaatacggtacatgctgatagctgtaatcccagacatcttccagcgccttcaggttgtgctgaatgtttggatactcgccgtagcaaatgaaaccaccgttcgccagcggcgggtaaggcgcttcaaagtcgatcttgtcgtacgggttcaccttcttctccacatcgaggtggaaactgttggtgtagtaacctttatcggtcacgcccggcaccacgccaaactcagcagtatcgagacggcagaagcgatcgcacaggttttcactcggcgtgctgtagagactgaaaccataacccgtttcttctttccactgatccactgcctgacgcagacgttcaacaatggcgatacctttcgcgcgaagctgctcgttgtcgtaaacatgctcgccgccgaacagcgcgttaatggtttcgtggatgccgatgtgcgacgttatatttggattgcaaccattggactcatgcgaggaagcagataaggaccaaaacctccgcgggtatcggataccttgataaccggcgaacatattttggccggggggagacccaggatttcgatgcatccgtctgatctcctctacgacgacggtatgtgcaagcactaagtgaacgcgcggcttcctggatgcacagctgagctctggcgacactagacaggtgacagcacggtagtgcgttgtctgcatcatggtggcgggggcaatcaggttatgccgcgaaagccctgaaccatcggcaataatggtgtttccaatatcgacaccggcttgctggcgcaggatctgacgcacggcgtccgacccggcccgccatgttccaggcacattgaagcgcgcatggcctatcatgcggaaaaccgtatcggcgatcatgttgtccgactttttcagcataatcttaagcagatcgtgcagcggggccgactgtttactggcaactaccgttccaggttcgttaacctgagtctggcgcagcagtgttccgctccaggtgatacccgcctgttttaactcatctttcagaattgcaccggcatagctggctccatcctgcacggcaaaagccaacgggagcggctcagaacgttgtggcaggcatcccgtcagcgtaaagcggttcaggtcgcctggcaccacatccagttcgcagtattgcgcttcggcagaaccacgggggagggtgcgtacctggctgaacatcgtaacggggtaataagatgccacgcgtataaaagccatatcaccaggcaggaaccccatggtggaatagaccgccgagctattattcgtcaggcgcgactgccagtcggccgggatcagcttgcctttatcgtgcaggatttgtacgtcggtcacctggttataagtgacaacgtcggcttttaagccctgtaaaatcgccagcgcctgttttgatgacccggcatgagattgttttatcgtcagtttgtcgccgccgttatcttttgcccattgttgctcaaacggcggattcagggcggcaaacagctcgcgggagacgtcataagaactgttcagcagttccgttgcctgtacatggcccgccagcagcagagaagcgaccagcgcgagtgagttctttttcagtaagttaacggccat

SEQ ID NO: 28760 - DNA, 4290 bp, Homo sapiens
  SIMILAR (1460)..(2059): 831254mologous to Escherichia coli hexosephosphate transport protein,accession number M89479,Smith-Waterman Score=838.
ttagcgcatttcagcgcgaacgcgctcaagatcttcaggggtatccacacctgtgccaggaacttcctgagcaacagcaacatggattttttcgccgtaccacagaacacgaagctgctctaacatttcgatgtgttctaacggacttggctgccagttgacgtaacgacggataaagcctgcacggtagccataaataccaagatgacgcaggaagttatcgccaacggtttcaaggccttctgcaaaacgatcacgatcccaaggaatggtggcgcgagagaagtacagtgcatacccttcagcgtcgagaaccactttcaccgcattcgggttaaacgcttcttccgcattgtggattggcaccgccagagtcgccatacccaactgacgcttagcgaggttatcagcaacctgaagtggttcgctgaagaacaatggctgccagtactcgatcccggcaggtaatgtgcctttactcacatgcatggtaaatatgttctgggtcgcgcttcacttcgaaggtatcgcgccactggctgcggaacagttcaattgccgctttatgtattcccgacgccaaactggcattggtgatccgtccaccgttcagttggttaacctgaacactgctaccgccagcggaggctcctgcgccgccaaccagaatattgccctgcgccagcgcatacacctgactgtcaacgcccttaagcggtgtcatcaacaacgtacctccacgcaagcttttggcatttcccatggaagaaaccaccacatcgatggtttgcccctgacgtccaaacggaggaagtgacgctgtcaccattaccgcagcgacgttttttagctgcatattggtgcccgtcggaacggtaattcccagctgtgagagcatgttattaagcgtttgtgtggtaaacggcgtctgggttgtctggtcaccggtgccatccagccccaccaccagaccatagccaatcagtgagttttgccttaccccctgaacaattggcgacaggttaaggaagaaacgctgcaaccagcccatattttgcgcttcgttaatgtagccattgcctacgtattcaatgcgcgcatccgccacctgagtagacggtacggtattgctgccgctgatagtgcgtggattaaccacgccagagaagcgaataaattcggtaccctgattaatggcaatctgtttttcacccaccacatgcaggttgccgttgaccagtacctggtcaaccgtcaccgtcaacgtgccgctaaaggtattgctggcattggccccgccctttccgttgaacgtgttaccaccggaggcttcgacatcggcacgagcgttaccaaacagcccgttctcctgcaacacgatggtcagcgtatcgccaatattgcgtggtcgacgatcttcaaacagcggttgatagccatagttaatcggctgagcagattgctgctgtttgttatcagtctctggctccagttgggattgccggacgaactgtcgcgctttacgccattctgtctggcgctgccgattatcgcgctggcctggcactatggttggcaaggggcgctgattgcgacgttgatgaacgccatcgcgctgatcgccagtcaaacctggcgcgatcatccggtggatttattgctctcgctgctggtgcaaagtctgacagggttgttgcttggcgctggcatccagcggttgcgtgaacttaaccagtcgctgcaaaaggaactggcgcgcaatcagcatctggctgaacgggtgctggaaaccgaagagagcgtgcgccgtgatgtggcgcgtgagctgcatgatgatatcggtcagaccatcactgctattcgtactcaggcgggcattgttcagcggctggcggcagataacgccagcgtgaagcagagcgggcagctcatcgaacaactatcgctgggcgtttacgacgcggattccgaccttgacagtgtcaagcaggcctgtcatggcgtctgtagagcgtccctcacgttgggtccgtctggtgtttcctcgcaattagactgggtgatgggttttgggaagacgcccacagagaggatccccctgctggagctgatgctgctggctgacgtcggtatgttggggatgccaaacgcgggtaaatcgacctttattcgtgcggtatcggcggctaaaccgaaagtggcggattatccgtttaccactctggtgccaagtctgggtgtggtacgaatggacaacgaaaagagcttcgttgttgccgatattccaggactgattgaaggcgctgcggaaggcgcaggtctgggcattcgcttcctgaagcacctggaacgttgccgcgtcctgttgcacctcatcgatatcgatccgattgacggcaccgatccggttgaaaacgcgcgtattattatcagcgagctggaaaaatacagccaggatctggcgacgaaaccgcgttggttagtgttcaacaagatcgatctgctggataaggctgaagaagcgaaacagccagagaaagtcgaattcatgtgggatgattatcatcgccagcagcttgaagagattgctgaagaggatgatgaagactgggatgacgactgggacgaagacgacgaagatggcgatgacgacagcgccgatgatgacaacagcatcgacccggaactggctcgcgaaaaatttgcggaactacgcgctcagtacgttgtaacgcgtgacaccatcaaagcgaaaggtcgcagtcacgctaccgctcaggaagagatcctgaaactgtctgaagtattcaaacagttccgcctggtgccgaagcagtttgactacctggtcaacagcatgcgcgtcatgatggaccgcgttcgtacgcaagaacgtctgatcatgaagctctgcgttgagcagtgcaaaatgccccgagaaaaacttcattaccctgtttaccggcaacgaaaccagcgatacctggttcaacgcggcaattgcgattgaacaagtccgtgggtccggaaaaactgcacgaatgtctctgaagaaaggtgcatcagcgccctgcaaaaactgcagcagaattgaagaaagaaaccgggcctgaccatcgagcaggttaaagatatcaaccgtcgtaatgtccctcggtgaagcgaaagccccgccgtgccgaagaaagagaatggttgaagccgaacttacgtctggttatttctatcgctaagaaatacaccaacccgggcttgcagttccttgacctgattcaggaaggcaacatcggtctgatgaaagcggttgataaattcgaataccgccgtggttacaagttctccacctacgcaacctggtggatccgtcaggcgatcacccggactctagagatagagtgtaccggtttggttgtctacgagcacgaagatgacagtgatgatgacgacccgcatcacggtaaaccgtccgcccatagcagcctgtgcgatgcaaccgggttgattaaccatctgattggcgttattgcggtgaccaaaatgaacgccagctcgctgaggacattgctcgacggcatgaatgccccctgtcgcctttactggcttcctggtggcactgttgattctgtcgccggaagtttaggtgcattaaaagcagtgttgaacaaccagcttaccggtctgggtttcgccaggcactttcagtttgacgcgaccatcaagggtcggtacttcgatttcgccacccagcgccgccatagcgaagttgatcgggacttcgcaatacaggttgttgccgtgctgctgtttatcgtcgggttgctgtgtatcagtttcccgttcgtctctggcgatattttaagcacagtagtgggcattcatcttcacggcgtagactttgctattgttgatccagttcgcttcaatgctggaactcacgctgtttaccatcgtcacgcatggctgggagaattattaccgttaattgagaaaggattactgaaaccagaagaaattgttacccactatatgccgtttgaagaggccgcccggggatatgagattttcgaaaaacgtgaagaggagtgccgtaaggtagacattcagatcagtacaacatgcagatctaccgacatcgcgatcccagttgatgccgaagtagtgtttaccatcgatgttagcaccagcagcgaaatcactcatcgccgcaacggtacggtcaatcaccaccggaatcggcatgtttaccggacccagttaacccggaccggctttaaccaccagcaggcataa

SEQ ID NO: 28761 - DNA, 1018 bp, Homo sapiens
  SIMILAR (593)..(943): 851254mologous to Escherichia coli Hypothetical protein HI1680,accession number D90733,Smith-Waterman Score=515.
atggcctttatgctaagtcctttgctcaaacgctatacctggaacagcgcctggctgtattacgcgcgtatttttattgcgctttgtggaaccacagcgtttccgtggtggctgggtgatgtaaaactgacgattccgctaacgctggggatggtggcagcggcgctgaccgatctcgatgaccgactggcgggacgtttgcgtaacctcatcattacgctgttctgcttttttatcgcctcggcctcagtagaattgctgtttccctggccctggctatttgcgattggcttaacgctctctaccagcggcttcattttgctcggcgctctggttcaacgctatgcaaccattgccttcggtgcattgctgatcgccatttacactatgttgggaacatcactgtatgagcactggtatcagcagccgatgtatctgctggccggtgccgtctggtacaacgtcctgacacttattggtcatctgctgttcccggtccgcccgctgcaggacaacctggcgcgttgctatgaacaactggcgcgttatcttgagctcaagtcgcgcatgtttgatcctgatattgaagatcaaagcgagggagccgctgcccgatgtgaccctagtcaacggcctggtgatggagacattgaatcagacgaaactctcgctgctgacccgcttacgtggcgatcgtggtcaacggggaacgcgtcgcacgctgcattattactttgtcgcacaggatattcacgagcgtgccagctcttctcatattcagtatcaaacattgcgtgaacattttcgccacagcgacgtgctgttccgttttcagcggctgatgtcgatgcagggccaggcgtgccagcaactgtcacgctgtattttgttgcgtcagccttatcaacatgactccgcattcttgagcgcgcttttacgcatattgatgctgcgctggagcggatgcgcgataacggcgcacccgccgatttactcaaaacactgggataatgcttga

SEQ ID NO: 28762 - DNA, 1006 bp, Homo sapiens
  SIMILAR (1)..(618): 801254mologous to Escherichia coli 3-(2,3- dihydroxyphenylpropionate)1, 2-dioxygenase,accession number Y09555,Smith-Waterman Score=833.
atgcacgcttatcttcactgtctttcccactcgccgctggtggggtatgtcgacccggcgcaagaggtgctcgatgaggtcaatggcgtgattgccagcgcccgcgagcgtattgcggcattctcccctgaactggtggtgctgtttgcgccagatcactacaacggctttttctatgacgtgatgccaccgttctgtttaggcgttggagcgacggcaattggtgatttcggcagtgcggcaggagagctgcccgtgcctgtggagctggcggaggcctgtgcgcatgccgtcatgaagagcgggatcgatcttgccgtttcttactgtatgcaggtggaccacgggttcgcccagccgctggagttcctgctcggtgggctggataaggtgccagttctgcctgtgttcatcaacggtgtcgccacgccgctgcccggtttccagcgtacccgcatgttgggtgaagcattggacgtttcaccagcactctcaataaacgcgtgctgttcctgggttccggtgggctttcccatcagccgccggtgcccgaactggcgaaagcgatgcccatatgcgcgaccgtctgttggggagcggaaagatttacccgccaatggttggcaaccgacgacagtcctgctaaaacgttcgtttgatatcatttttcctaaaattgaatggcagagaatcatgagtgacagccagacgctaatggtaaaactcggcaccagtgtgctaacaggcggatcgcgccgtctgaaccgtgcccatcaagttgaacttgttcgccagtgcgcgcagttacatgccgccgggcatcggattgttattgtgacgtcgggcgcgatcgccgccggacgtgagcacctgggttacccggaactgccagcgaccatcgcctcgaaacaactgctggcggcggtagggcagagtcgactgattcaactgtgggaacagctgttttcgatttatggcattcacgtcgggcaaatgctgctgaccc

SEQ ID NO: 28763 - DNA, 449 bp, Homo sapiens
  SIMILAR (447)..(145): 1001254mologous to Escherichia coli 3-(2,3- dihydroxyphenylpropionate)1, 2-dioxygenase,accession number Y09555,Smith-Waterman Score=527.
atgaagttcgcccagccagtagcacccgggccggaaccatgcagcaggacaacgggtttcgtcgccttgtccgcagtcattaaaatggatgcgcagcgttttacccgcttcttctacattcagaaaacggctggtggcggcttcgccaaatccggcaatccactccgggattgggcggtaataacgcccttcgctacgccagttgccaaacgcagaaatagcggcaaaagcggcgacccaggttttgatttcatgtgtcgactttccggcaatggcggaaagctcttcgttactgacggcatccagttcctgtatgcgtccctgctccagcaaagtcatgaactggttatcccaaatcgggttgagcggatgcagcgttctctgatcctcaacaaacttctcagcggcgctaatcacccgttgctgacgcaattcgcgctcactggcgg

SEQ ID NO: 28764 - DNA, 618 bp, Homo sapiens
  SIMILAR (298)..(609): 891254mologous to Escherichia coli Periplasmic chaperone focC protein,accession number D90732,Smith-Waterman Score=470.
atgggcgtttcgcgtgatacgttttatcgttaccgcgaactggtcgctgaaggcggtgtggatgcgcagattaatcgtagtcgccgcgctcctaaccttaagaaccgtaccgatgaggcaactgaacaggctgttgttgattacgccgtcgctttcccgacacatggtcagcaccgggccagcaacgagctgcgtaaacagggggtttttatctccgacagtggtgtccgttctgtctggatccccattttgttgcaggatggagatcagacgttgacttttaaagttgattatatcgctacggggaaagcgacttcagaaggtgaagagcaaatttcactgggtgtacgtaacaccagtccggatgttccttatcttattcagtcatgggtgatgaccccagataataaaaaatcagcagactttattattacaccaccggtatttgtgctgaatccgggcaatgagaatctgttacgcattatgtacattggagcgccgttggcgaaagacagagaaacccttttcttcactaacgtacgggcagttccttcaacaacgaagcggaaagagggaaataccctgaagattgcacacaagcggatgataactaactga

SEQ ID NO: 28765 - DNA, 1689 bp, Homo sapiens
  SIMILAR (14)..(58): 601254mologous to Escherichia coli putative aliphatic sulfonate binding protein precursor,accession number AJ237695,Smith -Waterman Score=40.
atggtatggtcctgccaaaagccaccagttactggaaaacgctatccggaatcaaaaatctcctgggtggagttccccgcgggtccgcaaatgttggaagcgttaaacgttggcagtattgatctcggcagtaccggggatattccgccaatctttgcccaggctgccggggctgatttggtgtacgtgggcgtcgagccaccgaagcccaaagccgaagtgattctggtggcagaaaacagcccgatcaaaaccgtagccgatcttaaaggtcacaaagttgcctttcagaaaggttccagttcacacaaccttttactgcgtgcactgcgtcaggccggacttaagtttaccgatatccaacccacttacctgacgcccgctgatgcccgcgccgcgttccagcaaggtaacgttgacgcctgggctatctgggatccctactactctgctgcattattacagggcggcgtgcgggtgctgaaagacggcaccgatctcaatcaaactggatcgttttatctggcagctcgtccctatgcagaaaaaaacggcgcttttattcagggcgtactggcaacctttagtgaggccgatgcgttaacccgcagccagcgcgagcaaagcatcgctttactggcaaaaacgatgggcttaccggcaccggtgattgcctcttacttagatcatcgccctcctaccaccatcaaaccggttaacgccgaggttgccgccttacagcagcaaacggcagatctgttttatgaaaatcgtctggtgccgaatctgttacgcattatgtacattggagcgcccgtacgggcagtcccttcaacaacgaagcggaaagagggaaataccctgaagattgccacacaaagcgtcatcaaacttttctggcgaccaaaaggtttagcgtatcccttaggcgaggctccggcgaaactgcgttgcacttcgtcagctgacatggttacggtcagtaacccaacaccttatttcattaccctgacagacctgaaaataggtggaaaagtagttaaaaatcaaatgatttccccctttgataaataccaattttctctgccaaagggggccaaaaatagcagcgtaacgtatcgaaccatcaatgactacggggcggaaacgccgcaactcaactgtaaatccctgttaagctctggtggagtgccatcgtttattggtgggctggtggtgtttgtgtcggcagcgttcaatgcacaagctgaaacctggttcgatcctgcttttttcaaagatgatccctcaatggtggccgatttgtctcgtttcgaaaaaggacaaaaaataacgccaggggtttatcgtgtcgatattgttctgaatcagacaattgtagatacgcgcaacgtcaattttgttgagataacgccagagaaggggattgccgcctgtttgacgactgaaagcctggatgcaatgggtgtaatactaaagcgtttgcggtaccggctccagacagcccctaagtcctttcttcttatggctttggcttctctagtgacaaacaggcatggcctgagtgtgcttcctatgtgcccatactgcgtttccctgggtcagggtactcggtgtagctctgtgaagacttccatttctgtagagctcaagaaagtggacaccctgaatttctcagaccttgggtaa

SEQ ID NO: 28766 - DNA, 981 bp, Homo sapiens
  SIMILAR (82)..(828): 991254mologous to Escherichia coli 3-(2,3- dihydroxyphenylpropionate)1, 2-dioxygenase,accession number Y09555,Smith-Waterman Score=1293.
gcaagaccctgaataaactggcgtcggtgatgacgctgacccgccctgatgccgacgtttctgtcgaaaaggtagcctgatatgcacgcttatcttcactgtctttcccactcgccgctggtggggtatgtcgacccggcgcaagaggtgctcgatgaggtcaatggcgtgattgccagcgcccgcgagcgtattgcggcattctcccctgaactggtggtgctgtttgcgccagatcactacaacggctttttttatgacgtgatgccaccgttctgtttaggcgttggagcgacggcaattggtgatttcggcagtgcggcaggagagctgcccgtgcctgtggagctggcggaggcctgtgcgcatgccgtcatgaagagcgggatcgatcttgccgtttcttactgtatgcaggtggaccacgggttcgcccagccgctggagttcctgctcggtgggctggataaggtgccagttctgcctgtgttcatcaacggtgtcgccacgccgctgcccggtttccagcgtacccgcatgttgggtgaagccattggacgtttcaccagcactctcaataaacgcgtgctgttcctgggttccggtgggctttcccatcagccgccggtgcccgaactggcgaaagccgatgcccatatgcgcgaccgtctgttggggagcgggaaagatttacccgccagtgagcgcgaattgcgtcagcaacgggtgattagcgccgctgagaagtttgttgaggatcagagaacgctgcatccgctcacaccgatttgggataaccagttcatgactttgctggagcagggacgctacgggactgacatctgttatcacttaacccattacaagcccgctgccgcagatattcccgtggcgagcgataacccagcgcactatgcggatgccattcgttataatgctcgaacgcctctgcaaggttctttgctgccgttaacccgtctg

SEQ ID NO: 28767 - DNA, 2001 bp, Homo sapiens
  SIMILAR (358)..(831): 971254mologous to Escherichia coli Periplasmic chaperone focC protein,accession number D90732,Smith-Waterman Score=802.
ggtttggaactgggcgaagaactagattgtgatgagagtttggaattcatggcgcttggcaccagcgagttatttacccgtggagatgtgcaacaccgcctgcgtagttgccgctgtcatcttcgcccatgtgaaggctcctgccttcaacatcagacgccagctctgcagctgttagactcacaccagtgtttgcgcagcgattcgtcggaccccgagctccgttcgtgggtcgtccaggtcgattctcccagagcatccaacagaattccccagcagatttgggtctccgtgaaggtccagcacaaccaacaggcaggaccggccaatcacactttggccgagaggtatcccccagcagactttattattacaccaccgctatttgtgctgaatccggcaaatgagaatctgttacgcattatgtggattggagcgccgatggcgaaagagagagaaacccttttcttcactagcgtacgggcagtcccttcaacaacgaagcggaaagagggaaataccctgaagattgccacacaaagcgtcatcaaacttttctggcgaccaaaaggtttagcgtatcccttaggcgaggctccggcgaaactgcgttgcacttcgtcagctgacatggttacggtcagtaacccaacaccttatttcattaccctgacagacctgaaaataggtggaaaagtagttaaaaatcaaatgatttccccctttgataaataccaattttctctgccaaagggggccaaaaatagcaacgtaacgtatcgaaccatcaatgactacggggcggaaacgccgcaacttaactgtaaatccgacgtgctgttccgttttcagcggctgatgtcgatgcagggccaggcgtgccagcaattgtcacgctgtattttgttgcgtcagccttatcaacatgatccgcattttgagcgcgcttttacgcatattgatgctgcgctggagcggatgcgcgataacggcgcacccgccgatttactcaaaacactgggatttttgctgaacaatttacgcgccattgatgcccaactggcaacaattgaatcagaacaggcccaggcactaccccataataatgacgaaaatgagctcgctgatgacaacccgcacgggttgagtgatatctggctgcattctaaccgtcacttatatgcgcacaggcctccgccagctccacaggcacgggcagctctcctgccgcactgccgaaatcaccaattgccgtcgctccaacgcctaaacagaacggtggcatcacgtcatagaaaaagccgttttctgaatgtagaagaagcgggtaaaacgctgcgcatccattttaatgactgcggacaaggcgacgaaaccgttgtcctgctgcatggttccggcccgggtgctactggctgggcgaacttcagccgcaatatcgatccgctggtagaggcgggctattggctcccaacaccccctttcgtgggggctcggccactcgctatgtctctgtgcgcacactcgttttgttactccccccgttataacagtggatattgtagtggaatacgattgaaggggtataacagggtcgaaatattaaacgtggccacggggttacgccacagggagagattagaatcctatagaactcctgacaaatgcaaatgtttcaaatatcaggtcaaccagccaatcaacaactgtggtatccatgtggaggccaaagtaattccctgggtcttgcacatcccacgcatgcactttgcaatcatgaagccgcactttaccgtgagacacataaacgactatattggagacgctagaagagtcaccatgatgctagtagcttttacacgtggcactatcaagcctatagagtcgcgagcatcatacccttatcaagggcctacaacacctcagattctcaacaaggcctccgacgtgcctgacatggagcaaagacccaatgggaaacaactgagactcagtgtctag

SEQ ID NO: 28768 - DNA, 618 bp, Homo sapiens
  SIMILAR (1)..(447): 991254mologous to Escherichia coli K12 putative ATP-dependent RNA helicase,accession number AE000454,Smith-Waterman Score=786.
tgggcccacctggcagcagatggtcatcgtgtcggtttattgacaggcgatgtcgcgcagaaaaaacgtctgcgtattcttgatgaatttacccgtggcgatctggatattctggttgccaccgacgttgccgcgcgtggtttgcatattccggcagtgacgcacgtctttaactacgatttacccgatgactgtgaagattacgttcaccgtattggtcgtacaggtcgcgcaggcgcaagcggtcactctatcagcctggcgtgtgaagagtatgcattgaatttgcctgctattgagacctatattggtcactcaattccggtaagcaaatacaatccggacgcattgatgaccgatctgccaaaaccgttgcgcctcacgcgcccgcgcacaggcaatggtccgcgtcgtactggcgctccgcgtaatcgtcgtcgttcaggttaaataaaaaatgtcatactcaaaatcattcaaactgtatcaagatggcaagagaatgaatcccgatgagcttactgtagtaagtgattcaggtgaaagaatgcagccaacacagagacagattgaaggatgaagagtatgggttccacctcgtcgctgtatgcagccatt

SEQ ID NO: 28769 - DNA, 2646 bp, Homo sapiens; identical to SEQ ID NO: 24978
  SIMILAR (703)..(1230): 1001254mologous to Escherichia coli K12 putative enzyme,accession number AE000325,Smith-Waterman Score=922.

SEQ ID NO: 28770 - DNA, 2958 bp, Homo sapiens
  SIMILAR (741)..(58): 891254mologous to Escherichia coli K12 putative membrane protein,accession number AE000312,Smith-Waterman Score=1028.
ttaacaggttcctggattcgtcttaataaccaaaaccgtaacaccgggagtaataattgctgtggtatccataaccgagatataaagttcatcgaccacgcctaccgttagctgcgcagaaacaggtttacctttcagcgacgaggttaattcgacattgaccagttcaccaggctggggatgggggttgtccgttttcacccggatatccagctggggaacggcaactttgatcccggcgttctgaaaactgtactgaccgttacgggtatacagcaccgaaaaagtgatgttaggcgcaaaggaattgctcactggaacccgggcttcatactgggtatcgtttaaacgttgtagcgttacgcagtttgccggatgcgaaagcagcgactgctgttccacgcgatcgctttccagcgtcaataatgcttcatcaattggctccggaaaggtaatcagcatcttcgcggtttcgcctggctggtacagcgttttatccgccacgatatctaccgtaccagtatgcgccgtgctgcccttaccgctgacggcatgacttaacccagcgagaattaagccgtctttatcgcgtaatgtcagattgtagttgccaggtttagcgaaattgacggtaaaggatttgccgcctgacggtagctctccgctatggctcgtgcggtcttcgagacgcaaccattcatacgtaacatgaaaccgcccgtaactgcggagacggttataaatagcggctcgtttatcggcgccgggaagattaaacccaattggggggtaatagcttgtaatggccttggtcacattaccgatacgtcctacggctttcgctttagatttggtgtaagcgatggacggacgcagaccgaaatcgaactggtattgcgcaactaacagaacgtcttgcgttttgttggcgaagccgctggtgtttgtaaatttattagtgatcggcgtagcgttacgggtttcaccgtagttcgctgccaggtagatgttgttcgcgtcgtacttcagaccagtagcccactgttcagcttttttaccgttgccaagaggttgagcttcttgcaggttggtacggtcagctgcaccataagcaccaacgataccaaagccttcgtattcgtagctgatagaaccgccaacaccgtcgccgttagaacggcgtgcagtgtcacgctcgtttttgccttggtactgagcagcaaagttcagaccatcaaccagaccaaagaagtcgttgttacgataggttgcaacaccagttgcacgttgagtcatgaacacgtcggtttgagtccaagtgtcaccacacgaattgtcagtccacgcaccgatgtcgtatgctacaccgtagttacggccgtaatcgatggagccgtagtcaccgaatttcaggccagcgaaggcaagacgggttttatctgtgctgcatgtggctcggcgaagtttgcatgcctgcaggtcggaaagataagtcgcctgccggatgccgttatcgcctgtgttggcggcggttcgaatgccatcggcatgtttgctgatttcatcaatgaaaccaacgtcggcctgattggtgtggagccaggtggtcacggtatcgaaactggcgagcacggcgcaccgtccatctccgccggactggatttcccgtctgtcggcccacaacacgcgtatcttaacagcactggacgcgctgattacgtgtctattaccgatgatgaagcccttgaagccttcaaaacgctgtgcctctccagctccatttgcagcctccccatggcctttgtagacataggtaatggcaatttcagtgccgttcagattggcgctgaatttcttcgattcttcaatagcactctgttcctgatagcgccagccgttatggagcagttgaataagtaacgcctggcagcgtatcagcaactgatgagcagtagacggcacaggcaaaacgctggcagaaggtagcggtgcaacaggcgtagtttccgggtcaacccccaggcagggttgtaatgacagcgctaccgtgccatggtatttgccggtgcagtagcgaaagattcggacttcaggatgctggcggtatatcgtcattgccctgcgtttactgataattttcatgtaatacctcaaagcagaccgtgttctgcgaacgaatagatttgcctgaaccagtcgctgcgtgagggttttgtcggcctggctaggtgtcgtctcgccggaaggatggttatgcgcgagtatcaccgccgccgcgttgaagtgcagagcacgtttgaccacctcccggggatgcacctcggtgcggttaatcgtgccggtgaagagcgtttcatgggcaatcaactgattctggttgtccagatacaacacccggaactcttcccgctcaagcgcggccatatgcagtcgcagccattcacgtacggcgtgggtagaggtgaaggtcccgcagcggtaatagtgtgcggtcatcgcgtcacattctgtacggcaggcatggtggctatacgcaatcaggcagacagcaatacctgctgcttctgcactcatttgggcatcgttaccgttcaggcagttaaacagacgccatgtctcatcgttgtcaggctcgggggacataaatgcgccgccattgctgagggtgtagaacgaccagataccaccgctgtagccctcacagaagcggtccatccaggcgaagatatgcggctccaggagtagccactgcgggatagcgccaaagtactgtggccagaaatcgatacgctgttcatcggggaccggcgtgacggtcagttcaaattcgggttggttagcgggtgcgaggtcgtgctgcgtctgtgttgtcatgggtatgtctccgtcaataaaaacgcaacgcatgggctggcgtatggggcttttgggggtactttgggcggcactctcttgcat

SEQ ID NO: 28771 - DNA, 3036 bp, Homo sapiens
  SIMILAR (16)..(1014): 991254mologous to Homo sapiens mucin 4,accession number AJ276359,Smith-Waterman Score=1644.
atggtttggggttttacatgctcaacaacagcgacactagagggacaatcaactgcagcttcttcaaggacctctaatcaggacatatcagcttcatctcagaaccaccagactaagagcacggagaccaccagcaaagctcaaaccgacaccctcacgcagatgatgacatcaactcttttttcttccccaagtgtacacaatgtgatggagactgttacgcaggagacagctcctccagatgaaatgaccacatcatttccctccagtgtcaccaacacactcatgatgacatcaaagactataacaatgacaacctccacagactccactcttggaaacacagaagagacatcaacagcaggaactgaaagttctaccccagtgacctcagcagtctcaataacagctggacaggaaggacaatcacgaacaacttcctggaggacctctatccaagacacatcagcttcttctcagaaccactggactcggagcacgcagaccaccagggaatctcaaaccagcaccctaacacacagaaccacttcaactccttctttctctccaagtgtacacaatgtgacagggactgtttctcagaagacatctccttcaggtgaaacagctacctcatccctctgtagtgtcacaaacacatccatgatgacatcagagaagataacagtgacaacctccacaggctccactcttggaaacccaggggagacatcatcagtacctgttactggaagtcttatgccagtcacctcagcagccttagtaacagttgatccagaaggacaatcaccagcaactttctcaaggacttctactcaggacacaacagctttttctaagaaccaccagactcagagcgtggagaccaccagagtatctcaaatcaacaccctcaacaccctcacaccggttacaacatcaactgttttatcctcaccaagtggattcaacccaagtggaacagtttctcaggagacattcccttctggccagcggcggctgtgggaggctgtgaagaggaggaaggccttgtgcaaacgcaagtcgtggatgagtaaggtgggtgaggaggtggaccaagttggaggtgcgtcctccttttgccagacctcctcttgtgcctcttgctgtatgcagagcgtcgtgatgacaacctcagtgctcctagatagttggcaagatgatactcagagagacaaagtctcagggaagaattcagcttcaagtccactttctggaattgactgtaattcgccaccttctcttacttcagacagtaacttagactctcaatttccacagttcccagaccgtcagctgtgccctccccactcccagcacgttgagagcagcagtacttggctctccaccctcaagacaggaaatttgcttagctcctaccatgcgccctgctgcacagtggccccaatgcctgcaaaagagacagcaccctattcactgcccaaggtcatgagaagggccatgctggattccaaagccatgctcttgccaccaacaccgccctgccctaccaagctctccaccaacaccgccctgccctgccaagctctccaccaacaccgccctgccctgccaagctctcaaccaacaccaccctgccctgccaagcttctccaggtcctcaacctccccgactcactgctgttctccgcagcccaggaactggagccacagagctggtgctgccgctggaatgacaagccctacctctgtgccctgtaccagcagaggcggccccacgtgggctgtgctacatacaggcccccacagcccgcctggatgttcggggacccccacatcaccaccttggatggtgtcagttacaccttcaatgggctgggggacttcctgctggtcggggcccaagacgggaactcctccttcctgcttcagggccgcaccgcccagactggctcagcccaggccaccaacttcatcgcctttgcggctcagtaccgctccagcagcctgggccccgtcacggtccaatggctccttgagcctcacgacgcaatccgtgtcctgctggataaccagactgtgacatttcagcctgaccatgaagacggcggaggtggtccctgtgtgctgtgtgctggttgcgagtgggccgtggttgcggtgggcgtgtgcatggggccctggttgcgtgtgcgtgttgcagtggccgtggttgctgttgcgtgttgcaggggccctggttgctgttgctgtgtgcagttggccgagtgcgttgtggtgccgggcccggtggctggctgcaagtgtgacgggggcaccttcggccgctactgcgagggctccgaggatgcctgtgaggagccgtgcttcccgagtgtccactgcgttcctgggaagggctgcgaggcctgccctccaaacctgactggggatgggcggcactgtgcggctctggggagctctttcctgtgtcagaaccagtcctgccctgtgaattactgctacaatcaaggccactgctacatctcccagactctgggctgtcagcccatgtgcacctgccccccagccttcactgacagccgctgcttcctggctgggaacaacttcagtccaactgtcaacctagaacttcccttaagagtcatccagctcttgctcagtgaagaggaaaatgcctccatggcagaggtcaacgcctcggtcagtgctgcaggccgcgctctggtgaacgtgagcacgctgaaggcttacttcagatgcgatggctacaagggctacgacctggtctacagcccccagagcggcttcacctgcgtgtccccgtgcagtaggggctactgtgaccatggaggccagtgccagcacctgcccagtgggccccgctgcaggtgcatagggctgtggccaggaggtggaggacagtgctggggaacccaagctgggcaagacactgcaaggggtccaggaattaggatggctcgagagatcagagaccagggaagagaggacagtggaaaaggagagttgtga

SEQ ID NO: 28772 - DNA, 1137 bp, Homo sapiens
  SIMILAR (722)..(976): 451254mologous to Homo sapiens MUC4/Y apomucin,accession number AJ242549,Smith-Waterman Score=179.
atggtgctgcagatggtgctgaggatggagaacccaccaagccccgctaggagccacctagactggatgcagagcatgctttacaaagggaagccccacaaaaggacacaggtggcaaatccggggacctggatgctgggtcaccgacttcatgttcttgctgacttcctggcctcggttttcttctccttaaggctgggtgaatggaatgagtttagatccctggacctccaggccctcctgtgccccggggtggccctgcttcacagggatgcccggtcacctggagaagagcatgagctcagcataaaagcaaggcccaccctgcaggggccagcagctgggagctgtccactaaccactatccttgcagctggacagcgaggcccctccaaaaggccgtctccacctgccaccgggaaaggacccggagcgaaggatgtcgtgggcggtcagcccagggatgatgcccggatggaaggaggagccacgttcctccacaggtgtcctccacaacaggtgtcctcacaacagagatggaaaactgttgtcctgaaagcgtcaccaaacaaaacctgtggaaaggttccctggccccttcggagaaacgcacttggttcgggccagccgcctgaggggacgggctcacgtctgctcctcacactgcagctgctgggccgtggagcttccccagggagccagggggacttttgccgcagccatgaagggggcacgctggaggagggtcccctgggtgtccctgagctgcctgtgtctctgcctccttccgcatgtggtcccagggccccggtcccctgtgtaaaaagcagtggtgaacggttggacctcctgacgcccaagttcttgagtttccaaatctgtgatttaaagctgagcccaaatgtgctgggacactcaaaaggaaaggatccctggacaagaggtcctgccaggaaaatcagccaaattttggccaacgaccagcaaggtgcacagggaagagcaggggctgaaactcagaggtccagcatcagcgacgcccttggcagcccagggaacacaggcaacgccttttggctctggagtcttaggctcttcatcggcgaactgagcccaggggaaggggctactatgtag

SEQ ID NO: 28773 - DNA, 3874 bp, Homo sapiens
  SIMILAR (1103)..(3469): 991254mologous to Homo sapiens MUC4,accession number AJ010901,Smith-Waterman Score=4251.
cctctgaagatggaaacatcaggaatgacaacaccgtcactgaagacagacggtgggagacgcacagccacatcaccaccccccacaacctcccagaccatcatttccaccattcccagcactgccatgcacacccgctccacagctgcccccatccccatcctgcctgagagaggagtttccctcttcccctatggggcagacgccggggacctggagttcgtcaggaggaccgtggacttcacctccccactcttcaagccggcgactggcttcccccttggctcctctctccgtgattccctctacttcacagacaatggccagatcatcttcccagagtcagactaccagattttctcctaccccaacccactcccaacaggcttcacaggccgggaccctgtggccctggtggctccgttctgggacgatgctgacttctccactggtcgggggaccacattttatcaggaatacgagacgttctatggtgaacacagcctgctagtccagcaggccgagtcttggattagaaagatcacaaacaacgggggctacaaggccaggtgggccctaaaggtcacgtgggtcaatgcccacgcctatcctgcccagtggaccctcgggagcaacacctaccaagccatcctctccacggacgggagcaggtcctatgccctgtttctctaccagagcggtgggatgcagtgggacgtggcccagcgctcaggcaacccggtgctcatgggcttctctagtggagatggctatttcgaaaacagcccactgatgtcccagccagtgtgggagaggtatcgccctgatagattcctgaattccaactcaggcctccaagggctgcagttctacaggctacaccgggaagaaaggcccaactaccgtctcgagtgcctgcagtggctgaagagccagcctcggtggcccagctggggctggaaccaggtctcctgcccttgttcctggcagcagggacgacgggacttacgattccaacccgtcagcataggtcgctggggcctcggcagtaggcagctgtgcagcttcacctcttggcgaggaggcgtgtgctgcagctacgggccctggggagagtttcagtgaaggctggcacgagcagcgtccttggcagttggcccaggaactggagccacagagctggtgctgccgctggaaggacaagccctacctctgtgccctgtaccagcagaggcggccccacgtgggctgtgctacatacaggcccccacagcccgcctggatgttcggggacccccacatcaccaccttggatggtgtcagttacaccttcaatgggctgggggactttctgcttggcggcgcccaagacgggaactcctccttcctgcttcagggccgcaccgcccagactggctcagcccaggccaccaacttcatcgcctttgcggctcagtaccgctccagcagcctgggccccgtcacggtccaatggctccttgagcctcacgacgcaatccgtgtcctgctggataaccagactgtgacatttcagcctgaccatgaagacggcggaggccaggagacgttcaacgccaccggagtcctcctgagccgcaacggctctgaggtctcggccagcttcgacggctgggccaccgtctcggtgatcgcgctctccaacatcctccacgcctccgccagcctcccgcccgagtaccagaaccgcacggaggggctcctgggggtctggaataacaatccagaggacgacttcaggatgcccaatggctccaccattcccccagggagccctgaggagatgcttttccactttggaatgacctggcagatcaacgggacaggcctccttggcaagaggaatgaccagctgccttccaacttcacccctgttttctactcacaactgcaaaaaaacagctcctgggctgaacatttgatctccaactgtgacggagatagctcatgcatctatgacaccctggccctgcgcaacgcaagcatcggacttcacacgagggaagtcagtaaaaactacgagcaggcgaacgccaccctcaatcagtacccgccctccatcaatggtggtcgtgtgattgaagcctacaaggggcagaccacgctgattcagtacaccagcaatgctgaggatgccaacttcacgctcagagacagctgcaccgacttggagctctttgagaatgggacgttgctgtggacacccaagtcgctggagccattcactctggagattctagcaagaagtgccaagattggcttggcatctgcactccagcccaggactgtggtctgccattgcaatgcagagagccagtgtttgtacaatcagaccagcagggtgggcaactcctccctggaggtggctggctgcaagtgtgacgggggcaccttcggccgctactgcgagggctccgaggatgcctgtgaggagccgtgcttcccgagtgtccactgcgttcctgggaagggctgcgaggcctgccctccaaacctgactggggatgggcggcactgtgcggctctggggagctctttcctgtgtcagaaccagtcctgccctgtgaattactgctacaatcaaggccactgctacatctcccagactctgggctgtcagcccatgtgcacctgccccccagccttcactgacagccgctgcttcctggctgggaacaacttcagtccaactgtcaacctagaacttcccttaagagtcatccagctcttgctcagtgaagaggaaaatgcctccatggcagaggtcaacgcctcggtggcatacagactggggaccctggacatgcgggcctttctccgcaacagccaagtggaacgaatcgattctgcagcaccggcctcgggaagccccatccaacactggatggtcatctcggagttccagtaccgccctcggggcccggtcattgacttcctgaacaaccagctgctggccgcggtggtggaggcgttcttataccacgttccacggaggagtgaggagcccaggaacgacgtggtcttccagcccatctccgaggaagacgtgcgcgatgtgacagccctgaacgtgagcacgctgaaggcttacttcagatgcgatggctacaagggctacgacctggtctacagcccccagagcggcttcacctgcgtgtccccgtgcagtaggggctactgtgaccatggaggccagtgccaacacctgcccagtgggccccgctgcagctgtgtgtccttctccatctacacggcctggggcgagcactgtgagcacctgagcatgaaactcgacgcgttcttcggcatcttctttggggccctgggcggcctcttgctgctgggggtcgggacgttcgtggtcctgcgcttctggggttgctccggggccaggttctcctatttcctgaactcagctgaggccttgccttgaaggggcagctgtggcctaggctacctcaagactcacctcatccttaccgcacatttaaggcgccattgcttttgggagactggaaaagggaaggtgactgaaggctgtcaggattcttcaaggagaatgaatactgggaatcaagacaggactataccttatccataggcgcaggtgcacagggggaggccataaagatcaaacatgcatggatgggtcctcacgcagacacacccacagaaggacactagcctggcgcgcgtgcacacacacacacacacacacgagttcataatgtggtgatggccctaagttaagcaaaatgcttctgcacacaaaactctctggtttacttcaaattaactctatttaaataaagtctctctgactttttgtgtctcc

SEQ ID NO: 28774 - DNA, 3646 bp, Homo sapiens
  SIMILAR (2480)..(2974): 991254mologous to Escherichia coli penicillin-binding protein 2 (PBP2),accession number X04516,Smith-Waterman Score=890.
tcagttcagggtgatgctcatcaggcaggtatagggcccattgcggtcctggcggcgttcggcgtataccgcgaggactccggcgatatccggaacgtccctgccggtgtaatgacagacgctaccgtgccactggtatttgccggtgcagttagcgaaagattcgggacttcagggatgctggcggtatatcgtcattgccctgcgtttactgataattttcatgtaatacctcaaagcagaccgtgttctgcgaacgaatagatttgcctgaaccagtcgctgcgtgagggttttgtcggcctggctaggtgtcgtctcgccggaaggatggttatgcgcgagtatcaccgccgccgcgttgaagtgcagagcgtgttgaccacctcccggggatgcaactcggtcggttaatcgtgccgtgaagagcgtttcatgggcaatcaactgattctgggttgtcagatacaacacccggaactcttccgctgctgcttctgcactcatttgggcatcgttaccgttcaggcagttaaacagacgccatgtctcatcgttgtcaggctcgggggacataaatgcgccgccattgctgattccacggtacggcttcgtcgtaggtatgcaggtatttgcgagatttccctttgccgctctgaccgtattcaatgaaggtttgttccagcaggccgaagtcgttagcctcggggccgaagtagctgatatgccgcccggcgtcgcgcgctttgcggatcgccatgtccatttccgggcgggtgtaacggtgaaaactgtcgccttccacctcagctgcatgcagatttaactgcgcgaatattttacgaaacgcgaggctggtggtggtggtccccgcgccgctggatctgcgcggcataatattgaccgtttcgtgcagctccgaccataccagcaccgcttctccgcactgtagctggcgtttgacgtcggcgactttctgttcaagtgtacgctcatgttcaccataatcggtgccttcacgtaacacaaagctttcaattaaattttccagcgtttcgggggagaggtcagtcaggaatgcgtgactccagccacatttgcggatgaagtaatgtaccgccaataaagccaacatgaccggcatggttaagtcaagttgatactccaacctgcgggggggaagacttttccggttttcgggaatcacccgggatggttccataaaccgggatcggcctttgggcgtggaataaaccaagcgtccggtttcagcagacggccccattaacgtgacaatgtcacctttatccaccgtaaagttaacgtttgtcagcaagcggctttctggtaaacgtagcgaaacatttttcacgcagagcattagcggagtccttgtctgaccataacctacccattttgcgactaacgcggtcagggcaaaaataataagcggtaatagcagttgccataaagcctgggcggcgagaataccgcttgtgccgccgctgcttaatgccaccgcctcagtggtgagcgtcggaaaacgccccgcgcccagccacagcgttggcatatactgcgcaataccgactgcaaatcccaccgcgaaggcaatcagcacagggcgcaacatgagtgggcatttcacgtaaaagaagattttggcccgcgaccagcccagtgtttgcgcaatcaaaattaaccgtgaatcaatgcgctgccaggcgggttgcaggataaacagcatccacggcatcacccacagcagatgcccccagaccaccgccgtccagcttccatccagtttcagccatagcgccagcgtgtactggcccgcaccagtggcagagcaggtaataaaatgggcaaacgccaccaccggacacaacgatttcgggtagccgtcattcgagtcctcagcgacgcaagatgcccgcgttaattcggcactttccgggtaatggtcatcatccctggccacaggattccgtacgcctgaacgtccggagcaccaagcacatttccagcctgataccgtaatcatcgcaaccgacgtaacacttcctccgcttttctgcacctcaaattttccgccccagattcgatcgccaaatagcgtccagccagttacccagcccatcgacagccgaacaacgaggtgtctgtgcaccgtgccggttaccagttcagtactgtccgccggaattgagtgaccaatataggtctcaatagcaggcaaattcaatgcatactcttcacacgccaggctgatagagtgaccgcttgcgcctgcgcgacctgtacgaccaatacggtgaacgtaatcttcacagtcatcgggtaaatcgtagttaaagacgtgcgtcactgccggaatatgcaaaccacgcgcggcaacgtcggtggcaaccagaatatccagatcgccacgggtaaattcatcaagaatacgcagacgttttttctgcgcgacatcgcccgcgaatggaaacagaaacgctttaaaaaaccgtggtatcagggtgacaccattccggttggtatcggtcagggttactggacagcgaccccaatccagatgagtaaggcactgatgatcctgattaatgacggtatcgtgaaggttcctcatttgctgatgagcaccgccgaagacggcaaacaggtgccatgggtacagccgcatgaaccgcccgtcggcgatattcattccggttactgggagctggcgaaagacggtatgtacggtgttgctaaccgccctaacggtacggcgcataaatactttgctagcgcaccgtacaaaattgcggcgaaatccggtaccgctcaggtcttcggtctgaaagcgaacgaaacctataatgcgcacaaaattgccgagcgtttacgtgaccacaaactgatgaccgcctttgcgccatacaacaatccgcaagtggctgtcgccatgattctggagaacggtgggagctcaggtcttccctttaacaaaaacacggaagctgaaaaccttctttcccggaaaaaactggacgtgaacaatagctggacctgctctgctggctccaaagcaaaagaagggcaatcacctgtggctgaccgcccacgacatccttcgctccgggtctttcccggtggcaggtggagacggccttttggaggggcctcgctgtccagctgcaaggatagtggcatttgcttctgggaggacccgacccgagacactcacgtaaaagaggatgcccacgtacagatgtggcagcaggccctccgagctgggattcagacccagcccaggaactggagccacagagctggtgctgccgctggaatgacaagccctacctctgtgccctgtaccagcagaggcgggcccacgtgggctgttgctacatacaggcccccacagcccgcctggatgttcggggacccccacatcaccaccttggatggtgtcagttacaccttcaatgggctgggggacttcctgctggtcggggcccaagacgggaactcctccttcctgcttcagggccgcaccgcccagactggctcagcccaggccaccaacttcatcgcctttgcggctcagtaccgctccagcagcctgggccccgtcacgggaccttcagccacatactga

SEQ ID NO: 28775 - DNA, 2343 bp, Homo sapiens
  SIMILAR (1869)..(934): 1001254mologous to Escherichia coli Citrate (pro-3S)-lyase ligase homolog,accession number D90702,Smith-Waterman Score=1618.
tcagcgatttgccgtcaaagcccagctgtatgatgtgggcggcttctgcagaaatccggcttcgttgttagcgtcggaatagacggtatcgaacgcctgaatacccgcagagcgcgcggcctgccaaatgggacagcgtgcggacagcagttcagttccttccggggagcgttctgtacgcaggttgcgcacatagtcttctgcaccgagggcgataccgatcaaacgctcggaagcgtgagcgatttccactgcgcgggtaatccccagcggagattcaatcgccgccagcaggccggtgctgccgggttcacgaccacaggctttttcgatacgcaggatctttttttcaatatccagaacatcctgagcggtatcggttttcggcagacgcacaacgtccgcaccaccgcgaacgacggcttccaggtcgttaacaccccattcggaatccagcgcgttgacacgcacaatggtttcaatatcgcgatacagcggatgttgcagcgcgtggtaaaccatgcggcgggcggtgtctttttcacgcaatgctacggagtcttcgaggtcaaacatcagggcatcagccgggtagatgaaggagttgctgaccatcgcggcattggcaccaggcacaaacaacatgctgcggcgggtgcgagttttacgttgttgcagcgaagcggaaatcattggcaatccgctggcgcgtgccagcagggcttccagtcgtgcacgtaaaatgcagtccagtgcgcctttgtcatcgacattcagctgtacgccgcgcacgttgtagcgggcgagaacgtccagaatggtggtgcgaattgcatcgccaaactgtttctcaacgctgctattgatttgcaggtcgatatcctgcgtatcgagtggggcgatgcgtatcatcacatccccagactcaagggtgcgagctgccgcgtcctggcgggagtgctcaagcaggttctgcaaataatgcagcgtgactgcagggaccagcggcgcgatagccgtgagatcgtttttcgccagcagttgacgtacccgggaagcggatatcggcatctcctggtaacgcagccgctcaatttcaaccagttcgatgggcggtgcggagatagtcggcgtttccagccagtagcgcatatcctggttgtactgggcggtaacgcgacaaaagggttcagtaccgacaaagcggtgagttacacccagcgcgggagcgaggtactgacggaaaatcttcagatcgatttcggtgtaacaatggttaatgacgctctgttctttaatgaagtagcaagggaacgtagcgcgggagatgatgtattcggagccacgatgcacagtcaggcgtggaatatcggcggtgccttttaacaccaaatccagccggtcttcataggggaagcgtgaagaatcttctttgactaaaaacagatgcaaccagtcgcactgtgccgcagcctgttgaatcagataacggtgaccattcgtaaagggattggcgttcatcacaatgcagccaatcttgttccctggatgacgaaattttttcagcgattcggcatagcgtttcagtcgcgtggcgctgttttccatcagcaccatcacgccgggtacgctggtcagcgtggaaaaaccgcactggcggaacagcgcctcgtattcggttttggtataaataaacagatgcgtgctgtgccgctcataggcgaggtttatcaattcagtggctaatgtcagcgccagtccttcaccgcggacggattcactgatagcaacgcatttaataatatttccggcaattccaccgcacgcgataagcttttcatcgcgggttacggtaataaatacttcgacttcattattttccaaagtggtttccacaggccttgatgttaaagaagatggttctgctattgctgatgcccacgctgtgtcactcacatcagtgccatgcttccgtgttgcttgagaggcgagcgatttgattttctccctatagagctgagcagcacgactgttgtacttggcattggtgtcattggtggaacacccatgttgatgaaaaaaggaagaatggagatggccctctgacttggatccagagctaggaatcttcaacttggcatcagcaatgtccacaaagttgtgcttggtgagtttgagacagtgaatgttgagaagagggcccagagctccctgtgccttgggatggctatgcacctgctccaatgccaactggtaatacaaagccctggaaaaagtcttttgtatgcggtaatacacaagggccaagcccccagtaccgaacacattgccgaaaaggaccat

SEQ ID NO: 28776 - DNA, 457 bp, Homo sapiens
  SIMILAR (1)..(222): 871254mologous to Escherichia coli dicyclohexylcarbodiimide- binding protein,accession number M12214,Smith-Waterman Score=312.
atggatctgctgtacatggctgccgctgtgatgatgggtctggcggcaatcggtgctgcgatcggtatcggcatcctcgggggtaaattcctggaaggcgcagcgcgtcaacctgatctgattcctctgctgcgtactcagttctttatcgttatgggtctggtggatgctatcccgatgatcgctgccatcgcgtttgtcctgttcgttctgttctgcatgaagtacgtatggccgccattaatggcagccatcgaaaaacgtcaaaaagaaattgctgacggcctttcttccgcagaacgagcacataaggaccttgtacttgcaaaggccagcgcgaccgaccagctgaaaaaagcgaaagcgaacccaagtaatcatcgagcaggcgaacaaacgcgctcgcagattctggacgaaggaaagcttgagcagacaggaacctctggtgcaggtc

SEQ ID NO: 28777 - DNA, 1493 bp, Homo sapiens
  SIMILAR (707)..(432): 971254mologous to Escherichia coli transcription termination factor,accession number J01673,Smith-Waterman Score=456.
ctgcgtcgcacccgggcagccagccagtcgatcattccggtcgatactaaactggccgccggtatcacacgattttttccgcaatttaacgatcgctttgaagcgattgcggtacgtgtgccaaccataaatgtgacggcaatcgatttaagcgtgacggtgaagaaacctgtaaaagccaatgaagtcaacggccgctgctgctgatgccgcgctgttaagcgcaggaacgtcaggtcattgacgatgctgccgctcacctgagtgaagtggcgcagggcgatgatgttgacgccatcgaacaagcgattaaaaacgtagacaaacaaacccaggatttcgccgctcgccgcatggaccagtcggttcgtcgtgcggatcgatccgatctgatcgaaacgttcgatcacgtatgcacagtgattttcatcagagatggtatcaccagtgcggaggttgaaacggcggatacggctaggggaaacgtagatgtcatcaggaccggcgaggtaggagctgtctgcggaacggaggaaaccaaatccatcctgcaatatctccagtacgccatcaccaaagatatcttcgccactctttgcgtgctgcttcaggatggcaaaaataatgtcctgcttacgcatacgagccaggttttccagccccatattttcgccgagagtgatcagctcagaaaccggcgtattttcggcgacagattcgattcgcctgtaagcatcagaatgatgttcggcatatagcgcaagtccttccagtttgggcaaagcatcagccagatgtaggctatgtggatctaccaggtccacaaccattttgccatcctgttcggcaaagaacaggaaatcgggacgaacaatcttgtactgttcagcttcaacataagcgattcccagtgacgactgccctgtgtactgtggattacgataccagaaagcaaatccttcacgtttggtttcgatctcaaaaaccttggtttcccaatggttcaacagagccggatagttcccgctttcgtcacacaacaaatggtgtttccagactggaaggtcagcttccttttcaccttcacgcaccctggtcatttcaaacttgttcgccggcctgaccagatccacatcctgcggttcggtactcatttcgacgatttgacgataggcctctttacgctcatctttcaacgacttgatttgcggtgtgtactcggggcagcacgctttcggcagtctatcgggcttcgcatcgaagtaatcctgcaccgtttcggtgggtgggcagccaaaatattccgacggcttttggccgaaacgggagacatcatccacgttccctttaacgatctccatgcagtgaaagcggtgatggatgatcacacctgttcggtggtggttgagccgatccacggcgaaggcggtgtgacggccaccaatccatactttttgcagggcttgcgcgaactgtgcgatcacatcacgcat

SEQ ID NO: 28778 - DNA, 1506 bp, Homo sapiens
  SIMILAR (1130)..(1041): 331254mologous to Escherichia coli CG Site No. 589; similar to Erwinia chrysanthemi KdgT,accession number L19201,Smith-Waterman Score=41.
atgaagttccacaggaatgccgggtgtgctccggtgccccagcggaattggaagggccaattccgcagtgcaatcgccaccgccaatcatttttgtggcgatatccagcgcaataccggtcacgataattactgccacacccgacaggatccccagcaaaccagtgtgggctatcacagtcaaatcaatggtattgcccagcgcgaaggcaaagaatggaatcagcgtttgcaccgctttgctgaaaaattctcgcaattcagggtcaaggttcctcagggcaaagcccaccaggaacgcgccagcgttgaaagtccggcaaagaatccaacttcaacaccatgttccggaataatacgcgaggcaattgccgcaaccacccacgcgacggcaattttagttaccaccagcgtaccggatttacgcagtaccgatgccgtctcaattaattggggcatccatttattactcaaccgtaaccgattttgccaggttacgcggctgcaggcatgcaagctttggcgctatgtggtggaagaagatccgggcgttaaatcggtgcgcaatatctacgactactataagcaacaccactatgaaaccattgtgatgggcgcgagcttccgtcgcaccgaacaaatcctcgccttaaccggctgcgatcgactgactatcgcaccgaatttactgaaggagctgcaggaaaaagtttcgccagtggtacgtaaattaatcccaccttctcagacgttcccacgcccagctcccatgagcgaagcggagttccgttgggagcacaatcagtatggcacgtcggtagagccactgtctcaacgcgtgggtgccgagctcaggtcgtatcaatgctccggggatagtgtcttacatatccacgagcaaggactaagagtcagtgattctgtaaacccaagagcgcactatgctataaacagcctcgcattgggcgatgtgaaaggcattaaagcatatggcaatgcaggttatatccgcatgtatagcggtcacgcaccagaacgtcaggtcattgacaatgttcccgctcccctaagtgaagtggcgcaggccgatgatgttaacgccatcgaccaagcgattagaaacgtagacaaacaaactcaggatttcgccgctcgccgcatggaccagtcggttcgtcgtgcgttgaaaggccattccgtggacgaggatctctgccctgatggcgctgttctggaagctaatagcggtgaaaccattctcgacgcagctctgcgtaacggtatcgagattgaacacgcctgtgaaaaatcctgtgcttgcaccacctgccactgcatcgttcgtgaaggttttgactcactgccggaaagctcagagcaggaagacgacatgctggacaaagcctggggactggagccggaaagccgtttaagctgccaggcgcgcgttaccgacgaagatttagtagtcgaaatcccgcgttacactatcaatccatgcgcgtga

SEQ ID NO: 28779 - DNA, 3267 bp, Homo sapiens
  SIMILAR (1170)..(847): 991254mologous to Escherichia coli K12 putative inner membrane component for iron transport,accession number AE000162,Smith-Waterman Score=547.
attaattggataacgggcaatcccttccaccgtttcgccaaccatcgccccgcccaccgcagaagtcacaaacaactgcacatccgccaccgtcataccgtaacgtgcggctttttcacggttaatctcaacgttgatatagcgcccaccttccagccgctcggcaagcgcagaagctacgcctggcaccgttcgcgctacttcttcaatttgctcagccatcgcgtcgatatccgccagcacagtgccggaaactttaatgccgatggggcttttaatgccggttgagagcataatcgaatcgggttacgaaattggcggcacccaacagatttcgcaagccccggcagccgcacggtgttatccagttcctcaatgattttgtccatcgtcatgcctggccgccactgctcctgcggcttaagctggatggtcgtttctaccatctccagcggagcagaatcggtggcggtttccgctttcccggttttgccaaatacccgcgccacttcaggtacgctcataattagcttgtcggttttttgcagcatactcgccgcctctgctgcggaaatccccggcagcgtcgatggcatatacaacaagtcgccttcattgatctgcggtaaaaattccccgccaactttattgagcggccagagaaccgtcagcaccgaaagcgccgccaccagcagcgtggttttcggccagtgcagtactttcagcaacagcggatgataaacacgaatcaaaaagcgattgagcgggttactgctttccggcggaattttgccacggatccagtagcccatcaggatcgggatcactacgatcgcaagcaggcccggcaccgcccatcgcatacgttttggtgaacgccaacgggccaaacagacgcccttcctgcccttccagggtgaagatcgggataaacgacaacgtgataatcagcagactgataaatagcgccggccccacttcaacagacgcatcggtgatcacctgccagcgcgttttattatccagcgtggcgtcaggatgctggtgctgccactcttccagccgtttatgcgcattctcgatcatgacgatagcagcatcgaccatcgccccgacggcaatcgcaatgccacccaacgacataatattggcattcaatccctggaagtggcatgacaataaaagcaattcctgcatgtcttgtgttaacagtgggatcaccttaacggcagtagtaactgtaagctgatgggggtgggcagaaatggaaaaggccgcgaaagcccttttcttgttacagctgcaacgatttttttgcgaggcggcttcaggattattgctgttccagcgcatcgcaattttgattttcgcctctttacgcaggttactcatcagagcttcaaagacgatttgtgcgttgttctgggtgataccctgcaccatcgcttttttctgatcttccggcattgaaccttgtttcacttcatccagcgccacagagaaccacattaccttgcatatcggtcgccataccgtagctcggtttgtctttcgctggcagtggcagtgcaaacgccgcctggctttgccggctttcaaatcaaccagcagtttctcagcatccactttcgcctgttgttcagctttgttgtgctgaaccaatgccttaacttgttcctgaacatctgccaacggtttcaccgcttccggtttgtgctcgctgatgcgcagcacgaatgcgcggtcgccgtctaccagaccgccgttaaagatagcgtcggcaaccggcttgaagttcaactcttccggcaggttatctttgctgaaccaacccgtctgagtggctttaacgccggcagcttgctctgcaccggccagagactcggtgtcgttgcttgccgcatcgctcactttctgctgcagcgcgtagtacgcatcgagggctttttcgtgtttcactttcgccgcaatgtcgtcacgtacttcgtctaacgatttcactttcgctggctgaatgtcgtccagacgtacaatcaggaaaccgaccgaagatttgatgacaccagacagttggccagccttcgcgtcttcctggtgccgcttttcggccctatcgttggcgcgattgtaggtgcatttgcctaccgcaaactgattggtcgccatttgccttgcgatatctttgatctgctcgctgttcccctgagggggtcccaagtccaagaatagtcgtggcatctcggggcccttcctctcgggcttgggggggtccccgtctccgctgagtgccgtgtctccgccggccctgctgtctggggccccgggctctccctcgggggccacctccggcctggctctcgggggcgctggctccagcctcctctgctgtgcctccggtggcggtggcagcggtggcggcggtggctgccgcctcgtgttgtctacccatccggcctttgcgtccacgccgcttccggggccgccgccgggggccgtccccgtgcccactggggctcggcccccactcccgaggtccagcctcccagcccctggggctctcggcgcccccccagtctcgggggctctcctctcggtcccgggttccagcgtcccgttcttgggggctgggccaagggggccaggggctgtctccccgccgttccgggaggagaccactgcgctgggtgcaggggctctctccagagaggtctctggggctggctccccgatcgtgggggctggaccccaactctcgggcgtcttctcccagggccctggggctctccaaggcccagtctctggtggcctctccgtgttcctggggaatctcaggcccccattctctgacaccttgtcctcgctctttgggggtgtcaggcccccattcaccagcaccttctccccggcctctggggacctcagctccccattctccagcgctttctcctccctccttgggggtgtcagctccccattctccagcactttctcttctctctcgggggaccccagggccccattctccgccgccttctcctcgatgcctggggctctctggtccccgttctccagcactgtcaccccgttcactgggaggctcaggcttggggcttgtttcccgttgcccaggactgtcgggtccctgttcaggcccgggactttctctctgttcccggggcctctccccgccttcctgggtcctgtctcccgggctgtcgcccccttctcccccaggaggttccttgtcacatcctcccgcagggacat

SEQ ID NO: 28780 - DNA, 1679 bp, Homo sapiens
  SIMILAR (1277)..(522): 1001254mologous to Escherichia coli Citrate lyase beta chain (acyl lyase subunit) (citE) homolog,accession number D90702,Smith- Waterman Score=1263.
tcaaactggcggcctggggcggcgttgttttcctacattttcccatcctgataatcgtaccacgccctggcgaatgtgttctaccagcggcgcatggcaatcactcaggtagctggacgccaggctcaggtttttaaagcccatcttcgcgatgacgtccatcaccatattgacggtcaggtcaccgccacggaaagcgtgatggaaggaaaccgtcatgccgtcctgtaaaccagagcgacgaatcgcttcttccaggttggcgcacagtttgcgatcgcgcgctttttcagcctggtaggtttgctttggcgagttctggaaagcggcaagatcgcattcagcgcgacgattccaggccgctacccgttcttgtcgttgagattgttcaattttctgcgtcattttgattgccttattcttcgcggatgccggaaagttctgcacgggagagcaccagacgggcgcgatcgataaccggaccgtccaccatcttgccgttcagggaaaccacgccgaggcccttcgcgagcggcggcttcagcggcttctacgacgcggcgggcgtgatccacttctttctgggtcggtgcgtagaggttgtgcagcagatcaatctgacgcgggttgatcagcgatttgccgtcaaagcccagctgtttgatgtgggcggcttcttgcagaaatccggcttcgttgttagcgtcggaatagacggtatcgaacgcctgaatacccgcagagcgcgcggcctgcaaaatggaacagcgtgcgaacagcagttcagttccttccggggagcgttctgtacgcaggttgcgcacatagtcttctgcaccgagggcgataccgatcaaacgctcggaagcgtgagcgatttccactgcgcgggtaatccccagcggagattcaatcgccgccagcaggccggtgctgccgggttcacgaccacaggctttttcgatacgcaggatctctttttcaatatccagaacatcctgagcggtatcggttttcggcagacgcacaacgtccgcaccaccgcgaacgacggcttccaggtcgttaacaccccattcggaatccagcgcgttgacacgcacaatggtttcaatatcgcgatacagcggatgttgcagcgcgtggtaaaccatgcggcgggcggtgtctttttcacgcaatgctacggagtcttcgaggtcaaacatcagggcatcagccgggtagatgaaggagttgctgaccatcgcggcattggcaccaggcacaaacaacatgccgatatagacatgaaagccagccagcgaaaaaccaacataaattgcagcgataatcacgacggctaagagacaatccagcagcgatgaccagccgaccataaatccgacgtgcgggttaatcgacttttgcgcgtaggtataggccgaaccggcctccggaaactggcgaaccagtttgccgtagctgatagcggtaaacagcacacccgccagcgccagcaaataggacgccggaacgtgaccgtcgctaatgccggagacaataccaaaagtatcaaatacggtcatcggcgtgagataggccagacccatcatcaccacctgccacaatttcagtgattttcgcagacgggttttgccgggttgcgcagcaatattcagtggtgaattaatagccat

SEQ ID NO: 28781 - DNA, 3256 bp, Homo sapiens
  SIMILAR (1631)..(2977): 981254mologous to Escherichia coli heat shock cognate protein 66,accession number D90883,Smith-Waterman Score=2183.
cccgctggcgcagtttatcttcctgaagctactgtggggggtagcgttgttcgtacggcgaataccggggcgcttctcggcgctaatgtagattgtgctgtcgctgaccgtttcatgccgttatatatggtggcgttacacctatacgctgaactgggacaatccggtcagcctggtgtgcgggctttttatgcttttcgctgaaacgtacgcgtggattgtgctggtgctcggctacttccagacgcctttcttggccagagccacacggaagtgtgcgttcgagccaggaagtgtaccatcttgttgcgcccatgttcgttgttggccctgtacaaatgccaatattatgtcgttgggtggcattgcgattgccgtcggggcgatggtcgatgctgctatcgtcatgatcgagaatgcgcataaacggctggaagagtggcagcaccagcatcctgacgccacgctggataataaaacgcgctggcaggtgatcaccgatgcgtctgttgaagtggggccggcgctatttatcagtctgctgattatcacgttgtcgtttatcccgatcttcaccctggaagggcaggaagggcgtctgtttggcccgttggcgttcaccaaaacgtatgcgatggcgggtgcggcgctgctggcgatcgtagtgatcccgatcctgatgggctactggatccgtggcaaaattccgccggaaagcagtaacccgctcaatcgctttttgattcgtgtttatcatccgctgttgctgaaagtactgcactggccgaaaaccacgctgctggtggcggcgctttcggtgctgacggttctctggccgctcaataaagttggcggggaatttttaccgcagatcaatgaaggcgacttgttgtatatgccatcgacgctgccggggatttccgcagcagaggcggcgagtatgctgcaaaaaaccgacaagctaattatgagcgtacctgaagtggcgcggaaaaatgctgactgcacaagtttcagtgagctggtggagaactttaagaagaccttgagccacactgacccaatggtctcggatgatttgggcactagcttacccttcatcgatatctacttttccactctggactaccaggacacaactgtccacaaggcttcaccaagttgggctggacacgtgcccgaggagaatgccggggcgatgacgacatgccgatgggccaggactgtcatggaaaacctgaatatggatctgctgtacatggctgccgctgtgatgatgggtctggcggcaatcggtgctgcgatcggtatcggcatcctcgggggtaaattcctggaaggcgcagcgcgtcaacctgatctgattcctctgctgcgtactcagttctttatcgttatgggtctggtggatgctatcccgatgatcgctggaaaccacgccgaggccttcgcgagcggcggcttcagcggcttctacgacgcggcgggcgtgatccacttctttctgggtcggtgcgtagaggttgtgcagcagatcaatctgacgcgggttgatcagcgatttgccgtcaaagcccagctgtttgatgtgggcggcttcttgcagaaatccggcttcgttgttagcgtcggaatagacgacgcggcgcgtctggcgggccttcacgtcctgcgcttacttaacgaaccgaccgctgcggctatcgcatacgggctggattccggtcaggaaggcgtgatcgccgtttatgacctcggtggcgggacgtttgatatttccattctgcgcttaagtcgcggcgtgtttgaagtgctggcaaccggcggtgattccgcgctcggcggcgatgatttcgaccatctgctggcggattacattcgcgagcaggcgggcattcctgatcgtagcgataaccgcgttcagcgtgaactgctggatgccgccattgcagccaaaatcgcgctgagcgatgcggactccgtgaccgttaacgttgcgggctggcagggcgaaatcagccgtgaacaattcaatgaactgatcgcgccactggtaaaacgaaccttactggcttgtcgtcgcgcgctgaaagacgcgggtgtagaagctgatgaagtgctggaagtggtgatggtgggcggttctactcgcgtgccgctggtgcgtgaacgggtaggcgaatttttcggtcgtccaccgctgacttccatcgacccggataaagtcgtcgctattggcgcggcgattcaagcggatattctggtgggtaacaagccagacagccaaatgctgttgcttgatgtgatcccactgtcgctgggcctcgaaacgatgggcggcctggtggagaaagtgattccccgtaataccactattacggtggcccgcgctcaggatttcaccacctttaaagatggtcagacggcgatgtctatccatgtaatgcagggtgagcgcgaactggtgcaggactgccgctcactggcgcgttttgcgctgcgtggtattccggcgctaccggctggcggtgcgcatattcgcgtgacgttccaggtcgatgccgacggtcttttgagcgtgacggcgatggagaaatccaccggcgttgaggcgtctattcaggtcaaaccgtcttacggtctgaccgatagcgaaatcgcttcgatgatcaaagactcaatgagctatgccgagcaggacgtaaaagcccgaatgctggcagaacaaaaagtaaaagcggcgcgtgtgctggaaagtctgcacggcgcgctggctgctgatgccgcgctgttaagcgccgcagaacgtcaggtcattgacgatgctgccgctcacctgagtgaagtggcgcagggcgatgatgttgacgccatcgaacaagcgattaaaaacgtagacaaacaaacccaggatttcgccgctcgccgcatggaccagtcggttcgtcgtgcgctgaaaggccattccgtggacgaggatctctgccctgatggcgctgttctggaagctaatagcggtgaaaccattctcgacgcagctctgcgtaacggtatcgagattgaacacgcctgtgaaaaatcctgtgcttgcaccacctgccactgcatcgttcgtgaaggttttgactcactggcggaaagctcagagcaggaagacgacatgctggacaaagcctggggactggagccggaaagccgtttaagctgccaggcgcgcgttaacgacgaagatttagtagtcgaaatcccgggttaa

SEQ ID NO: 28782 - DNA, 310 bp, Homo sapiens
  SIMILAR (69)..(28): 781254mologous to Haemophilus influenzae Rd ATP-dependent DNA helicase (recQ),accession number U32756,Smith-Waterman Score=62.
tcacacgaccaatggtggaaaggcaatctgagcatcggttgaaccgtcgtactgtttcggcggatcgaggcgatatcgcagttcccgcacggctcctgacgcccttcgccaaaatagttcgcaataccagacgacggcaagtttgcgcttcggcaaacgcgccccatcgattgacgttggtggcgtgtcagcgtaaagaagaggaaacagcattgagctgtcggcttgtttgcgaagctgacagaaacagaaccggtgattattttcgaaggtatcgaagcgccgcaacgctgggtttaaaagccagtcg

SEQ ID NO: 28783 - DNA, 1404 bp, Homo sapiens
  SIMILAR (776)..(1117): 461254mologous to Escherichia coli recQ,accession number M30198,Smith-Waterman Score=204.
tcatgctagatcgaccatacgatagcaagcatttccgcccaagcccccgccaacggccaagggagccgaaacagccccttgacgtgatccatataataatgcgtagaaaaaattgttgaaacaatccggccgacaagcgatcgggtagatcgtgagcccggcgtcgatcagggtgattgcgtcgttaaacttcactacgccgcgcacggttggcggcgatactgcggcgagcgccgcgttctggcgcaggcccacactcgcagccccatgccggaacgccctgtgcgccgccggtgccggtagcgtgagggtcaggctcatgttacagcgccttggtgaagcggaagtggtctgctcgtagccttcgcgcagatagaaacggtgcgcgtcgtggcgcttacgttggtcgaaagttcggtcatttcggccccggcctggcgggcttcttttctgcccacgccagtaacttatgccgacgttcagaccgcgcgcctgcgcattaccaccaactcctgaatttcgccgatccagttgacatgatgcagtgaaaaagaggcatggtgtttctccttctgatggatcagcgtcagcagcgtgtcgacgactggcgcaggctgccgtcattgttgagcgtatggcaatcctgtggagatagcgggcggcgcgcgccaggcgggcgttaatttcactggcgttttcaggccacggttttccaggcgctggcggaggatctccggcgaaacctgcaaattgtggtggcgacggtggcgttcgcatgggcatcaataaaccaaacgttcgcttcgtggtccactttgatatccgcgcaatatcgaatcctattatcaggaaaccggacgcgccgggcgtgtggcctgcccgcggaagcgatgctgttttacgatccggctgatatggcgggctgcgccgttgtctggaagagaagccgcaggggcagttgcaggatatgagcgccacaaactcaatgcgatgggcgcgtttgccgaagcgcaaacttccgtcgtctggtattgctgaactattttggcgaagggcgtcaggagccggcgggaactgcgatatctgcctcgatccgccgaaacagtacgacggttcaccgatgctcagattgccctttccaccattggtcgtgtgaatcagcggttgggatgggttatgtggtggaagtgattcgtgttgcggcgtttctcgagccagattattcgcatcgcccgtgaatttgccgataacgggtgaaatccctgaaagagggttccatccgttttgcggcagaacaacagaaaacggtaaaaaccacccgcgcaacctgttcatctggcgttctaactgctcggttcttccggtaaaggtcatgagtttatgctcaagtaccccatgccccat

SEQ ID NO: 28784 - DNA, 2123 bp, Homo sapiens
  SIMILAR (1)..(231): 1001254mologous to Escherichia coli diadenosine tetraphosphatase (apaH) (AA 1-280),accession number X04711,Smith- Waterman Score=428.
atgccaaataactggtcaccggaattgcgggggctgggaagactgcgttttatcaccaacgcttttacccgtatgcgtttttgcttcccgaacggtcaactggatatgtacagcaaagaatcgccggaagaggcccctgccccactgaaaccgtggtttgcgattcctggccctgtcgctgaagaatacagcatcgcctttggtcactgggcatcgctggagggcaaaggccggataagacgcgaccggcgtcgcatccggcgctaccgtaaattctatacaaaattaccgccgctccagaatctcaaagcaatagctgtgagagttctgcgcatcagcatcgtggaattcgctgaataccgattcccagtcatccggctcgtaatccgggaaatgggtgtcgccttccacttctgcgtcgatatgcgtcagatacagtttttgcgcttttggcaagaactgttcataaacgcgaccgccgccaatcaccatgatttctgtccagccagtttgcggataacccaatacggtgaaagagagcgccgacggagtaccggccgcattcccggcttcatgctctggggcgcacgcgtggcgtatgactttggcccgcagatggcagatctgaacctggcattcggtgtgaaaaacatcttcgaccaggactacttcatccgctcttatgacgacaacaacaaaggcatctatgcaggccagccgcgcacgctgtatatgcagggctggaatgtgattatgttggcatttatccgttttctttttgcaggcctgctgctggtgatcagccacgcctttgccgccacggttcaggacgaacacggcacgtttacactcgaaaaaacgccacaacggattgtggtgctggaactctcgttcgccgatgcgctggccgccgtggacgtcatcccgatcggtattgccgacgataacgatgcaaaacgcatcctgcccgaatcgacgggcggtgtggttgagaaaacgctttcaacgtatttgatgaaagatgggaagttgtgcgacagtacgcagatgaatgaaacaggtggttactgccgctgggttgcacagatgataacttttaccgcgtcgggatgtgacaaggcggaagtctcggtcacgccaaatcgacaccctataacggacaaacagttacacgatatggtcgtgcgtgttgataccagcagtatgcagccaatcgattctacttgccggttccacgccagccaaccgcaaaggaacatggccgccgcgcaccagactaacatcagcggtaacgagattaactccagttgcagagcgataagacctaaaatcgaacccaacaccgtaccgccaatacgctcaaaggcgcgagggacaacgttaccccagaacgagattggccccataatcaccaccatggtgaccagcggccagaatgcccggtatgcggcagaaaaatcgttcggcggcaactatgatcgcaaactgttcgccaaattacgcaaactgcgtaaatcgatagccgatgaaagtaatgtcccgccgtacgtggtgtttaacgacgcaaccttgattgagatggctgaacagatgccgatcaccgccagcggaaatgctcagcgttaacggcgttggatgcgaagctggaacgctttggcaaaccgtttatggcgctgattcgtgcgcatgtgatggcgatgacgaagagtagtgggacaaaaacaacttttattattgtgggggagctgttgggatgggtagttccacaccaaccaaagccgcaaagcaaatgcaggctttatttccaggacagattccacaacagaatcaaagatatcacactaaccaccactcctactctctgtggcatcgcagaatacagcgagtgttgtatatcatcgagttttgaagccgcgccgcaaagaccgaccttctgcctagcgcctcagtacattaccgcctttcatcggcgtacgcttatccacatgatatccactttcctgaccatcaccccttcatcgtttccgggggcgttgtgttgccgctgtactgccgcgctgacggctgatacgcgagcccggtaccgccatatccagcgcctcgtgcgggcgttcaaggtttag

SEQ ID NO: 28785 - DNA, 3569 bp, Homo sapiens
  SIMILAR (1387)..(2124): 931254mologous to Escherichia coli 37KD protein, similar to YI22-ECOLI,accession number D85613,Smith-Waterman Score=1213.
atgaccaaaaaactccatattaaaacctggggctgtcagatgaacgagtacgattcatcgaagatggccgatctgctggatgccacccacggctatcaactgaccgacgtggcggaagaagcggatgtgctgctgctgaacacctgctcaatccgcgagaaggctcaggaaaaagtcttccatcagttgggtcgctggaaactgttaaaagagaagaatccagacctgattatcggcgtcggtggctgcgtggcatcgcaagaaggcgagcacattcgccagcgcgcccactatgtcgatattatttttgggccgcaaacgctgcaccgtctgccggagatgatcaactccgtgcgtggcgaccgcagcccggttgtagatatcagcttcccggaaatcgagaagtttgaccgtctaccggaaccgcgcgccgaagggccgaccgcgtttgtctccatcatggaaggctgcaataaatattgcacctactgcgtggtgccttacacccgtggtgaaaagttgaaccagtttattacttttaccggtcggattcagcgcactgttatgatgtttcccatagtcaacaatgccgccgcccgtaacaactgggcaacgttcggtgttacagtacccactttcgggttgggcatcaggccgcgcggacccagaaacctggcccagctggccaacaacgcgcattgcatccggagaagcaataacaacgtcaaagttcatttcgcctttcttgatctgccctttagcagcttcagcgtttgcaccttgggtaaatacggctacgcgaacggaacggccagtaccgtgcggcagtacagttgcaccacgtacgttctggtcagatttacgagcgtcgatgccgaggttaacagctacgtccacgctttctacgaatttagcagtcgccagctctttcagcagtgcgatagcttcgttgatgtcgtactgtttggttgcatcaactttctcgcggataacacgcatgcgcttggtcagtttagccatttcttagtcctccactaccaggcccatggaacgtgcagtaccttcgatggagcgagtcatcgcttcaatgtcggcaccagtcatgtcggcagctttggtctgcgcgatttcctgcagctgagcgcgggaaattttacccactttgtctttgttcggcttaccggaaccagacttgataccagccgcttttttcagcagaactgctgccggcggggtcttggtaacgaaagtgaaagaacggtcagcgtaaacggtgattactaccggaatcggcagacctttttcgatggaatcagtttttgcgttgaacgctttgcagaattccatgatgtttacgccctgctgacccagagccggacctactggcggactcggttgcacgtccttctcagacgaaccgatactggatggatggccgccgcagtcgtcacaactgatgatacggatgtgcttctccgtatacaccatgttatcggagagctgccaaggtatggttatcgtcgggtatgggcgctgcttcgcagacaggcagaacttgatggtatgcctgcgatcaatgccaaacgtgtttaccggatcatgcgccagaatgcgctgttgcttgagcgaaaacctgctgtaccgccatcgaaacgggcacatacaggcagagtggccgtgaaagaaagcaatcagcgatggtgctctgacgggttcgagttctgctgtgataacggagagagactgcgtgtcacgttcgcgctggactgctgtgatcgtgaggcactgcactgggcggtcactaccggcggcttcaacagtgaaacagtacaggacgtcatgctgggagcggtggaacgccgcttcggcaacgatcttccgtcgtctccagtggagtggctgacggataatggttcatgctaccgggctaatgaaacacgccagttcgcccggatgttgggacttgaaccgaagaacacggcggtgcggagtccggagagtaacggaatagcagagagcttcgtgaaaacgataaagcgtgactacatcagtatcatgcccaaaccagacgggttaacggcagcaaagaaccttgcagaggcgttagagcattgtaacgaatggcgggaccgacacgaaagctatgacatgattacaattcttgctcgaagggagcttcctgaggacaaagatgctatggggacaaggatccccgatattcgttacagcctgtcggatcgtattcgttattactggccgcatagtcggattaaaaatagcgtcgaaacgatgatggtgaatcttgaaggcgtggacatcccactgggcatgattagtcagtatcttcccaaacaatttgaacgcattcagtccggggaattatcagcaataccgcatcagctgattatggataaaatttatgatgttttgcgcgcctatcgctacggctatcaggtggatcaactgcaagccaacggcgtggcggcggcgtgccttaactcgacgcaaacccgcgaacagcaacttgaagtgatgacaggctgccgcaccgggcaaattcgtctgctttatatcgccccggaacgcctgatgctggataactttcttgagcatctggcgcactggaatccggtgttattagccgttgatgaagcgcactgtatctcccaatggggccacgatttccgcccggaatatgccgcgctcggtcagttgcgccagcggttcccgacgctgccgtttatggcgctgaccgccacagccgacgacaccacgcgccaggatatcgtggggatcccaaagaggcgtttattcatgccgattacacgctggtagtggataccgcattaaccgggcggcgactgggcgcgcagcatatgttggtagtcagtgcgatgggtgccaataaagctatccagctgcacccgctggtttgtgcggcatataacgccgacttcgatggtgaccagatggctgttcacgtaccgctgacgctggaagcccagctggaagcgcgtgcgctgatgatgtctaccaacaacatcctgtccccggcgaacggcgaaccaatcatcgttccgtctcaggacgttgtactgggtctgtactacatgacccgtgactgtgttaacgccaaaggcgaaggcatggtgctgactggcccgaaagaagcagaacgtctgtatcgctctggtctggcttctctgcatgcgcgcgttaaagtgcgtatcaccgagtatgaaaaagatgctaacggtgaattagtagcgaaaaccagcctgaaagacacgactgttggccgtgccattctgtggatgattgtaccgaaaggtctgccttactccatcgtcaaccaggcgctgggtaaaaaagcaatctccaaaatgctgaacacctgctaccgcattctcgatttcatgtacaccgggcgttttcgccctatgcagcggcgttttctggtgcattctgttggtatcgatgacatggtcatcccggagaagaaacacgaaatcatctccgaggcagaagcagaagttgctgaaattcaggagcagttccagtctggtctg

SEQ ID NO: 28786 - DNA, 2508 bp, Homo sapiens
  SIMILAR (613)..(2100): 981254mologous to Escherichia coli O157:H7 ATP-dependent DNA helicase,accession number AE005613,Smith-Waterman Score=2549.
atgaaaatccataccacagaggcgctcatgaaggctgaaatcagccgtagaagtctgatgaaaacctccgcacttggcagtcttgcgctggcaagcagtgctttcactctgccattttcccaaatggtccgggcggcagaggctccggtagaagagaaagcggtctggagttcctgcaccgttaactgcgggagccgctgtctgttacgtttgcatgtgaaagatgacaccgtgtactgggtggagtctgatacgacaggtgacgacgtctacggtaatcatcaggttcgagcgtgtttacgcgggcgctctatccgccgacggatgaatcatcctgataggttgaaatatcccatgaagcgcgtcggcaagcgcggtgaaggtaaatttgaacggataagttgggacgaagccctggataccatcagtgataatcttcggcggatcctgaaagattacggcaatgaggctgtacatgtcctgtacggaacaggcgtagatggcggaaacatcaccaactcaaacgtcccgtaccgtctgatgaactcttgcggtggttttctcagtcgctatggcagctacactacgcttatcaagtcagcttcagatattggtataattcgtctgctttatatcgccccggaacgcctgatgctggataactttcttgagcatctggcgcactggaatccggtgttattagccgttgatgaagcgcactgtatctcccaatggggccacgatttccgcccggaatatgccgcgctcggtcagttgcgccagcggttcccgacgctgccgtttatggcgctgaccgccacagccgacgacaccacgcgccaggatatcgtgcgcctgctggggctgaacgatccgctgattcaaatcagcagttttgaccgtccgaatattcgctacatgctgatggagaagttcaaaccgctcgatcagttgatgcgctacgtgcaggaacagcgcggtaagtcaggcattatctactgcaacagccgcgcgaaagtagaagacaccgctgcgcgcctgcaaagcaagggaattagcgcggcggcctatcatgccgggctggaaaataatgttcgcgccgatgtgcaggaaaaattccagcgcgatgacctgcaaattgtggtggcgacggtggcgttcggcatgggcatcaataaaccaaacgttcgcttcgtggtccactttgatattccgcgcaatatcgaatcctattatcaggaaaccggacgcgccgggcgtgatggcctgcccgcggaagcgatgctgttttacgatccggctgatatggcgtggctgcgccgttgtctggaagagaagccgcaggggcagttgcaggatatcgagcgccacaaactcaatgcgatgggcgcgtttgccgaagcgcaaacttgccgtcgtctggtattgctgaactattttggcgaagggcgtcaggagccgtgcgggaactgcgatatctgcctcgatccgccgaaacagtacgacggttcaaccgatgctcagattgccctttccaccattggtcgtgtgaatcagcggtttgggatgggttatgtggtggaagtgattcgtggtgctaataaccagcgtatccgcgactatggtcatgacaaactgaaagtctatggcatgggccgtgataaaagccatgaacattgggtgagcgtgatccgccagctgattcacctcggcctggtgacgcaaaatattgcccagcattttgccctacaactgacagaggccgcgcgaccggtgatgcgcggcgaatcctctttgcaacttcccgtgccgcgtatcgtggcgctcaaaccgaaaacaatgcagaaatcgttgggcggcaactatgatcgcaaactgttcgccaaattacgcaaactgcgtaaatcgatagccgatgaaagtaatgtcccgccgtacgtggtgtttaacgacgcaaccttgattgagatggctgaacagatgccgatcaccgccagcgaaatgctcagcgttaacggcgttgggatgcgcaagctggaacgctttggcaaaccgtttatggcgctgattcgtgcgcatgttgatggcgatgacgaagagtaccgtggcacggcgatcgacctgacgcttcgtgatgagcacgggaacatcctcgatatgggcgcagggttcgatgaaatgcacgagcgctcccatgcctatcacccttccgtcccgcccgccgctcagcgcaatcggctgttgctgaatgcgataatgactggtggcggttttgtcggtatctccagcgaatggtggcacttcgaattaccccaggcagcgagttaccctctgctcgctgatcaattctcttgttttatatcccctggcacacagcacgccgccgatccacaaaccctcgacccggcggtaacaatagataataacgactggacagtgacctacccgtcttatcagcggctggttcagtacaaaacggaccgtgataaaagctcaaccggacgttga

SEQ ID NO: 28787 - DNA, 517 bp, Homo sapiens
  SIMILAR (169)..(480): 1001254mologous to Escherichia coli CG Site No. 553,accession number U00039,Smith-Waterman Score=529.
gagatcgtctcgttaatcggccctaacggtgccggaaaaaccacggtttttaactgtctgaccggattctacaaacccaccggcggcaccattttactgcgcgatcagcacctggaaggtttaccggggcagcaaattgcccgcatgggcgtggtgcgcaccttccagcaaagcgaagcgctcgaccgcgccgcgacctggcttgagcgcattggtttgctggaacacgccaaccgtcaggcgagtaacctggcctatggtgaccagcgccgtcttgagattgcccgctgcatggtgacgcagccggagattttaatgctcgacgaacctgcggcaggtcttaacccgaaagagacgaaagagctggatgagctgattgccgaactgcgcaatcatcacaacaccactatcttgttgattgaacacgatatgaagctggtgatgggaatttcggaccgaatttacgtggtcaatcagggacgccgctggcaaacgtacgccgagaaattcgaggcag

SEQ ID NO: 28788 - DNA, 1532 bp, Homo sapiens
  SIMILAR (841)..(2): 931254mologous to Escherichia coli porphobilinogen synthase,accession number D85613,Smith-Waterman Score=1307.
ccgcacgcttaatcgaacctaagctttcgagcacgactttctcttcatctatagcacccgccagcgcggcgaacttaatcatcgcatactcaccgctcacctgatacgcgccaatcggcaattcagtacgttcacgcagctcacgcacgatgtcgaggtacgctccagcaggtttaaccatcaggcagtctgcgccctgggcttcatccagcagtgattcacgaatcgcctcacgacggttcattgggttcatctgatagcttttgcggtcgccttttaatgcgcttccggcagcttcacggaacgggccataaaaggaggaggcgaacttggtcgaatacgacataatcgccgtatctttaaatcccgcagcgtccagcgcctgacgaatcgcctgtacctggccgtccatcgcggcggaaggggcgatgaagtctgcacctgcagcagctgcaaccacggcttgcttgcctaaattttccagagtcgcgtcgttgtcgacgccatgctcgcacagcacaccgcagtgaccgtgagaagtgtattcacagaagcaggtgtctgacataacgatcatttctggcacggtctgcttgcagatgcgcgacatacgcgccaccagtccatcttcccgccaggcatcgctgccggtttcatcggtatggtgagagatgccaaaagtcatcacggaacgaataccggcgttggcgatgcgttcaatttcgcgtgccagatgtttctctggaatgcgcatcacgcctggcatgtattcgcaatgatacgaattctgtagctcggtaccgttgttaattacggttgccgccgggttagtggaaggcgtcaccgaagccaccacgccccacggtgcgttttcaattagggtcaggccgttgtcgccagtcagcacttgcggagagaggcactcaacgcctggtgtgccgcgcgcctgagcgacgttttttgcaaatttatcttcaacgcgccccatgccggtttcactgacggcaagttccgctaaatctctggcgtgtttttcgcctgcttcacgaatggcagcaatggctaactggcgcattgccacgctttttaacccttgctgggcgactttggctgccgcaacggcgtcatccagggacgcgaaaacgcccatctcatgaacggcggcggacggcgtgtcactgctttgcattttcagcagtaccgctttcaccacctgttcaatatcctgaccgccagacaccacctcatcgacaatgccaatcacgcacagatcgaccggtgacgtttcgcttttatgcgcctggcgggcggaactgccactcaccagtaacacccactccccggttcccgcgccaatattgtcgatggcgacggcgcattgcccgtcaggattaccttgtggatcaatcatttccaccatcagcaatttgtcatgcgccagtccgtgatggcgtacggtacaaacaatttgtccagtgacgactgccagtttcatacccgcctccgtggcgtatttcaggtaaaagctcccc

SEQ ID NO: 28789 - DNA, 1522 bp, Homo sapiens
  SIMILAR (415)..(1155): 961254mologous to Escherichia coli CG Site No. 553,accession number U00039,Smith-Waterman Score=1206.
atggctcgacaacgaccgactctggaaaatttaggcaagcaagccgtggttgcagctgctgcaggtgcagacttcatcgccccttccgccgcgatggacggccaggtacaggcgattcgtcaggcgctggacgctgcgggatttaaagatacggcgattatgtcgtattcgaccaagttcgcctcctccttttatggcccgttccgtgaagctgccggaagcgcattaaaaggcgaccgcaaaagctatcagatgaacccaatgaaccgtcgtgaggcgattcgtgaatcactgctggatgaagcccagggcgcagactgcctgatggttagacctgctggagcgtacctcgacatcgtgcgtgactggcgtggacgtactggattgcccgtggcgcatatcaggagagcaggcatgagtcagccattattatctgttaacggcctgatgatgcgcttcggcggcctgctggcggtgaacaacgtcaatcttgaactgtacccgcaggagatcgtctcgttaatcggccctaacggtgccggaaaaaccacggtttttaactgtctgaccggattctacaaacccaccggcggcaccattttactgcgcgatcagcacctggaaggtttaccggggcagcaaattgcccgcatgggcgtggtgcgcaccttccagcatgtgcgtctgttccgtgaaatgacggtaattgaaaacctgctggtggcgcagcatcagcaactgaaaaccgggctgttctctggcctgttgaaaacgccatccttccgtcgcgcccagagcgaagcgctcgaccgcgccgcgacctggcttgagcgcattggtttgctggaacacgccaaccgtcaggcgagtaacctggcctatggtgaccagcgccgtcttgagattgcccgctgcatggtgacgcagccggagattttaatgctcgacgaacctgcggcaggtcttaacccgaaagagacgaaagaactggatgagctgattgccgaactgcgcaatcatcacaacaccactatcttgttgattgaacacgatatgaagcttgtgatgggaatttcggaccgaatttacgtggtcaatcaggggacgccgctgggcaacggtacctcttatactgcctgcagggcaaacagcgatgcgtcgttttccgccgcctgcgccatcaacgaggcacaaatctcagcgttcttttcccacacagatgtaacagcaaactgtcctgcggcaaccagcattgccacctcctgtcagagtcgtaaaattcgccaacgacgattattcggcgttacacttatcactcatacaaatcaaatagcaggattttgcagtgttacaacttcttttagcagtttttattggcggtggtacgggaagcgtggcgagatggctgttaagtatgcgatttaacccactgcatcaggcgattccgttggggacgctgacagcaaacctgattggggcattcatcataggaataggattcgcatggttcagcaggatgacg

SEQ ID NO: 28790 - DNA, 1199 bp, Homo sapiens
  SIMILAR (1)..(375): 941254mologous to Escherichia coli O157:H7 putative replicase,accession number AE005600,Smith-Waterman Score=617.
atgaagttgaattttaagggattttttaaggctgccggtttattcccactggcgctgatgctttcaggctgtatctcgtatgctctggtttcccataccgcaaagggtagttcaggaaagtatcaatcgcagtcagacaccatcactgggctatcgcatgcaaaagatagtaatggaacaaaaggctatgtttttgtaggggaatcgctggattaccttatcactgatggtgccgatgacatcgttaagatgctcaatgatccagcacttaaccggcacaatattgaggttggcgatgacgcaagatttgttttaaatgcggggaaaaataaatttaccggcacaatatcgctttactactactggaataaccaggggagagaaaggaaatctcagaaagacataagtgaaactcttggaaataatggagtcggtttccaaacccagccaaataatgaagtgtcggctaagcatgagctggaggaacaggtgaagaaactgagccatgacacctattcattgcagttgatggcagctttgctagagaatgaatgccaaatcttacagcagagagtagagattctcaaggaactccatcatcagaaacagggaactctgcaagagaagccaattcagataaactataaacaggacaagaaaaatcagaagccatcagaagcaaagaaagtagaaatgtataagcagaacaagcaagcaatgaagggtacattttggaaaaaagacagatcctgtagaagcctggatgtttgtcttaataagaaagcttgcaatacccagttcaatattcatgttgcaagaaaagctcttaggggaaaaatgaggtcagctagcagcctaagatagaaaataccaaaagcagatgaaaaggtgaatccttaaaaaactacatctgttacctccaacttgtcagtcatgatcaatcatcaaaccttgggcagatctgctggttcaaccaagaaagagctatagaataaggagattgacacttatattactcattacttcagcagttatgtaagtctggtctttaatgaccattgtgtctacatcaagttcataacttttcacctttacaatctgcttgttttttttgtaattattagatagacagcctagagtgagaagttaaaggtccaattaagtaaagatctaaataaaaaccagaatacaagggaaaa

SEQ ID NO: 28791 - DNA, 2415 bp, Homo sapiens
  SIMILAR (757)..(1323): 861254mologous to Escherichia coli ORFT,accession number X73295,Smith-Waterman Score=830.
atggaaaggccgggtgggccctttaaggagccaatgggaaatgccggtttcccccggggtggctgccaggtcaacggctctgcgagcatagattcagagctgggtaccgagcgtgtttctgatacagctcatgggcttggcgcgcgtgacgatgcgatgggaatgcagtatctgattcctggctggacgttcgataacaagatcgatgctgataataccgcagttcttccagctataaacgttggcgcagattgtatcacgaccgatcccagcgatgccaaactggaactggatgccgacaaactcaccgctgcactgaaaaaagatgccagcggcgtaggtgcattgattgttggcgatggtaaaaaaaccggcatcacgaccaccatcggcagcaacctgaccagttggctttcgacaacgggcattattaaagccgctaccgatggcgttagtaagaccctgaataaattaactaaagactacaacgccgccagcgatcgcattgatgcgcaggtcgctcgctacaaagaacaatttacccaactggacgttttaatgacctcgttaaacagcaccagcagctacttaacgcagcagttcgaaaacaacagtaattccaaacaggtcatgtacgcggcaaaaggcacccaggcctatgcacaaattggcgtcgaaagcgccgtaatgagcgccagccagcagcagctggtcaccatgctatttgatggagtgctgagcgcactggttagagcgagcctgtttatgcaggacaacaatcagcaaggcaaaggcgtctctttgtcaaaagcgatcaacatcattgagaacggactgcggggcgacgaggtggaagcggacaaaacgttacacattgcgcaaaacggaacggtggtcgccgagggtgattatggattccgcctcacgaccgcaccaggtaatggtttgtacgttaactatgggctgaaagcgctgaacatccatggtgggcaaaagctgacgttagccgaacatggcggagcctatggcgcaacggccgatatgtcggcaaaaatcggtggtgaaggggatctggcaatcaatacggtgcgacaggtttcgctttccaacggtcagaacgactatcagggggcaacctacgttcagatggggacattacgtaccgatgcggatggtgcacttggcaacacccgggaactgaacatcagcaacgcggccatcgtcgatcttaatggatcgacgcagacggtagagacattcaccgggcagatgggttcgactgttttgttcaaagagggggcgctgacggtaaataaagtcggaccggaaacgctaaagcgtgacccacccgtcagagcaatgacaatccccgcaacagctgcggtatataaaccgtactggggtgccacaccactaccaatagccaacgccatcgccagcgggatagcaataatcccgacggttatcccggcaatcaggtcacggcggaatggtatcgcagacaacgacttcatcaattacagagttacgcaggttgttcgccgcgttgccagagaagatcgggtgagtcgcgtacgcaaatacacgtttagcaccacgttactttcagagcttcagcagctttacacagcgtaccgccagtgtcgatcatatcatcgaccagtacgcagtcacgacctgcaactaaacctgctgatcattaaagataatcagattgtgtatcgcaaagcctggggagcggcgaaaaagtacgatggcagcgtgttgatggaacagcctgtcaaagccaccaccgggacgctgtatgacctggcctcaaacaccaaaatgtacgccacgaacttcgccctgcaaaagctgatgagcgaaggcaaactgcatcctgacgatcggattgcgaaatatattccggggtttgccgatatggttgtcacctgcgggccattcatgagctttggcgaacgtcgcctgctgggtctgttccagaaccgttacggacctaaccgtgttggctataccatctgccgacaagaaggccccggcacccggattccggcccctttcccaaacaagtttggcgccaggcccttggaaattgggccgaaccattggcagtttgaaaatacggaagattatgttcgccaggccgttgaagaaccacaccagcggggtgcaaaccaggtacgctacgccaccgcacgctcagtcttcaaatgggatggcaccgataccgtcaaagtcggcagcgatgaaaccccggttcgcgtgctggacgaagaagtctccaccgaccaggcgcgctggcataaccgctattggatcgacagcgaagggcaaattcgccagtcggaacagtatctcggcgcggattattttccggtgaaaaccactctcatcaaggcggcaaaacaatga

SEQ ID NO: 28792 - DNA, 3378 bp, Homo sapiens
  SIMILAR (2172)..(1519): 991254mologous to Escherichia coli methionine synthase,accession number J04975,Smith-Waterman Score=1074.
ctatcctctgcttttgcatcgagatacagccgacgggcaggctaccgcgcagaggttacaggctacgcaacgctcttcgccgtccgggtcgcgggtcagaacgatacgaccacgataacggggcggcagatagaccggctcttccgggtacattcgcgtttcgcgtttggcgaacgcgtgcaggccgatcatccagatactacgaacctgggtgccgaaacctactaacaattcttttaaggtcatggtcttattgccccttattgcgcctgccagagaatgacagccgccgttaccagcaagttgatcagcgtcagcggcaggcagattttccagccgaaggacattacgaatcaaaatgaacatcatcataaagaacgcggttttcagcgcgaaccagatgaatggcggtaacaacgggccttgccagccaccgaagaacagcgtcaccatcaatgcagagatggtcacaatcccgatgtactcacccacgaagaacagaccgaacttcataccggaatattcaatgtggtaaccatccgccagttcctgctcggcttccggctggtcaaacgggtgacggtgacataccgccacgcccgcgatggcaaaggtaataaaaccaaagaattgcgggataacgttccacacatgcgcctggctgttgacgatgtcggtcatgttgaatgaaccggcctgcgccaccacgcccatcaaggaaagcccgaggaacacttcgtagctcagggtctgcgcagaagcacgcatcgcacccagcaacgagtatttgttgttacttgaccagcccgcaaacagcaccgcgtaaaccgccagacctgccatcatcaggaagaacggcggaacgtgtgcgagagtgccaaccagttgctgtcccaagggtggcgctatggctgttaatcgccacagcgcgcggctggcggcccagccttccagtcgttcaccaatcaaaaacagcagcaacaccatcgcagcttcagccgttgcgccaataaacagtgcaccaatagcggctacgctcattaaggtttcaatggcgaagtagctgccggatttgatcaaccgtaatgcctgacgagcaatcgggtacagcccaaccagcgtggtcgcgataaacgccagttgcccgaacggatgattgaactgctccagaccccagctgattgccatcatcacgattagcgtaatcagcggcagattctctttcaggcgtgaatgccttgcggttcttcggcggcgaatgtcattgtccggcatcgaccaccattcgcggacttttcccaatgcgaaagcttttgcctgctcgccagtatccagcccgttatcattcatactggtttcgccgaaatctttcacaatttcagcaaagtgtttttccccatcatgattttcgggagccatgcctaaatccggcagaccatcattgttattatcaaagggatttgccgctttttgctcgaaggtagattgtgcgttagctgtaccgcctgggtttcgactcttgcgggtacgagcgacaaaatcatcacgctgggtatcggaaagcagcgccgccaccacaccaacggtacgcgaggcattctgcacatacaccgtcgggccgctgtagttctgctcgattttcaccgccgtgtgcgcttttgaggtcgtcgcgccgccaatcagtaacggaatagtgaagccctgacgctccatctctttcgccacgttaaccatctcgtccagcgacggcgtgataagccccgaaaggccaatcagatcagcattcacttctttagcggtacggagaattttttccgcaggcaccataacgccgagatcgacaatttcgtagttgttacattgcagcaccacaccaacgatatttttaccgatgtcgtggacgtcgcccttcacggtggcgatcaccatcttgccgttggttttgccctgctctttgctggcttcaataaacggttcgaggtaggccaccgcctgtttcatgacgcgcgccgatttgaccacctgtggcaggaacattttcccttcgccaaacaggtcgccgaccacattcatgccgtccatcaacgggccttcaatcacttcaatcgggcgcgtagcctgctggcgggcttcttcggtatcctgctcgataaactcggtaatgcatttcagccggcgaattaaggcatcgatgtgtccttcatggccgatctcccacgggttacggtcatcggtacagagcatgcattgcgggctgttaaattcgttgatcaacggtgccagcgcgttgagattgcgggcagcggacccttcgcggatcatcaacgacatgccgagttgtaatttccggcgtccttcttccagctgataactttcgtggcagttttcaatacccgcagtaatataggcgttaagttctttaccacccaaacccgggcagtgaccgtccagcgtcaggtggcgaaatgcatccagtttatcgagcagcgcattctgcccgctaattacgccagggtagtccatcatttctgcaaggccggtaacctgcggatggtcccgccaggcgagcatctgttcaagggtaaaactggcaccgttaacatcgcagccttccagggcgggtacgcaagagctgacctgtaagtactggttttgccttgcctgttcggcacagcgggcaaaccaggcgaatgcagatctccattctggaacctgcgcagccccggataataatttggcacaaaggtaagcgcctctcgcacgaagatcgccgctcgactccagcatatgcgtggcgaacgagtgacgtaatttatgcggatgaacgtgattattcagcccttgttttatgccccattcggcaaagcgtttctgcacattacgcgcggagatacgcttgcccagtttcgacagaaaaagcgcgtcgtcttcgctaccaaacaggtcgcgcaaatcaagccagtgctcaatccacgccacagcgttgcgaccaatcggcaggcggcgctctttgctgcctttccccataacccacacttcaccagactccaggtcgaggtgtttaatatccagccccaccagctcagaaagacgcagacccgcgccgtacatcacttccagcattgcacggtcgcgtacagcgaggggatcattgatatcaatatccagcagccgattcatatcgtcgacgtcgatgtttttcggcagatgacgcggcgctttcggtgccgaaacacctttcgccgggttagctttgagttcgttctggctgaccagccagtcaaaaaggggaccgcctgagctttgtgaaccccaccgggtatgggaccgacgcggacgggacgcagactcgcgcgatcccgtaacactcgcaggcat

SEQ ID NO: 28793 - DNA, 1218 bp, Homo sapiens
  SIMILAR (1)..(414): 991254mologous to Escherichia coli fuculose-1-phosphate aldolase,accession number U29581,Smith-Waterman Score=700.
atggcagcttatcaaagcagaccgaatgccaacgcggttgttcacaatcatgccgttcattgcacggcagtttccattcttaaccgatcgatccccgctattcactacatgattgcggcggctggcggtaattctattccttgcgcgccttatgcgacctttggaacacgcgaactttctgaacatgttgcgctggctctcaaaaatcgtaaggcaactttgttacaacatcatgggcttatcgcttgtgaggtgaatctggaaaaagcgttatggctggcgcatgaagttgaagtgctggcgcaactttacctgacgaccctggcgattacggacccggtgccagtgctgagcgatgaagagattgccgtagtgctggagaaattcaaaacctatgggttacgaattgaagaaatgattctgaacgaaacggcatggtttggtcggggtgctgttggggctttaaccgatgaggtgaaacgccgtggttatcagaaggcgctgatcgtcaccgataaaacgctggtgcaatgcggcgtggtggcgaaagtgaccgataagatggatgctgcagggctggcatgggcgatttacgacggcgtctggggcttttgctttagccaagtgaaaattttaggagtcctagctacccgggggctagacgtgggacaatctcttgagcccaggaatccgacgctgcagcgaactctcaatggccccctgcgctccagcatggggcaccaagaacctttcaccttcgactacgaacatttgcatagcgcaccggaaggcaaacatattcctactgctcgcccgcgttcactgattgacggcaaacggatggacaaagtgatctgggggccaaactgggaagaactgtgggcgaattaccccacgaacagtgacaggcttaatgattttgaaagtagcaatatacaaacaaaggaagggaaggaatggagtcagatttcgagtcttcagacaggaactgttatgaccagggaagattcaggactcactggtgcattcagtggattcaaagagataacagaagtacagcacctaggtggtgtctggcatggagcagcctctccttgtgatgagattacagacatgagccactgtgcctggactcagcaagctttgaaggcagccagaataggaaatccctggaccccaaggaaggaggacccagagtgtggccaccttatcctatga

SEQ ID NO: 28794 - DNA, 2773 bp, Homo sapiens
  SIMILAR (2552)..(2644): 351254mologous to Escherichia coli 1,2-propanediol oxidoreductase,accession number M27177,Smith-Waterman Score=41.
atgacccgcctgggactgaaccaggggacagcggggaacgtcagtgtacgttatcaggatgggatgctgattacgcctacaggcattccatatgaaaaactgacggagtcgcatattgtctttattgatggcaacggtaaacatgaggaaggaaagctcccctcaagcgaatggcgtttccatatggcagcctatcaaagcagaccggatgccaacgcggttgttcacaatcatgccgttcattgcacggcagtttccattcttaaccgatcgatccccgctattcactacatgattgcggcggctggcggtaattctattccttgcgcgccttatgcgacctttggaacacgcgaactttctgaacatgttgcgctggctctcaaaaatcgtaaggcaactttgttacaacatcatgggcttatcgcttgtgaggtgaatctggaaaaagcgttatggctggcgcatgaagttgaagtgctggcgcaactttacctgacgaccctggcgattacggacccggtgccagtgctgagcgatgaagagattgccgtagtgctggagaaattcaaaacctatgggttacgaattgaagaaatgattctgaacgaaacggcatggtttggtcggggtgctgttggggctttaaccgatgaggtgaaacgccgtggttatcagaaggcgctgatcgtcaccgataaaacgctggtgcaatgcggcgtggtggcgaaagtgaccgataagatggatgctgcagggctggcatgggcgatttacgacggcgtagtgcccaacccaacaattactgtcgtcaaagaagggctcggtgtattccagaatagcggcgcggattacctgatcgctattggtggtggttctccacaggatacttgtaaagcgattggcattatcagcaacaacccggagtttgccgatgtgcgtagcctggaagggctttccccgaccaataaacccagtgtaccgattctggcaattcctaccacagcaggtactgcggcagaagtgaccattaactacgtgatcactgacgaagagaaacggcgcaagtttgtttgcgttgatccgcatgatatcccgcaggtggcgtttattgacgctgacatgatggatggtatgcctccagcgctgaaagctgcgacgggtgtcgatgcgctcactcatgctattgaggggtatattacccgtggcgcgtgggcgctaaccgatgcactgcacattaaagcgattgaaatcattgctggggcgctgcgaggatcggttgctggtgataaggatgccggagaagaaatggcgctcgggcagtatgttgcgggttatacgtatgtccccagttttggtaccactttagatgaatatgttcgtcgtacccggactgtggtaagatactttgatgtatgtgttactatcgtagtacttatactatgcagctgcatgctgctagtgactctagaggatcccttagaggctaactggccatctgctctgggaagtcaacctgagcagatgtgcatgcacctggaagggctgtttgaggacatatggggaccttcttgctgtccgtttcgggagagccaggggctgactccagacaaggataaatttcaggcccaggataggcctctcctcaaggtccagcaccaccatgcctgccaatcctagagcactccagtgtgacagacaccaggctgggatccttagagtcatcaatcagctcggtaccaacgggcttgcagccaccgaagaacagcgtcaccatcaatgcagagatggtcacaatcccgatgtactcacccacgaagaacagaccgaacttcataccggaatattcaatgtggtaaccatccgccagttcctgctcggcttccggctggtcaaacgggtgacggtgacataccgccacgcccgcgatggcaaagcccgcaaacagcaccgcgtaaaccgccagacctgccatcatcaggaagaacaaaatcccgatgttcaggtcggcaaccacccaacccggactgactggcacaatcgcaaaggccagcagcagcgagatgacgcgatccgagaatttcgggatccagtcttctttaaagaacattttgatcatgtccgcaaccagctggagcgaaccgccccagccaacacggttaggtccgtaacggttctggaacagacccagcaggcgacgttcgccaaagctcatgaatgccccgcagatcctcaagatgcgcgccagccagcaccggagcaagtgggcccggggggaagccaaaatttaaggccgctcattcggcaagcccacctgccctgccgtcagtccttcggcgatttcaaccggcagcgtgaccgtgttgccatcgacgcacgcccggatcgccaaagcgcggtccgggggtccgccccttggcccgaatgccgggacccccggattacccggcggctgggtaccgttcagggcgccgtcccacgcttgccgccggttcgatcggcgggccatgtccgccggtttctgataattccaacgacggtcgacgggcaccatccagtcaatcaacatacctaccgccagccctgtgatgacatcaataaaatgatgctgccaggtcgtcagcgtcgaaatggcgatgagacggataaaactaaacttcagcggatagagcaaaaaaccgcagcaggccattaccgttgccagaataagccggtggacaagtcggcgctgttcgaatgtcgtgctacaaacgaacagcgaaaatccatataa

SEQ ID NO: 28795 - DNA, 4677 bp, Homo sapiens; identical to SEQ ID NO: 25500
  SIMILAR (2488)..(3255): 951254mologous to Escherichia coli glutamate synthase, large subunit,accession number U18997,Smith-Waterman Score=1290.

SEQ ID NO: 28796 - DNA, 393 bp, Homo sapiens
  SIMILAR (58)..(222): 981254mologous to Escherichia coli MreC protein,accession number M31792,Smith-Waterman Score=281.
atggctgcttccatagtggaatacactccgctgtttcctccaggatatagaacctgcacttcccgcgcttatactgtgattcaggcgcgtccgactgcagggctgcaacgtttgcgttatctgctgctgctgtggggggcagatcgtaacggcgctaacccgatgacgccggaagaggtgcatcgtgttgctaatgaacgtctgatgcagatgatgccgcagacgcgatggggccaaagttacctgaaccggcaacggggatcgctcagccgactccgcagcatccggcgacaggaaatgcagctactgcgcctgctgcgccgacacagcctgctgctaatcgctctccacaaagggctacgccgccgcaaagtggtgctcaaccgcctgcgc

SEQ ID NO: 28797 - DNA, 2703 bp, Homo sapiens
  SIMILAR (978)..(268): 881254mologous to Escherichia coli K12 putative oxidoreductase,accession number AE000197,Smith-Waterman Score=1084.
ttacagagctttcaggattgcatccacgctggctttggcgtcaccaaacagcatgtgggtgttttccttgaagaacagcgggttttgcacaccagcatagccagtgttcatcgaacgtttaaagacaatcacgttctgcgctttccacacttccagcacaggcataccagcaatcggactcttcggatcatcctgcgccgccgggttaaccgtatcgttagcaccaatcaccagtacggtatcggtatcagcaaagtcatcatgatcaaactggtttttcaggatccgacccagcaggctatgcagcgcaatcagcgccggttcgctgtccagacgttccccgtatggcgggttgctcaacactgtgccgtacggccctttcggcagcggattggtcagttgcgcgacatctttcacctcaaaggtgatcagttcaccaatccccgcaagacgggcgttagtgcgtgcacgttgaatcacccgtgcgtcgctgtccgaaccgtaaaaatgagagctatactcagccaggcctttacgggcgcgagtttgcgcttccgctttcacttcctgccagatagcttcatcatgctgcgcccagccgctaaagccccaacgcccacggtgcaagcctggtgcgcgatcggtcgccagcatcgctgcttcaatcagcaacgtaccggaaccacacatcggatcgagcagcggtgttcctggctgccagccggatcgcatcacaatagcggctgccagggtttctttgatcggcgcaataccagcacgatcgcgatagccacgcagatgtaaaccatcaccactcagatcaagagcgatactggcggtttctttatgcagccagacgttaacgcggatatccggcgcatcgcgataaacatttgacgcgtcagatttttccggaagagcatgcggtaccgagctcagtatgtatctccaccctagtgaccctttacttaaccagtcgataacgatcgggaatttatttgcatttaagcgtgaagagaaaatagagagttcttttccggtaattccttgctgaatcacttcagacggttcactggagaaccccatcaatacaatacgtgccgctggagaagccagcgttacggcctctttcaggatagaaggatgacaagccgcatcgataattaatgtcggcttgatgcctttttcagtgaaaatctcgccaagcggtgtctggctgttattaatcgcccagtcagccccgctctctttcgctttttccagtcgttcatcaatgcgatcggcaacaatcacatttttaacgttatagacgccttttaatacctgaacgatcgtcaggccgattggaccggcaccataaaccagaacggtatcattttcagtcggttgaccatgtccggttacgttagccgcaatggtaaaaggttcgatcattaccgcatattgatcggccactgcttcaggaattttccacgcattttttgccggaaccacggcatattcactgaaaccaccgtcagcgtgcacacctaatacagccagtgtcgtacaaacgttcggtttaccggtcgtgcggtactcgtctatctgtacactgatatttctgtatacctcggatcgttcactggccaatggcctgagcgtgtccatcgttggagcgctaggcggcatttgctgggggagctccgggaaagcagagtgctggcggtgatccattttttgcagcagcgccagatgctgcgcgatctgcgtcagtgccggatgaccgggatccagcatcgacgccagtttttccaccaatgtcagacgcaggctaagcggcgcatttaacatgccgccgttcgtccatgtctgaagctgcacacgcgaaagaagttcctgcatcagtcgttcacgaaactgctgctgatgggcttgtggaaggcgggcatcatcagcctgcgccagatccactaaaaagcggggataaaccgactccagcacgcgaccggggccgtcaagtaacgtcttggtcaatatcgttaaaactccaggtgtgtttggaatgcggaatttggtcatcagctcatcgctggcgatcactttttccaccactttcaggcacatctggtgcagttcggcggtgacttcttccagcttttcaacctgggcgagggtcaacttgtagtaagcatcttcacaccagtacggctcgccgtacatggtgtgaaaattgaaaccgtattcgtgggcttttcgagcttgatccacggcagccagaccgttttggtcagcagcgccagcggggccagcgttgcctctacgcgtggcaaatgcaccatcgtgacttcgggaatatccggtggattgccaagaatgatgtcttccgcgtgtacatggggccacggcacccagctgcgccagccagtttcttgtttttgccgctcccacaccacgcccagatcgccacggatagcgaacggacgattcaactccgcagagactttcttctccggctgtggagaaagctccgacagcatccagcgcttcaggcaactcccgcaacgataaaccattgcgggagataaccttgattacttcagatcggcctgtacctgacgcagcggtttcgcccacgggtttttggcctcttaccattcccttccatagatgcagacggatgtcgtcactgcctggcatccccatacgccagtccagcgccat

SEQ ID NO: 28798 - DNA, 1963 bp, Homo sapiens
  SIMILAR (1471)..(875): 781254mologous to Escherichia coli yejH,accession number U00008,Smith-Waterman Score=789.
ttacagcgccttggtgaagcggaagtggctctgctcgtagccttcgcgcagatagaaacggtgcgcgtcgtggcgcttcacgttggtcgaaagttcggtcatttcggccccggcctggcgggcttcttcttctgcccacgccagtaacttactgccgacgttcagcccgcgcgcttgcggcattaccaccaacttcttgaatttcgccgatccagttgacatgatgcagatgaaactgcaaatgcaggccgatcatgccgacaacttcgccatcaagcagcgccagatggtagcgcatgtttgggtcgcgcagattggcgttaaaacccacgcgaaacgcgtggtggtcaaactccgcctgttttagctcacaaatcagcgcgtaaaccgcgtcggtgtcgtactgcgtggccgggcgaagctcacaagcaggcatggtgtttctcctttggcgcaggctgccgtcattgttgagcgtatggcaatcctgtggagtatagcgggcggcgcgcgccaggcgggcgttaatttcactggcgttttcacggccacggttttccaggcgctggcggaggatctccggcgaaacctgtaaacagacgggcagcagcgccgattgatagcgcgcccgcgcctgcggcagatgggcgcgtgagccgttgaccagcacgtcgaatccggcgtgcagccagagatcaatctcgacgccgacgccataatacagaccgttagcgtgccagcttaaggccaacagattttgccccgcgcgggtaaaaaactcctgctcgctcagggcgatatggttttcacttccggcgctggcatcgcgcgtgatgtagcgatgcgcccccaggatcagcaggcatacaagcattgcccccttccccccccccccgatggcgattagatcgacgtgcgggccgtcaaatccggtggtcagtaccgcgacgttgaccagatagcgaaaacgctgggccctttgccgcgttgcagcaaactccataatctggctgatgatgtgcggggtaatacgttgttgttttttcagctcacggttgagatcgcgttcgctgaacagcccgttactctgtgcctgcaagcggctgaaatcgtattgcactactggcatatccagtcgttctggcggcgtcagatagccgtgtttaatcatataacgcagcggcagctcataaatgcagtcacggaaaagggctttctcatcgccgcgtaccatgccgtgataatgaaactggtagatccagcctttgcccaatcgaaaaggcgtggcagtcagccccagcaggcgtaagtggggattcacttttgtcaggtgagtgaggatttgctgatactggctctcttcatcgtcaccaatacggtgacattcatcgacaatcaacagcgaaaattcacccttaaaggccgacagcgggctcagaagacgctccagtgtggccagagtgcgttcaccgaagacgtgcgccacaaccgtcctccgtatcctgtcatacgcgtaaaacagccagcgctgacgtgatttagcaccgacgtagccccactgttcgtccatttcagcgcagacaatcacatcactgcccggttgtatgcgcgaggttaccgactgcggcctgagttttttaagtgacgtaaaaccgtgttgaggccaacgcccataatgcgggctgttggcgcgacatccgacgccattcatggccatatcaatgattttctggtgcttaccgggttgagaggcggtgtaagtgaactgtagttgccatgttttacggcaaggagagcagagatagcgctgatgtccggcagtgcttttgccgttacgcaccacgcatgcaggcatgcaacgtgggggggcatgggggcatgctatttggtcatcattcttgtcgattcgacgccgcaaattgcagcacaactgcctgaacgtatcgaaaaacgtctgcaacat

SEQ ID NO: 28799 - DNA, 2997 bp, Homo sapiens
  SIMILAR (436)..(1134): 831254mologous to Escherichia coli similar to E. coli YjhG,accession number U70214,Smith-Waterman Score=978.
ttacagcgccttggtgaagcggaagtggctctgctcgtagccttcgcgcagatagaaacggtgcgcgtcgtggcgcttcacgttggtcgaaagttcggtcatttcggccccggcctggcgggcttcttcttctgcccacgccagtaacttactgccgacgttcagaccgcgcgcctgcggcattaccaccaactcctgaatttcgccgatccagttgacatgatgcagatgaaactgcaaatgcaggccgatcatgccgacaacttcgccatcaagcagcgccagatggtagcgcatgtttgggtcgcgcagattggcgttaaaacccacgcgaaacgcgtggtggtcaaactccgcctgttttagctcacaaatcagcgcgtaaaccgcgtcggtgtcgtactgcgtggccgggcgaagctcacaagcaggcatggtgtttctccttctgtaaacagacggccaatcacccgcaatggcgggatcccgttcgcggccttcgtcagcgatccgtgcgacgggcgctcgcagggcacgcacggtatgttcgattccctgccgtaccgcaacgacgcggcgatcgtgtttcgccgcctgatccgctccctgccgacgcggcgggcggtgatcggcgtagcgacctgcgataaagggctgcccgccaccatgattgcgctggccgcgatgcacgacctgccgactattctggtgccgggcggggcgacgctgccgccgaccgtcggggaagacgcgggcaaggtgcagaccatcggcgcgcgtttcgccaaccacgaactctccctgcaggaggccgccgaactgggctgtcgcgcctgcgcctcgccgggcggcgggtgtcagttcctcggcacggcgggcacctcgcaggtggtcgcggaggcgctgggtctggcgctgccgcactccgcgctggcgccgtccgggcaggcggtgtggctggagatcgcccgccagtcggcgcgcgcggtcagcgagctggatagccgcggcatacccccccggaaaattcttctccataagcctctcaaacccccttgtgtatccccccggcgttggggggctcaccaaaattttgggtggcacctttttggactttctcaccggcttgcgtgcgctgaggaagttgcggccgtttttccacggcgagtcgacaatcttcacgtcggtgtagagcagccagaatttaccgtcggcgtagctcaggcacggcgcccagatgccgccggagtccgggttgcccttcatgtccagcatcgacacgcggtccaacggggtgctgaccagcgaccagtttttcaggtcacgggagtggtagatgcgcacgcccgggaaccactcgaaggtcgaggtggcgatgtagtagtcctcgccctggcggcacagggacgggtccgggttgaagccggtgagtatcgggttagtgatttccatattgcctccggttaatgggatgcggctgtcgcggcgtcgggaacggcctcgccctccgtcccgccaatcgccaggccaatcttcagctgaacagttagtggtagaacaccgcccgtcgtagcggcgaccgctgcagctcttctcgtagtccaacacgtcagaagccatcagacacatgcggcgattattacgcccactgagattatggatcgcacgggcaatcagctctttacccgtgccagtttcaccgaggatcagcacggtactgtcactttgcgccaccatttcaacttgtttaagcacgctgtacatggcttcgctgcggccaataatctcgccaaattcactatcaacattgttgagctgctcggtcagggcgaggttttcatcaaccagccgttctttcagacgatggatttcctgataggcgagggcgttatcgacagcgattgccacacgttcggcaatctggcgcaagtcgtggtggtgtcgatgctgaactcgtactccggctgggcggctgcggctgcgggctttatgctcagcaacgacctgctgattgtgaccggtgcgctggtcggttcttcgggggctatcctttcttacattatgtgtaaggcgatgaaccgttcctttatcagcgttattgcgggtggtttcggcaccgacggctcttctactggcgatgatcaggaagtgggtgagcaccgcgaaatcaccgcagaagagacagcggaactgctgaaaaactcccattcagtgatcattactccggggtacggcatggcagtcgcgcaggcgcaatatcctgtcgctgaaattactgagaaattgcgcgctcgtggtattaatgtgcgtttcggtatccacccggtcgcgcggcgtttgcatggacatatgaacgtattgctggctgaagcaaaagtaccgtatgacatcgtgctggaaatggacgagatcaatgatgactttgctgataccgataccgtactggtgattggtgctaacgatacggttaacccggcggcgcaggatgatccgaagagtccgattgctggttgtaacacattgcgaagaaaagaagtaatccacgccgtcatcgacgcccagcggctgggcaataataaaattgccactgacgacgttgatatgcgcgccctgctcttgggaatgcaatacctgcggcatcatctgcatcagacgttcattagcaacacgatgcacctcttccggcgtcatcgggttagcgccgttacgatctgccccccacagcagcagcagataacgcaaacgttgcagccctgcagtcggacgcgcctgaatcacagtataagcgcgctgggtatcgagttttacggaagagacaaccgcgaccggatagccttccgggaaacgaccgcccagaccggaagtcaccagcacatcaccaacacgaatatctgtattcgccggcagatgctcaagctgcaaatcatccgtacaaccgttaccggctgcaatggggtcatattttctttatccactctatcattaatgggcatttga

SEQ ID NO: 28800 - DNA, 1668 bp, Homo sapiens
  SIMILAR (1215)..(460): 901254mologous to Escherichia coli Putrescine transport protein,accession number D90708,Smith-Waterman Score=1158.
tcatagggttgctgaaagcaggggcaccagcgtgccgtcttgcaggtcgctctgcacacttttgtctggcgcaaacacaatccccaggtgatttcgtgccagctccagcgcagattgcgtgttgtcgcaaacgtaatttcccttcacgcgataatcccgcacctctttactcccggcgacgttgaagcgccagatattcgcgtcgtcgatcatcatcgagtcgatcaaaatacaggagtgatgttcgagttcgtcaggacggctaatgggatgtttctcaagatagcgctggctggcataagcggttacggcatattgggtaataaaactggcaaccagcgattcatcttttggtggagcgtagctgattaaaacatcacaatcatcaggaaattcgacgccttcataaaaggcattacgctcaagattgcaggtttttagcgataaggtgatatcaccgatatctttaattttatcgattacatgtttgggataataggtaattatgcggatgatattggtcaccacggccaggttaaccagcacgttgaactgactgtttagcgacgggctaatggtcatcagtgccaatccactctgaataatcacaatggtcaacattccctgcaccggtgcatccactttggttacacgggagaaaattttagggaagtagccttcatcagatgaagatttaaacacctgggcaatggtgaactgccagccaagtagcgaaccgcagcaggacatcaccatcagcgccataatgactttacccacttccggcgtgaacatctgcgcgaaggccagaccaaatggtgccgttgaatttgccagctccatatttggcacaatcccggcaatcacgttggtggagacgatataaatcaccgccgcacctaacgtaccgccgagtaccgcgattggcacattacgttccgggttttccactacatcagtattcgcacacgcagactccagaccaagaaaagcccacagcgtcatagcgatggaagaacctaccgcactgaagaacggtgcatgatgcggattccaggaatcaacgtacagcgtcgggctaaaccagaaccagccaataatgcacagaccgacgaccggaataatgaccccccacacggtaatgctactgatttgcccggtaatgcgcgcaccacccaagtagccacgggtacaatcacagcacccgatggtcgcagacaattctcgacactgggcgggttgatgttttatctgcaattctttttctatgcctggggccacgcccgcattccggcgcagtatgactacatcagttggatgctgcatatgagtttctatgtattgtgcggcggtatcgtcgggctggtgctgaaagagtggaacaatgcaggacgccgtccggtaacggtgttgagcctcggttgtgtggtgattattgtcgccgctaacatcgtcggcatcggcatggcgaattaatctttctgcgaattgagatgacgccactggctgggcgtcatcctcggtttcccgggtaaacaccaccgaaaaatagttactatcttcaaagccacattcggtcgaaatatcactgattaacaggcggctatgctggagaagatattgcgcatgacacactctgacctgtcgcagatattgattgatggtcat

SEQ ID NO: 28801 - DNA, 1944 bp, Homo sapiens; identical to SEQ ID NO: 24780
  SIMILAR (1030)..(1446): 991254mologous to Escherichia coli NarV protein,accession number D90786,Smith-Waterman Score=712.

SEQ ID NO: 28802 - DNA, 3288 bp, Homo sapiens
  SIMILAR (31)..(1239): 991254mologous to Escherichia coli Paraquat-inducible protein B (fragment),accession number D90827,Smith-Waterman Score=2040.
atggctgacacccgctactttggaatgcacatgagtcaggaaacgcccgcttcgacgactgaagcgcagattaaaaatgaacgccgtatctcacctttctggctgctgccgttcatcgcgctaatgattgccagttggctgatttgggacagttatcaggaccggggtaataccgtcaccatcgactttatgtcggcggatggtattgttccaggccgtacgcctgttcgttatcagggcgttgaagtcggaacagtgcaggatatcagcctcagcgacgatcttcgtaagattgaagtcaaggtcagcatcaagtccgatatgaaagatgcgctgcgcgaagagactcagttctggctggtgacgccaaaagcatcgttggcaggtgtctccgggctggacgccctcgtcggtgggaactatatcggcatgatgccgggtaaaggtaaagagcaggatcactttgtcgcactcgatacccaaccgaaatatcggctggacaatggcgatctgatgatccacctgcaagcccccgatctcggttcgctgaacagcggttcattggtctatttccgcaagatcccggtgggaaaagtctacgactatgccatcaatcccaacaagcaaggcgtggtgattgatgtcctgatcgagcggcgttttaccgatctggtgaaaaaaggtagccgtttctggaacgtttccggcgttgatgccaacgtcagtatcagtggcgcgaaggtgaaactggaaagcctggcggcactggttaacggtgcgattgccttcgattcaccagaagagtcgaaacctgccgaggcggaagatacctttggtctgtatgaagatctggcccacagccagcgtggcgtaataataaaactggaactgccgagtggggccggattaaccgccgactcgacgccgttaatgtatcaggggctggaagtcggacagctgactaaactggatttaaatcctggtggtaaagtcacaggggaaatgaccgttgatcccagcgtcgttaccctgcttcgtgaaaatacccgcatcgaattacgcaacccgaaattatcccttagcgatgctaatctcagcgccctgctgaccggcaaaaccttcgagctggtgcccggcgatggcgagccacgcaaagagttcgttgttgtgccaggcgaaaaagcactgctgcatgaacctgatgttctgacgctgaccctgagcgcgccggacagttacaaagatattgcagagaagatacaaaaacagggaggtgattatttattcgctgtaaaaggaaaccaggggcggcttaataaagcctttgaggaaaaatttccgctgaaagaattaaataatccagagcatgacagttacgcaatgagtgaaaagagtcacggcagagaagaaatccgtcttcatattgtttgcgatgtccctgatgaacttattgatttcacgtttgaatggaaaggactgaagaaattatgcgtggcagtctcctttcggtcaataatagcagaacaaaagaaagagccagaaatgacggtcagatattatatcagttctgctgatttaaccgcagaaaagttcgccacagcaatccgaaaccactggcacgtggagaataagctgcactggcgtctggacgtggtaatgaatgaagacgactgcaaaataagaagaggaaacgccgcagaattattttcagggatacggcacatcgctattaatattttaacgaatgataagcagcgcaatggtgaaaaatgcgccgccaatagccatcagcgtcagaaactgcggccagacgatttcgaatccggcaccccggtagaggatggcctgcgcgaggctaacaaaccgagtaagtccctggataccgacctaagcacctacctaggccccgagtcgaccgatgatacttctgctcagtcatgcatcatcaagacagtaaatattctgggatatacccagttgcctggtaaagtgcctgggctcatgcgctgtggcatcgaccggttcaccttgaatatccggctggcgtccggcgaggacatcacgctgaaaattaggcggaatatttatcgcgaaggtatagcgtacggcgtccagtccggcatccatctcatcggcggggatcaactccggggggaaaaaccacggacgaaaaaggcgcccggatttccatcaagattagcgacgaacagcgatcgcttcgatctcaatcttcacgtctttcggcagacgggcaacttcaacgcaagaacgtgccgggaaggtggcgttgtgtccggtgaagaaggcttcgccagcggcttcgacgatcgcttttacgttgtccagcgactgacgtgcctgtgcagcgacgtctgccggtacttcgcccgtcttcggatttaccgggatctgaccggaggtgatgatcatattgcccagatcaacgccctgtactacttggctttgagcgcgatatcgttgggccgtttcggccggcaaagttggttgcaaccggttcggcatggtgtatacgtgtcggtcggggcccccggcctgtggcttcgccccggcattggggcgggttccccgcgctggtttgccgtgggtccggggttggggaaattgaagaaaactgtcctcaccgagttcaaccgtctgcgtaccgccggtaaagtggcgatcaaactggttgacggcgatgagctgatcggcgttgacctgaccagcggcgaagacgaagtaatgctgttctccgctgaaggtaaagtggtgcgctttaaagagtcttctgtccgtgcgatgggctgcaacaccaccggtgttcgcggtattcgcttaggtgaaggcgataaagtcgtctctctgatcgtgcctcgtggcgatggcgcaatcctcaccgcaacgcaaaacggttacggtaaacgtaccgcagtggcggaatacccaaccaagtcgcgtgcgacgaaaggggttatctccatcaaggttaccgaacgtaacggtttagttgttggcgcggtacaggtagatgactgcgaccagatcatgatgatcaccgatgccggtacgctggtacgtactcgcgtttcggaaatcagcatcgtgggccgtaacacccagggcgtgatcctcatccgtactgcggaagatgaaaacgtagtgggtctgcaacgtgttgctgaaccggttgacgaggaagatctggataccatcgacggcagtgccgcggaaggggacgatgaaatcgctccggaagtggacgttgacgacgagccagaagaagaataa

SEQ ID NO: 28803 - DNA, 864 bp, Homo sapiens; identical to SEQ ID NO: 24781
  SIMILAR (444)..(527): 921254mologous to Escherichia coli H repeat-associated protein,accession number X60998,Smith-Waterman Score=138.

SEQ ID NO: 28804 - DNA, 3390 bp, Homo sapiens
  SIMILAR (2470)..(3183): 981254mologous to Escherichia coli K12 putative oxidoreductase,accession number AE000306,Smith-Waterman Score=1224.
atgagctatagaaccacgccacaagaacccgaacccgggcacctatggacacccaaatatcagaaccgccgcttggctgccaaccaacgtgaagggacgttgtcgattatggttggcggtgatgaagcggtatttgaacgtgttaaaccgctgtttgaactgctcggtaaaaatatcaccctcgtgggcggtaacggcgatggtcaaacctgcaaagtggcaaatcagattatcgtggcgctcaatattgaagcggtttctgaagccctgctatttggcttcaaaagccgtattatgctggcaattatcctcagcgcctttttcattgccgcggtaatggtattaaacggtgctgcgggcagtaaatacggtgtgccttttgccatgatcctgcgtgcttcttacggtgtacgtggtgcactgtttcccggattattaggggcggaattgccgccatcatgtggtttggtttgcatgttacgcggggtcactgatgataaagacgtcattgcaattgatggaaaaacgctccggcactcttatgacaagagtcgccgcaggggagcgattcatgtcattagtgcgttctcaacaatgcacagtctggtcatcggacagatcaagacggatgagaaatctaatgagattacagctatcccagaacttcttaacatgctggatattaaaggaaaaatcatcacaactgatgcgatgggttgccagaaagatattgcagagaagatacaaaaacagggaggtgattatttattcgcggtaaaaggaacccaggggcggctaaataaagcctttgaggaaaaatttccgctgaaagaattaaataatccagagcatgacagttacgcaatcagtgaaaagagtcacggcagagaagaaatccgtcttcatattgtttgcgatgtccctgatgaacttattgatttcacgtttgaatggaaagggctgaagaaattatgcgtggcagtctcctttcggtccataatagcagaacaaaagaaagagccagaaatgacgtccggtgacaaccctagtacgttgccaatgcttgccattcacattgcactcctgtgccacacggctgccgggtggacgcagtgtcgtgttttgcggtactttgctggccgcctccttacctgctttaccttcgtgctccgactagaactccggtttgctgcctccgtgtacagtcactgggcttgccgtggcgaagccgtgtattccaggctccacgatatcccaggcgtttacccaccttggaaaggttccctcgatgcgcttctccttgttaccggaccattgctggttaattggataccttgtccggcctttcttcgcctctgtggaagcgtgtgcgctttctcaattgcttcacgctggtgggtattcccggaccgcggtacgtcgtcaccccccagctttgctgttttgcggacccccgctttcgcacggtttcctcgcgggatcctctacggcgtctgccacagtgatcccactgctgatctcgtactccctccatcgcttcgaatccaacgtccgcgcggcgaccgtcgtcggcatggtcggcgcaggcgggatcggcgtcaccctgtgggaagcgattcgcggtttccagttcccacaaacctgcgccctgatggtgcttatcatcgtcacggtcagcctgctggatttcctctctcaacggttgcctacccaacacgctatcaagagatagccgcaaaacttgagcaggagcttcgtcaacactaccgctgcggcgactatcttcccgccgagcagcaactggcagcgcgctttgaggtgaatcgccacaccctgcgccgcgccatcgaccaactggtggaaaaaggctgggtacagcgccgtcagggcgtcggcgtgctggtgctgatgcgcccgttcgattacccgctcaacgcccaggcgcgttttagccagaatctgctggatcagggcagccatcccaccagcgaaaaactgctttcggtattgcgccccgcgtccggccacgtcgctgacgcactggggattaccgagggggagaacgtcatccacctgcgcaccctgcgtcgtgtcaacggcgtcgcgctctgtttaatcgaccactacttcgcggacctcaccctctggccgacgctgcgacgcttcgacagcggctcgctgcacgattttctgcgcgagccaaccggaattgcgctgcgccgcagccagacgcggatcagagcctgcgcgcccaggcaaagagtgccagggtctgaagtccgaatatgttgccgtggttggattgaagaagagttgctgtttatgccagagggcggcatgccggacatgcaggtgctgacctgggacggtcaactgctggcgcttgagctgccgcagaccgttgatctggaaatcgttgaaaccgcaccaggcatcaaaggggcatctgccagcgcccacgtgactcctatgaatacaatcgcctccgttacgctcccgcatcatgtacacgctccacgctatgatcgccagcagttgcaatcacgtatcgttcattttggctttggagcctttcaccgcgctcatcaggcgttactgaccgatcgtgtgctgaatgcccaggtaggcgactgggggatctgtgaaatcagcttgttcagcggtgatcaactgatgagccagctccgcgcacagaaccatttatataccgtgctggagaaaggtgcggacggcaatcaggtgataattgtcggtgccgttcacgaatgccttaatgcaaaactggattccttagcggcaattattgagaaattttgcgagccacaggtggcaattgtttccctgacgattaccgaaaaaggctattgtattgacccggccaccggtgcactcgacaccagtaatccgcggattattcacgatctacaaacccctgaagaacctcactccgcaccgggtattctcgtcgaagcactgaaacgccgccgtgagcgcggccttacaccgtttaccgtgctctcctgcgacaatattcccgacaatggtcatgtggtgaaaaacgcggtgctgggaatggcagaaaagcgttcgccagaactcgccgggtggataaaagagcacgtcagtcttccgggaaccatggtcgaccgcattgttccggctgcaaccgacgaatcactgctgcgaaccgttatccagtgggtgttggagataacttgtcgctggcgtcctgctgtgaagtccaggtgtcactgtgactggtctgcctggacaataacgggcgattatggcacccttaatagcctgaccctttcgccagaatccacgaaggttatgagtaagggcgcagacgttccaggccagcgaagcatcgagattcagtccggatga

SEQ ID NO: 28805 - DNA, 1596 bp, Homo sapiens
  SIMILAR (969)..(4): 971254mologous to Escherichia coli L-rhamnose isomerase,accession number X60472,Smith-Waterman Score=1642.
ttacccgcggcgactcaaaatttctttctcataagcccgcacgctctccagccattcgctacctgctggcgtatcgtgacgttggcaatacatttcccagaccgcctgccacggcaacgatttctgctcttccagcagtgccagacgcgcagtgtaatcgcccgccgcttccagcttgcgcagctcagcggtaggttccagcaacgcacgcagcagggcttttttcatattgcgtgtaccaatgacccacgcggcaatgcggttgatagaggcatcgaagaagtcaaggccgatatgcacccggtcaaacagatcgtgacgcacaatctcactggcaattgcctgggtttcatcatccagcagcactacgtgatcgctgtcccagcgaaccggacggctgacgtgcagcagcaactgcggcacatacagcatggcggcggaaatcttgtcggaaatcacttcagtcgggtggaagtgcccggcgtccaggcacagcgcagtctggcggctggtggcataccccatgtaaaactcattggagccaaccgtgtagctctctgcgccaatgccaaacaatttgctctcaacggcgtcgatatggtgcgcagggtttagcttctcgctgatcacctcatccagtgctgccagcagacgctgacgcggggcgagacggtcaacggtgatatctttcataccatccgggatccagatgttcatcaccgatggtgtgccgagttgctcgccaaaataggccgaaacgcgacggctggctttgcagtgatcaatccagaactggcgaatgctgtcgtcggcatgggaaagcgtaaagccatcggcgcttagcggatgcgaaaagcaggaggggttaaaatccagaccgagctgattggctttcgcccattcaacccagtttttgaagtgctctggtttgatcccgtcagccgacgtggctatcggtacatcgtgatcaccggtgacgatttgccggaagccaggctggcagtgccgcgtgtttcctgggccgaacatcagataatcgcattccgatgtgtgccggacagccgcagcatgaatctgtccaatgcggtgtcggtagtggtgtatgaagccgttgaaatgctggtccatatccattgatggcttatcgctgtctggtttaccgacaatacgagccggaacgccagcggcggtggtatgcggcggcaccggttgcagcaccacggaacctgcgccaatcttcgcgccgcgcccaacttcaatattgccgaggattttcgcgcccgcgccaatcatcacaccttcacgaattttcgggtgacggtcaccaccagatttacccgtaccgccaagcgtcacagattgcagaatcgatacgtcgttttcaatcaccgccgtttcaccaacgacgatgcctgtcgcgtggtcaagcatgataccgcgaccaatttttgctgccgggtgaatatcgacctggaacgtcacagaaaccgtttcgaactcatccagacgcaggtcgaagcccgccgtgatgttaaccagcacgccgcgcgcgccagacaggtcgatatcttccagcagcggagaagagatagccat

SEQ ID NO: 28806 - DNA, 1744 bp, Homo sapiens
  SIMILAR (209)..(571): 921254mologous to Escherichia coli YhhI protein,accession number D90709,Smith-Waterman Score=572.
atgaaaaggtcaatgacactgacaatatttcactcagaaagaatcatccttagaaaccgtcaacctcctccaaaagaaagttgggaagatatagaggatttcggggaaacacatctcgatttcttgaagcaatatggtgattttgaaaatggtattcctgttcacgatactattgccagagttgtatcctgtatcagtcctgcaaaatttcacgagttgctttattaactggatgcgtgattgccattcatcaaatgataaagacgtcattgcaattgatggaaaaacgctccggcactcttatgacaagagtcgccgcaggggagcgattcatgtcattagtgcgttctcaacaatgcacagtctggtcatcgggcagatcaagacggataagaaatccaatgagatcacagctatccctgaacttcttaacatgctggatattaaaggaaaaatcatcacaactgatgcgatgggttgccagaaagatattgcagagaagatacaaaaacagggaggtgattatttattcgctgtaaaacagcgcaatggtgctgtcgagaaccgcgcgaaaacccagacgcggatcgcttttggcgaccattttttccgccgacaggtgagtcagcgtatccggcttttttgccaccggctggcgacacagttcgcagcacgcctgcggatgttcatcgctactggtcagcccatgaacgggctgcggctgctgctgttcatcgtcaacaaacaggcggccctgctcgtcaataaacttgatgcgcagatggcggctttccagcaactcccgggcagagggcgtcaggcgactgtccgcagggagatggatctctgcgccttcgctgagcgtatgggattgccagttagccggccaggcgacatacaggaatttcacgctggatgtcgtaccaaattcgatgctggagcctttcgggataaacatcacgtcgcctgctttggcgatcatggtttggccttcgtggcgaacatgcagctccccttccagcaccatgtcgatttcgtcgtagttcagggtccacgggaagaatgcgttctcccactgcataaaaccggcggccatgctgctgccgtcgtctccggtcacaagatcagtcaagcccacgcaatgcggctctgcgccgtcgaaacgaccaaacttgacgctactggcatcaatcactttgatgccgcctttgccggtcaccgatttgaaagctcggttgattgcgcctgctccgcgactgtttccttcatcacttttccatcagtgtgcgaccggttcggtaactggcttcgcagtggcagatgttcgcatgcggctcgcaagaacgaaatcaccctaactaacacccggcgcagcctgagacctaaacgcaacaccgagaggcacgacatgcaaacaagggccaccgttatcgctgccggtgaaaaactactgccttatgcagaaacgctcatgagcacctggcaggccgcccgtaaggaggtggcgcatacctcacgacataacgagttttctatcggtgccagcgcctcgttgtgggacatggtgatgacatccgccggggctgttgtcacgaccgtcgtcgttgctgtacgaccttcctctttctatattctctgctctcacaagaagaagcgaacactacacaccaagagagagaagacagtagacagaaggaaagagtacgaaacgagagcgaagagatcagaaacagatacacaatag

SEQ ID NO: 28807 - DNA, 2691 bp, Homo sapiens
  SIMILAR (1939)..(2370): 1001254mologous to Escherichia coli L-rhamnose-H+ transport protein,accession number M85158,Smith-Waterman Score=718.
atgcgtgactgccattcttcagatgataaagacgtcattgcaattgatggaaaaagcgtctctctggcattgcttatgacaaggagtcgccgcaggggagcgattcatgtcattagtgcgttctcaacaatgcacagtctggtcatcggacagatcaagacggatgagaaatctaatgagattacagctatcccagaacttcttaacatgctggatattaaaggaaaaatcatcacaactgatgcgatgggttgccagaaagatattgcagagaagatacaaaaacagggaggtgattatttattcgcggtaaaaggaacccaggggcggctaaataaagcctttgaggaaaaatttccgctgaaagaattaaataatccagagcatgacagttacgcaatcagtgaaaagagtcacggcagagaagaaatccgtcttcatattgtttgcgatgtccctgatgaacttattgatttcacgtttgaatggaaagggctgaagaaattatgcgtggcagtctcctttcggtccataatagcagaacaaaagaaagagccagaaatgacggtcagatattatatcagttctgctgatttaaccgctgagaaattcgccacagcgatccgaaatcactggcacgtggagaataagctgcactggcgtctggacgtgtcgcgtaaccgccgttttggcatgatgctcggtcagggcatggatgtacaaagcgcgcaggagaagattggtcaggtggtggaaggctaccgcaatacgaaagaagtccgcgaactggcgcatcgcttcggcgttgaaatgccaataaccgaggaaatttatcaacacgaaaaccttggcagtgcactgagctacatgctggcgaacaagctgtcatcgccaattatgcctgctattgctatccgtgaagtggtggaagaagcctacgccgctgacccggaaatgatcgcctctgcggcctgtgatattcaggcggtgcgtacccgcgacccggcagtcgataaatactcaaccccgttgttatacctgaagggttttcatgccttgcaggcctatcgcatcggtcactggttgtggaatcaggggcgtcgcgcactggcaatctttctgcaaaaccaggtttctgtgacgttccaggtcgatattcacccggcagcaaaaattggtcgcggtatcatgcttgaccacgcgacaggcatcgtcgttggtgaaacggcggtgattgaaaacgacgtatcgattctgcaatctgtgacgcttggcggtacgggtaaatctggtggtgaccgtcacccgaaaattcgtgaaggtgtgatgattggcgccggcgcgaaaatcccgggcatcttgacagttggcgccgggcgaagatggcgcaggttccgggtgctgcaacggtgccgcgcataccaccgccctggcgtccggtctattgccgtaaccaacgcgaaacctcatgatggtccgtacaaaacgctacatctggcggatgaaaaactgatccgtagcctgaagcccggagcgattctgattaacgcctgccgtggcgcagtcgtcgataatactgcgttgctgacctgcctgaatgaaggccagaagttaagcgtagtgctggatgtctgggaaggcgaaccggaactcaacgtcgagctgctgaaaaaagtggatatcggcacgtcgcatatcgcaggctataccctggaagagtatggtcgcattacgctgcatggcccgctcgatcaaccgacgctgaacaggctggtgcatttggtgtctgatgtgcgccgcgatgacgcaccgctgcgtaacgtcgccgggatccggttgactggcggacgtgtctctggtaccacgttcagtgacatgcgctgcgcatgcgatggaactgttacttgtaacacggggaaatcggcaaacggaacgcgctcgtttagtctctctacgcgactgcctgtttttctgttcggcgctatgtgggggatcggtaatatcaactacggcctgaccatgcgttatctcggcatgtcgatgggaattggcatcgccattggcattacgttgattgtcggtacgctgatgacgccaattatcaacggcaatttcgatgtgttgattagcaccgaaggcggacgcatgacgttgctcggcgttctggtggcgctgattggcgtagggattgtaactcgcgccgggcagttgaaagagcgcaagatgggcattaaagccgaagagttcaatctgaaaaaagggctggtgctggcggtgatgtgcggcattttctctgccgggatgtcctttgcgatgaacgccgcaaaaccgatgcatgaagccgctgccgcacttggcgtcgatccactgggatcttgtccgcctcaaaagcccgacttctcgctggcaaaatcgctgatcattcacaatgtgttactctcgacactgggcgggttgatgtggtatctgcaattctttttctatgcctggggccacgcccgcattccggcgcagtatgactacatcagttggatgctgcatatgagtttctatgtattgtgcggcggtatcgtcgggctggtgctgaaagagtggaacaatgcaggacgccgtccggtaacggtgttgagcctcggttgtgtggtgattattgtcgccgctaacatcgtcggcatcggcatggcgaattaa

SEQ ID NO: 28808 - DNA, 1449 bp, Homo sapiens
  SIMILAR (1017)..(4): 941254mologous to Escherichia coli alternate gene name yhhI,accession number U00039,Smith-Waterman Score=1648.
ttacgaaagcccgctccccgtaaggactgacgccaggtagtttctgtccatggctgcttttcgcatcttacgtcttaaccctgccttgaataccttatcattcgtcaaaatattaatagcaatgtgccgtatccctgaagataattctgctgcatttcctcttcttattttgcagtcgtcttcattcattaccacgtccagacgccagtgcagcttattctccacgtgccagtgatttcggatcgctgtggcgaatttctcagcggttaaatcagcagaactgatataatatctgaccgtcatttctggctctttcttttgttctgctattatggaccgaaaggagactgccacgcataatttcttcagccctttccattcaaacgtgaaatcaataagttcatcagggacatcgcaaacaatatgaagacggatttcttctctgccgtgactcttttcactgattgcgtaactgtcatgctctggattatttaattctttcagcggaaatttttcctcaaaggctttatttagccgcccctgggttccttttaccgcgaataaataatcacctccctgtttttgtatcttctctgcaatatctttctggcaacccatcgcatcagttgtgatgatttttcctttaatatccagcatgttaagaagttctgggatagctgtaatctcattagatttctcatccgtcttgatctgtccgatgaccagactgtgcattgttgagaacgcattattgatcatgaatcgctcccctgcggctgtactcttatcataagaatgccggtgtatttttccatcaattgcgatgacgtctttatcatctgaagaatggtagtcaagcatccagttaataaagctctcatgaaatttcgcaggacagatacaggatacaactctggcaatggtatcgtgaacaggaataccattttcaaaatcaccatattgcttcaaaaaatcgggatgtgtttccccaaaatcctctatatcttcccagccttgtcttaaccctgccttgaataccttatcattcgttaaaatattaatagcgatgtgccgtatccctgaaaataattctgcggcgtttcctcttcttattttgcagtcgtcttcattcattaccacgtccagacgccagtgcagcttattctccacgtgccagtggtttcggattgctgtggcgaacttttctgcggttaaatcagcagaactgatataatatctgaccgtcatttctggctctttcttttgttctgctattatgaccgaaaggagactgccgcggtaccgagctgaccgcttcccgttgtgtgtgttcttgcctgctctctgcttctttgtgtgcccttcctgcgagctcccggccgggaagaggcagcccgcgcctgcctcccagcagatgcccacagcgccaagcgacagcctcgtgctcat

SEQ ID NO: 28809 - DNA, 1263 bp, Homo sapiens
  SIMILAR (592)..(1245): 941254mologous to Escherichia coli O157:H7 putative enzyme,accession number AE005614,Smith-Waterman Score=1080.
atggccgcactgccatgccggctcattcttcctcaccatctcaccgaccaattcgtggcttggcaagagcgctccagtctatcgcaacccagcccgcggcacactcaattgcgcttgcccacactccatcccagatcacccaatcctggcatcctgcactgccagccatcagcttcaagcccagccaccgacgacacccgaccaaccacaccgactgaacgcagcccatgcacgggacttgatcatgactccacgtgccatccagcgttacacagaccacagctggtgacaccagtctccgcggcagcctgcactgtcgtcagaagtttgtatcctttgactgaaatcttccatttgcctcggctgggaatccagcggtgcgaagtgcaggctcgcgccatccagacggacagacgccgtggtaaccaggacatcacccacattaatatgcggctgaatagcgcgcgggtaccgatacgcaggaaggtgcgaatgcccagctgtgccagctcttcaacagcaatagaggtagacgggccgccgataccggtagagcagacgataacaggtttaccatccagctctgcacgccagggtacggagaataccatggcaacaacacaacaatctggatttgcacctgctgcatcgcctctcgcttcgaccatcgttcagaccccggacgacgcgattgtggcgggcttcacctctatcccttcacaaggggataacatgcctgcttaccatgccagaccaaagcaaagcgatggcccactgccagtggtcattgtagtgcaggaaatttttggcgtgcatgaacatatccgcgacatttgtcgccgtctggcgctggaggggtatctggctatcgcacctgaactttacttccgcgaaggcgatccgaatgattttgccgatatccccacgttgcttagcggtctggtagcaaaagtgcctgactcgcaggtgctggccgatctcgatcatgtcgccagttgggcttcccgcaacggcggcgatgttcatcgtttaatgatcaccggattctgctggggtggacgtatcacctggctgtatgccgcgcattatccacagctaaaagccgcagtggcgtggtacggcaaactgacgggcgacaagtcgctgaattcaccgaaacaacctgttgatatcgcaaccgatcttaaagcgccgaatctcggcttatatggcggccaggatacagcattccgcaagagagcgttgaaccatggccagcgctga

SEQ ID NO: 28810 - DNA, 2919 bp, Homo sapiens; identical to SEQ ID NO: 22592
  SIMILAR (1917)..(1399): 991254mologous to Escherichia coli ferrienterochelin receptor protein,accession number M13748,Smith-Waterman Score=924.

SEQ ID NO: 28811 - DNA, 1035 bp, Homo sapiens
  SIMILAR (1)..(1032): 991254mologous to Escherichia coli K12 putative enzyme,accession number AE000264,Smith-Waterman Score=1751.
atgaaacctgtaaaaccacctcgtattaatggacgagtgccggtcctgtcggcacaggaagcggtgaattatattcccgacgaagcaacactttgtgtgttaggcgctggcggcggtattctggaagccaccacgttaattactgctcttgctgataaatataaacagactcaaacaccacgtaatttatcgattattagtccaacagggcttggcgatcgcgccgaccgtggtattagtcctctggcgcaagaaggtctggtgaaatgggcattatgtggtcactggggacaatcgccgcgtatttctgaactcgcagaacaaaataaaattattgcttataactacccacaaggtgtacttacacaaaccttacgcgccgccgcagcccaccagcctggtattattagtgatattggcatcgggacatttgtcgatccacgccagcaaggcggcaaactgaatgaagtcactaaagaagacctgattaaactggtcgagtttgataacaaagaatatctctattacaaagcgattgcgccagatattgccttcattcgcgctaccacttgcgacagtgaaggttacgccacttttgaaaatgaggtgatgtatctcgacgcattggttattgcccaggcggtgcacaataacggcggtattgtgatgatgcaggtgcagaaaatggttaagaaagccacgctgcatcctaaatctgtccgtattccgggttatctggtggatattgtggtggtcgatccggatcaaacccaactgtatggcggtgcaccggttaaccgctttatttctggtgacttcacccttgatgacagtaccaaacttagcctgcccctaaaccaacgtaaattagttgcgcggcgcgcattattcgaaatgcgtaaaggcgcggtggggaatgtcggcgtcggtattgctgacggcattggcctggtcgcccgagaagaaggttgtgctgatgcctttattctaacggtagaaacaggtccgattggcggaattacttcacaggggagc

SEQ ID NO: 28812 - DNA, 1266 bp, Homo sapiens
  SIMILAR (790)..(1266): 961254mologous to Escherichia coli glycine acetyltransferase,accession number U00039,Smith-Waterman Score=777.
ttattgagggctggcgatatcaatattaagatagctgttggtatcaagaaaactggttatatgaatacgcgatttttctggcgaatatctaatggcattaacaataagattcgataacattcgttgtagtaaaattttatccgcaaagatttgctgattgcactcgaccttaaagcaaatctctttctcgtcgcacagccactcgtaatcttttaccggcccaagtatacgggcgcagaaaaggccgtcacgttctggtttgaacgtacggtagttgatggtttccggctttttaacttcaccgaaagaccatgaacggatcatgtctggcgaagccagagcaattttgatcgcatcaaactcttcggttttagtctgcgctttcagaaactttaataaatctttcacggatttgctcccgtcggagttagcacaatccgccagcgaacgaatctctttcaacaatacgttgaaggattctggcatgcccggctccatctgatggttgccgtccacgatgtttttatacatcttggtacgaccgttcacgtcatcagacttaacggtgagcatttcctgcagggtgtatgctgcgccgtatgcttccagcgcccacacttccatctccccgaaacgctgaccaccgaacacccagcggctgctgacggggcccgttggaaccttttggggtcggaaacccccattatttccgaccccctgacccacgcgtctattattgatggtgcgcgtctgtccaaaccttaacgctatcgctatgccaacaacgatatgcaggagctggaagcacgtctgaagggcgtttgcgatctggcagataaatatgatgccctggtgatggtagacgactcccacgcggtcggttttgtcggtgaaaatggtcgtggttcccatgaatactgcgatgtgatgggccgggtcgatattatcaccggtacgcttggtaaagcgctgggcggggcttctggtggttataccgcggcgcgcaaagaagtggttgagtggctgcgccagcgttctcgtccgtacctgttctccaactcgctggcaccggccattgttgccgcgtccatcaaagtactggagatggtcgaagcgggcagcgaactgcgtgaccgtctgtgggcgaacgcgcgtcagttccgtgagcaaatgtcggcggcgggctttaccctggcgggagccgatcacgccattattccggtcatgcttggtgatgcggtagtggcgcagaaatttgcccgtgag

SEQ ID NO: 28813 - DNA, 2082 bp, Homo sapiens; identical to SEQ ID NO: 25735
  SIMILAR (112)..(990): 881254mologous to Escherichia coli xylR,accession number U00039,Smith-Waterman Score=1323.

SEQ ID NO: 28814 - DNA, 2518 bp, Homo sapiens
  SIMILAR (631)..(1254): 991254mologous to Escherichia coli Acetyl-CoA:acetoacetyl-CoA transferase a subunit (EC 2.8.3.-),accession number D90811,Smith- Waterman Score=1061.
atggtggaagccaccctcaacagcagaacttgggtatctactcatgtaggagctgtcctgccctattcttgtgtcaactatggcgctgatgttcgtcagaaagttgacctgagtaccttcagcgatgaagaagttatgcgtctggctgaaaacctgcgcaaaggtatgccaatcgcaacgccggtgttcgacggtgcgaaagaagcagaaattaaagagctgctgaaacttggcgacctgccgacttccggtcagatccgcctgtacgatggtcgcactggtgaacagttcgagcgtccggtaaccgttggttacatgtacatgctgaaactgaaccacctggtcgacgacaagatgcacgcgcgttccaccggttcttacagcctggttactcagcagccgctgggtggtaaggcacagttcggtggtcagcgtttcggggagatggaagtgtgggcgctggaagcatacggcgcagcatacaccctgcaggaaatgctcaccgttaagtctgatgacgtgaacggtcgtaccaagatgtataaaaacatcgtggacggcaaccatcagatggagccgggcatgccagaatccttcaacgtattgttgaaagagattcgttcgctgggtgaaggctacgccacttttgaagatgaggtgatgtatctcgacgcattggttattgcccaggcggtgcacaataacggcggtattgtgatgatgcaggtgcagaaaatggttaagaaagccacgctgcatcctaaatctgtccgtattccgggttatctggtggatattgtggtggtcgatccggatcaaacccaactgtatggcggtgcaccggttaaccgctttatttctggtgacttcacccttgatgacagtaccaaacttagcctgcccctaaaccaacgtaaattagttgcgcggcgcgcattattcgaaatgcgtaaaggcgcggtggggaatgtcggcgtcggtattgctgacggcattggcctggtcgcccgagaagaaggttgtgctgatgactttattctgacggtagaaacaggtccgattggcggaattacttcacaggggatcgcctttggcgcgaacgtgaatacccgtgccattctggatatgacgtcccagtttgatttttatcacggtggcggtctggatgtttgttatttgtgttttgctgaagtcgaccagcacggtaacgtcggcgtgcataaattcaatggtaaaatcatgggcacccgaggatccctggcgctggaggggtatctggctatcgcacctgaactttacttccgcgaaggcgatccgaatgattttgccgatatccccacgttgcttagcggtctggtagcaaaagtgcctgagtcgccaggtgctggacgatctcgcatccatgtcgacagtggggcgttctccgcgaagacgctgggtctggactggaactacaccactagctttcctgggtctccatcttgcagacggcagattgtaagacttcttggtctccaaaatcaggggggcgaaacccgtggcaatttggccccccggtggtcccggtaaacttcgtccgctggcggaaagtgactggagaatcgcccgtcagatcgggccgaccttgaaagaaaaaggcctgatttttgtgggtctgaatatcatcggcgaccgtctgactgaaattaacgtcaccagcccaacctgtattcgtgagattgaagcagagtttccggtgtcgatcaccggaatgttaatggatgccatcgaagcacgtttacagcagcagtaacccaccttagcgagaaggatctcgttgagactctgagtgacagcgcccttctttccacgcatactgggcgctgttgcttttttgaaccaggaaacagaacctctgacaatgaatttacagcatcactttcttattgccatgcctgctctccaggatccgattttccgtcgttccgtggtctacatttgcgaacataataccaatggtgcaatggggatcatcgtcaacaagccgctggaaaatctcaaaattgaagggattctggaaaagctgaagatcacgccggagccgcgtgatgaatcaatccgtctggataaaccggttatgctcggcggtccgctggctgaagatcgcgggtttattttgcatactccgccctccaattttgcttccagcattcgcatttcagacaacacggacggtacgccggactggaacattatcgagcgtttactgaaagagtggcagccggacgaaatcatcgtcggtttgccgctgaatatggacggcaccgagcaaccattgactgccagagcgcgtaaatttgccaaccgtattcatggccgtttcggtgttgaagtaaagctccatgacgagcgtcttagcactgtggaagcccgttccggtctgtttgaacagggcggctatcgggcgctcaacaaaggcaaagttgactctgcctctgcggttattattctcgaaagctatttcgagcagggatattaa

SEQ ID NO: 28815 - DNA, 456 bp, Homo sapiens; identical to SEQ ID NO: 24703
  SIMILAR (166)..(453): 891254mologous to Salmonella typhimurium putative chaperonin,accession number AF093749,Smith-Waterman Score=430.

SEQ ID NO: 28816 - DNA, 780 bp, Homo sapiens
  SIMILAR (301)..(663): 871254mologous to Salmonella typhimurium putative chaperonin,accession number AF093749,Smith-Waterman Score=515.
atgatgctcaacgtgaaatggggcttcacctgtacttgggcattgggctctggtcctcaggcaaaaatcctaggcaagaggatcaatgactgggcccccaccaagctgggattccccgccaacaacatcccgatgttcggcatgatgaatcagatggatacccgcggcaaattcatcttctgcgccttcgccgtttccgctgctttcgccctgggcgaccacttaggcttcgccgctgccaacatgaacgccatgatcttcccgatgattgtcggcaagttgatcggcggcgtaacggcgattggcgtggcgatgatgctggtgattttctcccggctggagctggttaaccgtgcggcggtgtcgcaggtgccgcgctacgaattcattaaacgcgaaattagctggcaaagtccggtgttctttacccctgtcgataaacagggcggtttaaaagaagcggaactgaaaaccttaatactcgagcaatatcatgctgcgggtattgagccggaaagcgttgattctggtgccatcatcatcaccggtgaaagcgcgaaaacccgcaatgctcgcccggcggggatggcgctctctcagtcgctgggcgattttgtcgttgccagggccgggccgcaccttgaatccgtgaacgccgggtaccgaactcgaattcgaaatcatgggcatagctggttccctggggaaattggtatccgttcacaattcccacacacattacgaaccggaagcataaatggtaaagcctggggtgcctaa

SEQ ID NO: 28817 - DNA, 1434 bp, Homo sapiens
  SIMILAR (1)..(495): 931254mologous to Escherichia coli tryptophan-specific permease,accession number M59862,Smith-Waterman Score=770.
atggcaacactaaccaccacccaaacgtcaccgtcgctgcttggcggcgtggtgattatcggcggcaccattattggcgcagggatgttttctctgccagtggtcatgtccggggcgtggtttttctggtcaatggcggcgctgatctttacctggttctgtatgctgcattccggcttgatgattctggaagctaacctgaattacagaatcggttcgagttttgacaccatcaccaaagatttgctgggcaaaggctggaacgtggtcaacggcatttccattgcctttgtgctctatatcctgacctatgcctatatttctgccagtggttcgattctgcatcacaccttcgcagagatgtcactaaacgtcccggcacgggcggcgggttttggttttgcattgctggtagcgtttgtggtgtggttgagcagtaaagccgtcagtcggtaccgagagctcgacagcctcgatttaaccgcaaaagccattggtattgatatcgatccgcaggcgattcaggccagccgcgataacgccgaacgtaatggcgtttctgaccgtctggaactctacttaccgaaagatcagccagaagaaatgaaagccgacgtggtggtcgctaacatccttgcaggcccattacgtgaactggcaccgttaatcagcgtcctgccggtttcaggcggtttgctgggcctttccggtattctggcaagccaggcagagagcgtttgtgaagcttatgccgatagcttcgcactggacccggtcgtggaaaaagaagagtggtgccgtattaccggtcatgcgtttgcggtggacatgaaaccgtggaaaaacgtcaagatcgcgtcaattggcatcctgttcgcgatgattggcgtctatgccgggctggctgaattcggcggctacggtacgcgctggttagcgatgatcagttatttcattgccgccgtagtgattgtctacctgatttttgacagctggcggcatcgtcacgacccagccgccaccaatatggtcggttgctatagcggtaaaccgctgaatacgcaaaatattgatagtctggcggcggaaggtattcgctttaattccgcctacacctgttcaccggtttgtacgcctgcacgggccggactatttaccggtatctacgctaaccagtccggcccgtggaccaacaacgtcgcgccaggcaaaaacatctccactatggggcgctactttaaggatgccggctatcacacctgttacatcggcaaatggcatctcgacggtcatgactatttcggcactggcgagtgtccgccggagtgggacgctgattactggttcgatggggcgaactatcttagcgaactgacggaaaaagagattagcctgtggcgcaatggcctaacagcgtcggcccactcaacgtaa

SEQ ID NO: 28818 - DNA, 561 bp, Homo sapiens
  SIMILAR (238)..(558): 1001254mologous to Escherichia coli similar to E. coli pyruvate formate-lyase,accession number U00006,Smith-Waterman Score =540.
gtcgactctagaggatacccatatggcagcagaggcgctggaaagtgccgcgaaagcgaaaggctgggaagtgaaagtagaaacccagggtcaattggtctggaaaatgaactgactgcggaagatgtggcgagcgctgatatggtgattctgaccaaagatatcggcatcaagtttgaagagcgttttgctggcaagaccatcgtgcgcgtcaacatcagcgatgcagagttcctcatgacgaatcgtatctctcgcctcaaaactgcactgtttgccaatacccgtgaaatctcgctggagcgggcgctgctttataccgccagccatcggcaaaccgaaggcgaaccggtgatattgcgccgggcgaaagcaacagcgtatatccttgaacatgttgaaatttcgattcgtgatgaagaactgattgccggtaaccgcaccgtaaaaccgcgcgccgggattatgtcgccggaaatggacccttactggctgctgaaagagctggatcaattcccgacgcgtccgcaggaccgctttgctatcagcgaagaagattaa

SEQ ID NO: 28819 - DNA, 3414 bp, Homo sapiens
  SIMILAR (2799)..(2894): 651254mologous to Salmonella typhimurium putative chaperonin,accession number AF093749,Smith-Waterman Score=124.
atggaggatttgataaaactacggaaaaatgccgttaccagtgtcaggcttatgcgcaatttgtcgccagtcaccgccgaatgctgtggcgaagggggaatcaaagcctgggattatgtccggatgggttttttaagccgaatgggcgtacttaataactggttgagcgaagaagaaagtctatggatccagtcgcgcattcatctacgcgtgctctacgttattatagtaactggcggcaatactttgccggttataccttatggtcggcaatattggcagtctcccgaagatgatcatctgcctttattacgcgaattcttagcgcgtaaagaatacgagcgattccaggcaaaaaccgatccgcagggttttaaacaacttcgtcaggcgtatgaggaggcgctacggattgcgcagtcgcctgctaaatctgtttggcaaccagaagaatatgaggtagcagaacatgaaattctgctcgcctttcgtgcgttacttgcctctgatagtgaacgttttctgccctccgcctggcagcgattcattcagcaattaaattattgctcgatggaggagattgatgaattacgctggtcgctgtgcacaatcgccatgaacactgcccatttatccttcgagtgcgtggtgttatttagccaggaaacggccgagacacaacgcccggatacaatcagctcagtaccagcccttcattatatattgatgacctggtggataccggtggggtacaacaagcgagatccccgtcctaccgttggggtaatctgggccttgaggacttcagaccggttcgtggacctgctgtgggactccttttgtcgtgccgggggcactttttatcccccccacgacgggacaaattctccttcccaaacgattcgcacaagagccacgggtagatttcggtggaacttacacgctggcaattgtgccggcacaacaggcgacacgaacacgagctctcccgcgagaacggtccccacgagttgttcctgtacccccctgttggtcgctgtcgccattttcgggggcgtacaccagtctagtgttccgacacactatgtgggcccgggcgtaattattgcctccgatccttgtaccaaacgggggcactgtaaccgctttgatccctactatgttcagcaaggtgtgtcagcgtgtctgccagctgaagagtatgcagaaatcgctgggatcaactggaagcgggtgacgttaacttcattaaagatttttactaccgtctggcgcatcgtgtggaacgctggaatttgggtgaagagtactggggctacgcgaaaaataaactctggtcgccgtttggctatccggttcaccatgccaatgaagcgtcagcgcaggcgggaattattgctcatcgaaagcaatggctgctcgcatggcggtagtagattgggcgctgtacgaatagaaacacgaacctcatcacttacccccgcgagttgggcgctaaaaaagttgtgcaattgcgatgtgagattgctcgccgtacttaacggactgaacagtatcgcgatgatcgccacgctacgttttattatcagcattttcgcccccagccatttctacaactggctgatggcttctgacgtggtggactacgaggagagccgcagcggtcgccgcctcgacgggctggtgttctccacctacctgttcagcctgaagattggcctggcgattggcggggcggtggtgggctggatcctggcgtacgtcaactattccgccagcagcagcgtgcagccggttgaggtgctcaccaccatcaaaattctgttctgcgtggtgccggtggtgctctacgcgggcatgttcatcatgctgtcgctctacaagctcaccgatgcccgcgtggaggccatcagccggcagctgattaagcaccgcgcggcgcagggctccgccgtcagccttggttctacgaatatgaccattttccatatacaccactcggctggcggttttacgcgccacttcaacttcgtgggtgacgatcacctgggtaatattcgtttctgccagctcacgaatgatgctgacgatttgtgccgtaatttccgggtccagtgcggcggtcggttcatcgaacagcagtacctgcggttccatcatcaacgcacgggcaatagcaacacgctgctgctgaccaccagaaagatgcagcgggtaacgatcgctataaggtttgagacgcagacgttccagcaggttttctgcacgggccagagcatgatctttaatcaacccccagtacacggcaggtcaatcgagctcggcggtttaaaagaagcggaactgaaaaccttaatactcgagcaatatcatgctgcgggtattgagccggaaagcgttgattctggtgccatcatcatcaccggtgaaagcgcgaaaacccgcaatgctcgcccggcggtgatggcgctctctcagtcgctgggcgattttgtcgttgccagcgccgggccgcacctcgaatccgtgatcgccggtcacggagccggggcacaaaccctttctgaacaacggctgtgtcgggtactgaatatcgacatcggcggtggcaccgcgaactacgccctgttcgatgccggaaaaatcagcggcactgcctgcctcaacgtcggtggtcgcctgctggaaaccgacagccacgggcgcgtggtttacgctcataaaccggggcagatgattgtggatgagtgcttcggtgcaggcaccgacgcccgttcgctgaccggcgcgcagctggtgcaggtgttacgcccgaaatcattacgctttctggcggcgtgggcgaatgttatcgccaccaggccggcgaaccgttctgtttgccgatattgggccgctgctggcactgggctggatgacattcgggcctggttaaatgacgtcagctccgagcaaacggtgcccccgcgaattggcgggggcaatcctttagcacggacgacaatggctaaggacacgtcagccaaatgcggggaacccatgtaccgctttggcgcgaggcgctcagtagacaagcacgccagcaatccctttcgaggtcaccatcagcgtcagcaccagaatgatttcctgccagatggacaggtcaatgccatacaactgcgcgatgaagatagcggcaatactttgatacagcgtcgaaccatcaagaattgtattcgtgtgcgtaatattgaaacaaaactcgtcactggaaaagtaggtactcaacacacacaactgcttggtaatacgcttactggaagcactgccgccaaaggcgttggcgtactccttgcaggtttagcaaccagtaacaatccgctaatgacattaaaacctaatgataacgaattcttcccgtctaagtgttaa

SEQ ID NO: 28820 - DNA, 1809 bp, Homo sapiens
  SIMILAR (565)..(1125): 1001254mologous to Escherichia coli 3-methyladenine-DNA glycosylase I (tag),accession number J02606,Smith-Waterman Score= 1012.
atgagtgatatcgataagctttcccgcaaggttccacagctgtgtaaagttgcgccgagcacccagaaataccatatggaagatgttcaccgtgctggtggtgttatcggtattctcggcgaactggatcgcgcggggttactgaaccgtgatgtgaaaaacgtacttggcctgacgttgccgcaaacgctggaacaatacgacgttatgctgacccaggatgacgcggtaaaaaatatgttccgcgcaggtcctgcaggcattcgtaccacacaggcattctcgcaagattgccgttgggatacgctggacgacgatcgcgccaatggctgtatccgctcgctggaacacgcctacagcaaagacggcggcctggcggtgctctacggtaactttgcggaaaacggctgcatcgtgaaaacggcaggcgtcgatgacagcatcctcaaattcaccggcccggcgaaagtgtacgaaagccaggacgatgcggtagaatttttcaccgatgcgtcaagaaaagcggctgaaatttttacgatcgggtacatagcgagggaaagtatggaacgttgcggctgggtgagtcaggacccgctttatattgcctaccatgataatgagtggggcgtgcctgaaactgacagtaaaaaactgttcgaaatgatctgccttgaagggcagcaggctggattatcgtggatcaccgtcctcaaaaaacgcgaaaactatcgcgcctgctttcatcagttcgatccggtgaaggtcgcagcaatgcaggaagaggatgtcgaaagactggtacaggacgccgggattatccgccatcgagggaaaattcaggcaattattggtaatgcgcgggcgtacctgcaaatggaacagaacggcgaaccgtttgtcgactttgtctggtcgtttgtaaatcatcagccacaggtgacacaagccacaacgttgagcgaaattcccacatctacgtccgcctccgacgccctatctaaggcactgaaaaaacgtggttttaagtttgtcggcaccacaatctgttactcctttatgcaggcatgtgggctggtgaatgatcatgtggttggctgctgttgctatccgggaaataaaccatgattcgggaagcgcaacgttcagaactccccgcgatcctcgaactgtggctggaaagtacaacctgggggcatccctttataaaagcgaattactggcgtgactgcattccgctggtgccggatgcctatcttgccaacgcgcaaaactgggtctgggaagaagacggtaagcttctcggttttgtcagcattatggaaggccgatttctggcagcgatgtttgtcgcaccgaaggccgtcaggcgcggtattggtaaggcgctgatgcagtatgtgcagcagcgccatccccacctgatgctggaggtttatcaaaaaaatcaaccggcgataaatttttaccaggcacagggttttcacattggcgattgcgcatggcaggatgaaacccaactacccacatggattatgagctgggcggtgggtcaaacgcttgtagtggcaggttcggaccggtggattttttcaagccttccagcgccggtttaaccggacaggccttttccagacgcgagattgggaaaaattttggtaacacggtcattggcgcgggttttcaaaaaccggcggggggttaaatccaaaccggcctgccccttttggaaagcgaatacacccgggtaatttccctcttatgaccgttccgcaaaaatttcccgggggggtcaaaacaaaaaataag

SEQ ID NO: 28821 - DNA, 2118 bp, Homo sapiens; identical to SEQ ID NO: 18275
  SIMILAR (220)..(825): 921254mologous to Salmonella typhimurium putative chaperonin,accession number AF093749,Smith-Waterman Score=951.

SEQ ID NO: 28822 - DNA, 1536 bp, Homo sapiens
  SIMILAR (1536)..(976): 991254mologous to Escherichia coli K12 putative transport protein,accession number AE000276,Smith-Waterman Score=944.
ttaccacgggtacgggggattaccaaaggcagcacctttaagctccgcaagacgttctgaccagtcatgcgccagcgcgttgtcttccgcagtgtaatacgcggcacatttggcgttatcaccatcagtaaacagatccagaacaaacgggccaaacagggtgttaattccccagaaaatgttgtccggcgtgcgccactgatcgcccacttccttcagttcatgggctggtttgttccgcagctccaccagcgcctggcaatatttattactcattaagcccccacgtaattcccggtatcgctggatatcgctgaaatgaagcctcgtatgtgccgggaaatcccggaagtccgcaatgtgcaccaggtacatgtatggatggtaggcgagaagccggtgaagacgttgcatgtgcaggtgatcccgccacacgatcacgatgccttgttggatcagatccaacactacctgatggatcagtgcgctgttgatccacatccggctgccgttgagcgcaataaaggtcaggatgatgtactccagagacatggcgtaaacgccctgaagtgcaaaaataacgacgctaatcacgttaataatcacccacaacagccagttttccacatacttacgcgtcatcagaatcattgccacgatagataacaccatcatgcatgaatcccagaacgggaaagcgtccggttgcagttcaggcatcacaacctgtaatcctaatgcttgcatgatcatgactgccacgcgggtcaaaaatgcaaacaccggattgataaataccgtcatcagaccaatcgaaacaacgcaaaccgccaaccagctgagtgccttcggcaatggcaaccagcgaattttcaactccgcctcgttctgactggtttgtcgcgaccacgcataccaaccgtaaatattcgcggcaaagaaaaacacctgtaatagcaggctggcatacagctgaatcgggaacagactgtgcggtgaagagagcagttgctcgcggatttcatcgaccccgagattagcgtcaacccagcttatttcaccgcgcggcgtcatgatcccgcgcagagaacgcgacgccagcgtcagtacgccgttaatcatgtaacgttcttcttcggcaaatgcaccttccgggatcggcatcggcatcgggttatcggcatcgtgctgaacattggcctgacgtttcccgcccatcaaacgcaggatggcatcggcagtacgcgctcgcagcggcaaagtcgactggtggcgaataaagttgcgacgcgcaatctggttaaacacttcgatgatgatcgagaagccaatcgcggcatacaggtaacctttcggaatgtggaaaccgaaaccttctgccaccagactcagaccaatcattaacaggaagctcagacagagcaccaccaccgtggggtgctggttaacgaatcgcgtcagcggtttggatgccagcaacataaccgccatcgcaatcactaccgccgccatcatcaccggcagatggttaaccat

SEQ ID NO: 28823 - DNA, 3273 bp, Homo sapiens
  SIMILAR (1956)..(1300): 981254mologous to Escherichia coli FimD protein,accession number D90732,Smith-Waterman Score=1115.
ttactttaagccttccgctgacagcgcgtcttgtacttccggacgttcagccatacgttgcataaatgctgcaatgtgctctaacccttccagattcagtttcaccgcgtatgcccagcgcagaaccgtaaacagataggcatcagcaattgtaaatctttgcccgcagatccagtgctcatccttcagtgcctcgttcacatattgcagcttcttctccagctgcgcgcgaactgtcggtttgtactcttccggtgtatcagggcgaaacagaggtgtgaaacctttatgcagctcggtggcgatgtaattcagccattcgatggttttatagcgggaaatactgtttaccggtgccagcaactggcggtcggggacgctgtcggcaagatactgcataatcgctacgccttccgtcagcaaagtaccgtcatccagcagcaatgcaggcacctgccccttagggttaacggcaaagtaatcgtcaccgttttcgagacgttttttcattaaatccacactgacgagggtaaaatcctttccgctctcacgcagggtgatatgggaagcgagagagcaggcacccggtttgtagaacaatttcatcggtaactccttttgtctgtggtttaaagtatggtagtgcgttgcaatcgcgcggaaacgctcggtgtcttcaacgtggatttgtgctttatgagtaacatccagaccggccatcaccaccgggatccctgactggaagacaatttctgccgcttccgggtcaacgtaaatattaaattcagccgcaggcgtccagttacccagccccatagcgccacccataatcacgatacgggcaattttgctatgcagttccggatggctattgagcagcaaggcaacgttagtttgcggtccggtagacacaatggtgacaggttccgcactttcacgcagcgttttcgccatcagctctaccgccgtacagttttgcggtgcgaatgtcggttccggtaatgccgggccgtcgagaccgctttcgccgtgcacattgtccgcgataatcaactcacgcattaacggttttaccgcgccgcctgctaccggaatatcggtgcgattaagcaaggtcagcatacgcagaacattgcgtaaggttttttctggtgtctggtttccggcggaagacgtaattgctttgacatcaagctctggtgaggcgagggcgagaactattgcgatagcgtcgtcatgacccttctcataaagatacccgattcccactttacggcaagcagcttgcatgcctgcagtgatcgtcaccgcgtatttgattcgcccctgacgctggagtaatggcacactggagaacggtacgctgtagctattgacgctgccgtccgcttctttgatttcaactaacaaatcaccgctcgacgacgtggaatagagatcactaatttcaaaagcaccaggcgatacataagtttggtaaatggtgtaaccattttgcttaatcgttatctgggcattgcttttggcgataccacgcaccacaggcgcaaaccctttcaggctgtctggcagcatgttgtcatctgacgccagctgcacaccacgaaagctgacactatcgaaaaaatcgcctgcagtataatcatcacctacggtcagttcgcctttcagaggcataaccgcccgttgcaaatagctgctgagattcttccattctgcggtttggccactactacgactccatgttgaattgttgcgcaatctccatgggcctaaattaacgccactgtttaaattcagaaaatagctgtcgccagaatcactgtctgcgctgctatgaatactgttagccccgctaaacgaatatcccagtaatagcgcgttgatcccttcatcccaacgttcagggggtacataaccacgggcattacttttgatggcgatttgcggtacagctcgttgctgccagatgatccaaccgagagtcatatcccatgccatgtattcgttatcgccgttttttgctctccgacgatctactaagtcaccgaaacgcttttccatgaataattcataggcttcgcgttcatctggctctacttccagagatacgagtgcgatttcataagcacggcgctcaatatcgtctcgaacctctaggctgctgattcgttctttgatttctttaatcagttctttattggtaaatgtggtcattatgctccagcctccggtgcttttggcattatccgataaatcgttaaaacgttccataaacatcccgtaggcatgacccggtgccagtggaatcacgttgaacatctctgttgccgggatgccttccagtacaggccagaaagagccatcatcaagcccgagatcacggcgttcggttgccagcataatgagatcggcatatttcactggcgtgctcataacaggaggtaacccgtatttctcacggattactgcatctattttttcttccatccgtttatagtcaggaagaaggcgtttcagtggttcgtggatgtcctggcaatacgcttctgttgcatcatgcattaatgccgcaattttattgacagttttcggatccagcaaacgctccgtacgggaacgaccgccttccacgaagtactcgacggaataaccacggctgaacagttcgccgagatactcccggaaaacggtggaataaagtttattgcctttaaacgtacggcgaataaagaacgcccccagacggcggaaaaatcgcccggcaggccagaaattcaggttgatcccggcggcgatatgcggcggcaccagccccccggtgggatcgcgataatccacagcgtgaatcttctgttgcagcaaaccgagcgccacggcgaaaccgtgaatggtggcggccggtgttggcgggcagccggggatccaaacatcaatggggacaatggtgtcgctaccgccccagacgctgtagagatcgtggaaaataccgccgccgacaccgcacgcgccgtaggaaacacaaattttatgatcgggggcagactcatacgcccgaagtgcaggcatacgcatcgcccgggtgactgcgccagtaaataacaaaatatcggcgtgacgcggtgatgaaacaaccttaatgccaaaacgttctgcgtcgaatactggtgtaatggcagcaaaaatttcgatttcacaggcgttgcagccgccgcaatcgacgcgataaacgtaagccgagcgacggatatcctgtagcaaatgccgcttcat

SEQ ID NO: 28824 - DNA, 1457 bp, Homo sapiens
  SIMILAR (633)..(1109): 991254mologous to Escherichia coli K12 putative RNA polymerase beta,accession number AE000324,Smith-Waterman Score=814.
gctgaactgccaccagcaaatgaaagtgttctgttatttgatgctaacggagaaggctggctgattggctggcgttctctctggtacacctggggacaaaaagaaaccggagaatggcagtggacatttcaggttggggaccttgaaaacgtcaatatcactcactgggcagtaatgccaaaagcaccggaggctggagcataatgaccacatttaccaataaagacctgattaaagaaatcaaagaacgaatcagcagcctagaggttcgagatgatattgagcgccgtgcttatgaaatcgcactcgtatctctggaagtagagccagatgaacgcgaagcctatgaattattcatggaaaagcgtttcggtgacttagtagatcgtcggagagcaaaaaacggcgataacgaatacatggcatgggatatgactctcggttggatcatctggcagcaacgagctgagcgtatttttattagtattacactgcgaaagacaccgcgctggcgcatgactggtcagaacgtcttgcggagcttaaaggtgctgcctttggtaatcccccgtacccgtggtaacccccagaccggcacgcctgccaccgatctggatgatgactactttgacatgttgcaggaggagctttgcagcgttgtggaggcctccggtgccagcctggagaaggggcggcatgaccagctgcttaccgcgcttcgtgcgctgctgttaagccgcaagaatccgtttggcgatatcaaattggacggcacggtgcaaaaggctctcgaaaaccttggtttgggagaagcggctaaaagaaatgtagggacaggggcgaatcagatacctgatatgggtagttttatgctttctgcttcagttcctggatatcaaaaattgccatccggtttaattattcaatgggggccaattgatgttccgctgacgtctcaggacacagtaacctattttccgattgcatttccgaatagatgtccgcgggtatttgcgactcaggattacactcccggcagtgcaaatgttggctatatagcttgtgccggttataaccaggacccggtgaaatttatttccagagcaggcgggtaccgagctagagtcgatcgaaagttcaaagaaggaagatacctgccgcggcattatacgctgcgtgctggcagagttgcgcaacaaagtggggatggtgatggccgtactgggatgcagggtcaggttcaggacgatatttaccagctttggttgcaaagccagcgccgattactgccgatgctcattcatcgtgatgaagcgatggctgaatgcctggcggctaagcaaccagtaggtgaatatcgcagtgatgcgctggcggctgaagagatactgacgctggcgaactggtgcctgttgaactactccgggctgaaaacgccagtcgggagtgcatcatga

SEQ ID NO: 28825 - DNA, 439 bp, Homo sapiens
  SIMILAR (79)..(438): 1001254mologous to Escherichia coli D-SERINE DEAMINASE ACTIVATOR,accession number D90866,Smith-Waterman Score=638.
atgcatacttttgaagtggctgccaggcatcagtccttcgccctgccggcagaggaattgtcgctgagccccagtgcggaaattcttgatatcaaaaatcaggagttatcgggaacgttaactctgtattcccggccctctatcgcccaatgctggttggtgcccgcattaggtgactttacacgccggtatccgtctatttcgctcaccgtgctcactggtaatgacaacgtcaatctgcaacgtgccggaatcgatttggcgatctactttgatgatgcgccgtcagcgcaactcactcatcactttctgatggatgaagaaatcctgccagtatgtagcccggaatacgctcaaagacatgctttaaccaacacggtaattaacctgtgtcactgtacgttgctccatgacagacaggcatggagcaacgactccg

SEQ ID NO: 28826 - DNA, 2808 bp, Homo sapiens
  SIMILAR (2119)..(2805): 971254mologous to Escherichia coli transketolase,accession number D12473,Smith-Waterman Score=1153.
atggggaagcgaaatgttggacggatacttgtcgcaacccagttcgtggaacaatcactcgacgttgattttgattggttaattactcagcattgtcctgcagatttgcttttccaacgattgggccgtttacatcgccatcatcgcaaatatcgtcccgctggttttgagattcctgttgccaccattttgctgcctgatggcgagggttacggacgacatgagcatatttatagcaacgttagagtcatgtggcggacgcagcaacatattgaggagcttaatggagcatccttatttttccctgatgcttaccggcaatggctggatagcatttacgatgatgcggaaatggatgagccagaatgggtcggcaatggcatggataaatttgaaagcgccgagtgtgaaaaaaggttcaaggctcgcaaggtcctgcagtgggctgaagaatatagcttgcaggataacgatgaaaccattcttgcggtaacgagggatggggaaatgagcctgccattattgccttatgtacaaacgtcttcaggtaaacaactgctcgatggccaggtctacgaggacctaagtcatgaacagcagtcatcatccatccgcctccttcgctaccgtccgttcattaccaaaccccatcagtatggaccaatcattcaaggatgtagcagcgttgatcgatcccgaaagcagcgttaccagcaagtaaacgcccagagcggagagaaccgccagcagtgtcgctttgccaacatcacgtttattacgcgcacgcgcagaaacaaccacggcaccttccacaccaatgaaaacccacagggtgatcagcatggtgtttttcacctgttcccaaacgggtacgccaagtgcaagtccggtgaagtcgagcttgaaggtatccagtttgaacatcatcatcgccagcacaacaaacagacccagcggcaacaattttgccagtgtcgccaccaggtgacggtacacgccggtatccggtctatttcgctcaccgtgctcactggtaatgacaacgtcaatctgctacgtgccggaatcgatttggcgatctactttgatgatgcgccgtcagcgcaactcactcatcactttctgatggatgaagaaatcctgccagtatgtagcccggaatacgctcaaagacatgctttaaccgacacggtaattaacctgtgtcactgtacgttgctccatgacagacaggcatggagcaacgactccggtacggatgaatggcatagttgggcgcaacattatgcggttaatttgccgacatcttctggaattggctttgatcgttctgatttagctgttattgccgcgatgaatcatattggggtggcgatgggaagaaaacgcctggtacaaaaaaggcttgccagtggcgtctatccgccccgatgcgcttatccccgcacacatctgctggaaacatccacaacatctggggtgaacggggtaggcacgtatagcgcgccgttctggcggatgttgcttaacagctttgtgatggcgttcagcattacgctcggcaaaattaccgtctcgatgctctcggcatttgccattgtctggtttcgttttccgctacgtaacctcttcttctggatgatttttatcaccctgatgctgccggttgaagtacgtatcttcccgacggtggaagtcatcgccaacctgcagatgctcgacagctacgccggtttaacgctgccgctgatggcctcggcgaccgctactttcctgttccgccagttctttatgacgctgccggatgagctggtggaagccgcgcggatcgacggcgcatcgccaatgcgcttcttttgcgacatcgtttttccgctctccaaaactaatctggcggcgctgtttgtgatcacctttatctacggctggaatcagtatttgtggccgttgttgattattaccgatgtggatctcggcaccaccgtggcagggatcaaagggatgatcgctacaggcgaaggcaccacggaatggaactcagtgatggtggcgatgttgttaacgcttatccctccggtggtgattgttttagtgatgcagcgtgccttcgtgcgcggcctggtcgataatccagcggcaaactacattcactacggggtgcgtgaatctggcatgaccgctatcgccaacggcatcgcgcaccacggcggctttgtgccgtataccgcgacgttcctgatgtttgttgaatacgcccgtaacgccgcgcggatggcggcactgatgaaagcgcggcagattatggtttatacccacgactcaattggcctgggcgaagatggtccgacgcaccaggctgttgagcaactggccagcctgcgcttaacgccaaatttcagcacctggcgaccgtgcgatcaggtggaagcggcggtgggctggaagctggcggttgagcgccacaacggaccgacggcactgatcctctcaaggcagaatctggcccaggtggaacgtacgccggatcaggttaaagagattgctcgtggcggttatgtgctgaaagacagcggcggtaagccagatattattctgattgccaccggttcagagatggaaattaccctgcaagcggcagagaaattagcaggagaaggtcgcaatgtacgcgtagtttccctgccctcgaccgatattttcgacgcccaggatgaggaatatcgggagtcggtgttgccttctaacgttgcggctcgcgtggcggtggaagcaggtattgccgattactggtacaagtatgttggttga

SEQ ID NO: 28827 - DNA, 2835 bp, Homo sapiens; identical to SEQ ID NO: 21780

SEQ ID NO: 28828 - DNA, 4356 bp, Homo sapiens; identical to SEQ ID NO: 24328
  SIMILAR (3487)..(4158): 961254mologous to Escherichia coli f445,accession number L10328,Smith-Waterman Score=1151.

SEQ ID NO: 28829 - DNA, 2367 bp, Homo sapiens
  SIMILAR (2049)..(1297): 991254mologous to Escherichia coli f445,accession number L10328,Smith-Waterman Score=1329.
ctacactttcagtgccgcatattcatgagatcctgggggctcctgggtggtgtctgaagctgcctcagacagggcgctggtgcttagctcagcataggtcactccttgggggtctgccgtcgagagagataccctttccatattggataaatctgcctcggcagcctcctgctccggaagtttggaatggctggttcgagaaaatccttcactccccctctctccctttgcgttctctgagctcactgtgctggctgcatctgtagatgatgaagactgagaggaagaggagaaggatggagatgcagctgaagatggcgacaaagatggttctggtgtctccattgccttgtcctcttcaggatcactcccagaacctttgctctcagtcaatgtagaccctgggatgactccaggtctcaggacacttcgatgtctcactccatacaatggaaccgaatgtattgtaattgctcgatgcaggatgagcaggaggcagatgaggccaacggcaaaggcccagcacaggtaggtgaccgccaggcgtgggcggggcgggtagaagccatagaagagaggggaccattccaggtaaccctcacccgagagcaagttgaagagctgggtggcaaaggtgaccaggccctgggagtgggggttataggagccgcagggcgaggagatgtcggggccgggagggcctgggggagcgcctcccaaccaggtgggcagcagcgtcatgcaggccatgagcacagaggccagcacgttaagaaggagcaggaagcgcagcagggagaagtaggactccgtgccggcgccaaactggcgagcctgcggcggcagggatgcttcctgggcccctgagagtgcagagattcctggatccagagctgcggctgggcggctgcagctgcgcttgttgaaaacaggttgaggctcttggaaacacgggcttcgaccacgtttgagggtacggcgccaggacccgttaaactctcggggctctaagtgccagcgcttcgccaccgcaaccggcccccttccgcggcgccagcgcgcagggccccggtgcgccgcccagccggcaaccgtgcaatccacaagcagtgcctgctgctcccaccgcactcgcaccaacaccaccacccgggccagggccacgactcgccgctcgcgggcgtctaagaccaagaaccggtcgagcctgcacaacaagggcttgtataacggttccctgcctgaacctggtgccatggccaccatgctgctgctgtaagtcactctagaggatcccactttccagtctttggctgttaacggctgacgcgcctctttcttcaccggcgcatcaccatccaccagaccgccgccatcacgaatgtaatccagttcagctttgctgatacctttggtcaggcgcggcggctgataaaccttaaaccaaatcagcgaccagataatgccgataccaccagtgacaatgaacacccagtgccagctcaacatctcctgaatccagatcagcagcggcgtcagaaacgccagaccgacaaactgaccagacgtataaaaaccaacggcagaagcgcgttcatgttccgggaaccagctggtcaccatccggttattggtcgggaaagcaggcgcttcgaaaataccggttatcgcgcgcagaccaattaatgacattaagcccgtggcaaagccctggaataaagtcgccactgaccagccaaatatcgcaataaaataagtcacgcgagaacctacgcgatctaaaaaccaaccgccggggatctgacatagcgtataaagccaggcgaaggccgaaaatacatagcccatttccgctttggtaatgccgaactcttcctgaatatgggcggaagccacggccaggttggcgcggtcgacataacaaatgactaccgtaataaagatcatcaccagcgtcagataacgccgacgccccggctttgctgcattaacgggaatatccatagcgagctttctccagattttgggcatagcgaagccgctcaccatgccgctgttatcttcatgacgccagagcggattacgccagtccggggcatttttactgaactcaatcactttagcttcgtcgatttccacgcctaagcccggtttcgttaacggtttaaagaagccgccgaccatgctgaagtcttctttgtttttcacaaagtcgagtaactccgcgcctttgttgtaatgaattcccatactttgttcctgaagtacggcgttataggaaacaaagtcgatatgcaggcaagccgccagtgcaatcggtccgagcggacagtgcggcgcaagggtcacgtcataggcttctgccat

SEQ ID NO: 28830 - DNA, 1185 bp, Homo sapiens
  SIMILAR (256)..(948): 961254mologous to Escherichia coli D-SERINE DEAMINASE ACTIVATOR,accession number D90866,Smith-Waterman Score=1196.
atgacacaggatgaagttgctgtgacggaatgggactgttcacatgtgccatcgtacgaattcgcccaagttgaaaccatcaacgttgacagcaaaaccaacggacatggaacgaccattgccgtagacaactccccaaataaacggaacgcaacaagcctttcggcgcgcttattggcgcagtcgctggcggtgtttatcggccacaacgtcgggtctggcagcaattccgggaacgacggcaggtgcagttggcggcggagctggtacacgctaatatcgtcgctggataccctgaaccaggaaattcttgatatcaaaaatcaggagttatcgggaacgttagctctgtattcccggccctctatcgcccaatgctggttggtgcccgcattaggtgactttacacgccggtatccgtctatttcgctcaccgtgctcactggtaatgacaacgtcaatctgcaacgtgccggaatcgatttggcgatctactttgatgatgcgccgtcagcgcaactcactcatcactttctgatggatgaagaaatcctgccagtatgtagcccggaatacgctcaaagacatgctttaaccaacacggtaattaacctgtgtcactgtacgttgctccatgacagacaggcatggagcaacgactccggtacggatgaatggcatagttgggcgcaacattatgcggttaatttgccgacatcttctggaattggctttgatcgttctgatttagctgttattgccgcgatgaatcatattggggtggcgatgggaagaaaacgcctggtacaaaaaaggcttgccagtggtgagctcgtcgcgccgtttggcgatatgacggtgaaatgccatcagcattattacatcaccacattaccgggcaggcagtggccaaaaattgaagcgtttattatctggctaagagaacaggctagttatcttcgttctctcctcgtccgtgacatgaatcacccagtgccagctcaacatctcctgaatccagatcagcagcggcgtcagaaacgccagaccgacaaactgaccagacgtataaaaaccaacggcagaagcgcgttcatgttccgggaaccagctggtcaccatccggttattggtcgggaaagcaggcgcttcgaaaataccggttatcgcgcgcagaccaattaa

SEQ ID NO: 28831 - DNA, 769 bp, Homo sapiens
  SIMILAR (1)..(534): 891254mologous to Escherichia coli 1-aminocyclopropane-1- carboxylate deaminase (EC 4.1.99.4) (ACC deaminase),accession number D90832,Smith-Waterman Score=788.
cgcccttatgtccttccgggtggcgggttctaatgctctgggcgccgttaggttatgtggaaagtgccctggaaatcggcccaacagtgtgaaggggcggttaatatttcatcggtggtagtcgcatcgggcagtgccggaactcacgccggactggctgttgggctggaacacctgatgcctgaaagcgaactgattggcgtgaccgtgtcgcgttccgttgccgatcaattgccgaaagtggttaacctacaacaggcgattgcgaaagaactggagctgaccgcatcagcggaaattttactctgggatgactattttgcacctggctacggcgtgccgaacgacgaaggcatggaagcagtgaaattgctggcgcggctggaaggcattctgcttgatcctgtgtataccggaaaagcgatggcggggctgattgacggtatcagtcagaaacgcttcaaagatgaagggccgattctgtttattcataccggcggtgcgcctgcgctgttcgcctatcatccccacgtttagctccggaaacgctcatgcaagaaagtatacaactggttattgattccttgccgttcctgctgaaaggggctgggtatacgctgcaactcagtatcggcggcatgttttttggcttactgctcgggtttattctcgcgctgatgcgtctgtcgccaatctggcccgtgcgctggctggcgcgtttttatatctctatttttcgtggtacaccgctcatcgcacaactgtatat

SEQ ID NO: 28832 - DNA, 1953 bp, Homo sapiens
  SIMILAR (91)..(900): 951254mologous to Escherichia coli K12 glucose-inhibited division; chromosome replication?,accession number AE000451,Smith- Waterman Score=1299.
atgttcaacgatttgttttatctcgtcaccgggatattgcggccactcatcgcggaattaaaaacggatctttgcgcaaggttttactgggagagcaagtttatccaggggctgttctttgctggtcagattaacggcactaccggttacgaagaagccgctgcgcaaggtttgctggccggtcttaacgctgcccgtctgtctgctgacaaagaaggttgggctccggcacgttctcaggcgtatctcggcgtactagttgatgacctgtgcactttaggaaccaaagaaccgtatcgtatgtttacttcgcgcgcagaatatcgtctgatgctacgcgaagataatgcggatctgcgtttgactgaaatcggtcgtgaactgggcctggtggatgacgaacgttgggcgcgctttaacgagaaacttgagaatatcgagcgtgagcgtcagcgtctgaaatcgacctgggtaaccccgtcggcggaagctgcagccgaagtgaatgctcacctgactgcgccgctttcccgtgaagccagtggtgaagatctgctgcgtcgtccggaaatgacttatgaaaaattaaccacgctgacgccgtttgcccctgcgttgacagacgaacaggcggcggaacaggttgagattcaggttaaatacgaaggttatatcgcgcgccagcaagatgagatcgaaaagcagctgcgtaacgagaacaccctgctacccgcgacactggattaccgccaggtatccggtctttctaacgaagtgatcgccaaacttaacgatcacaaaccagcctctatcggccaagttcgcgtatttctggcgtcacctgcggccatctccattctgctggtgtggctgaaaaaacggggcaacgcatcaagaacagtggaaattttcatcaaacgggatgacgtcacccccatggcaatgggcggcaataaattacgtaagctggaatttctcgcggcagatgctctgcgtgaaggtgccgatacgctgattactgccggggcgatccagtctaaccatgtgcggcagactgccgcagtcgctgccaaactcggtctgcactgcgtggcgctgctggaaaatcctattggcacaaccgcagaaaactatttaaccaacggcaatcgcttgttgctggatctgttcaatacccagattgaaatgtgcgacgcactgaccgatcccaatgcccaactggaagagctggcgacgcgagtcgaagcacaaggctttcgcccgtatgtcattccggttggcggttctaatgctcttggcgcgctaggttatgtggagagtgcgctggaaatcgcgcaacagtgtgaaggggcggttaatatttcatcggtgcttcgggatggcgatttgcggtcgtatgctggaacgcagggctttcgcgtcgggatcatcgcccagccggactggagcagcaaagacgactttatgcgtctgggtaaaccgaatctgtttttcggtgttactgctggcaacatggattcgatgatcaaccgttataccgccgatcgccgtttacgtcatgacgatgcctacacgccggataacgtcgcgggtaagcgcccggatcgcgccacactggtttatacccagcgttgtaaagaggcgtggaaagatgtaccggtgatcctcggcggtattgaggctagtctgcgccgtaccgcgcattatgattactggtccgataccgtgcgccgttccgtgctggtggattcgaaagccgacatgctgatgtttggtaacggtgagcgtccgctggtggaagtggcgcatcgtctggcgatgggcgagccaattagtgaaatccgcgatgtgcgtaataccgcgattatcgtgaaagaggcgctgcctggctggaacggcgtggattccaccgtcttgataccctggaaaaatcgacccatcccgcatccgtat

SEQ ID NO: 28833 - DNA, 1426 bp, Homo sapiens
  SIMILAR (673)..(1302): 981254mologous to Escherichia coli Octopine transport system permease protein OccM,accession number D90832,Smith-Waterman Score= 1028.
atgaaactgatggccattcaggaacaggcgcgcggcgaacaatgcttccgtgattccgagtgggatttgcagttccacattcaggtcgctctggcgacgcagaactccgccctggcggctatcgtggaaaaaatgtggacccagcgtagtcataacccgtactggaaaaaactgcacgaacacattgattcccgtaccgtcgataactggtgtgatgaccacgatcaaatcctcaaggcgctgattcgcaaagatcctcatgctgctaagctggcaatgtggcagcatctggaaaacaccaagatcatgttatttaacgaaaccagcgacgacttcgagttcaatgccgaccgctatctattcgccgaaaacccggtggcgattgcgaaagaactggagctgaccgcatcagcggaaattttactctgggatgactattttgcacctggctacggcgtgccgaacgacgaaggcatggaagcagtgaaattgctgccgcggctggaaggcattctgcttgatcctgtgtataccggaaaagcgatgcgggggctgattgacggtatcagtcagaaacgcttcaaagatgaagggccgattctgtttattcatacccggcggtgcgcctgcgctgttcgcctatcatccccacgtttagctccggaaacgctcatgcaagaaagtatacaactggttattgattccttgccgttcctgctgaaaggggctgggtatacgctgcaactcagtatcggcggcatgttttttggcttactgctcgggtttattctcgcgctgatgcgtctgtcgccaatctggcccgtgcgctggctggcgcgtttttatatctctatttttcgtggtacgccgctcatcgcacaactgtttatgatctattacggcctgccgcagtttggtatcgaattagatcccattccgtcagcaatgattggtctgtcgttgaacactgccgcctatgctgccgaaacgctgcgcgccgccatttcttctattgataaaggtcagtgggaagcggcagccagtattggtatgacgccgtggcagaccatgcgtcgcgcgattttgccacaggcggcgcgtgtggcgttgccgccgctgtcgaacagctttattagcctggtaaaagatacgtcgctggccgcgacaatccaggtgccggagctgttccgtcaggcgcagttgattacctcgcgtacgctggaggtgttcaccatgtatctggcggcttcgctcatctactggatcatggcgactgtgttatcgacgttgcatctgacaaatggcagcgcattagctgggaagaagcattctccccaacgaaaccgggatgctgacccagaaatttgcccgctccctcgggatgctggcggtagacaaccaggcgcgcgtctgacacggaccaacg

SEQ ID NO: 28834 - DNA, 2786 bp, Homo sapiens
  SIMILAR (1260)..(2036): 931254mologous to Escherichia coli B12-dependent homocysteine -N5-methyltetrahydrofolate transmethylase,accession number U00006,Smith-Waterman Score=1237.
aaccagaccggtggctacaacgacgaaatcgaaggcaagctgaaaggcatcctcgattccttcaaagcaacccaatcctggtaacgtctggcggcttgccttagggcaggccgcaaggcattgaggagaagctcatggccggcgcaaaagagatacgtagtaagatcgcaagcgtccagaacacgcaaaagatcactaaagcgatgtagatggtcgccgcttccaaaatgcgtaaatcgcaggatcgcatggcggccagccgtccttatgcagaaaccatgcgcaaagtgattggtcaccttgcacacggtaatctggaatataagcacccttacctggaagaccgcgacgttaaacgcgtgggctacctggtggtgtcgaccgaccgtggtttgtgcggtggtttgaacattaacctgttcaaaaaactgctggcggaaatgaagacctggaccgacaaaggcgttcaatgcgacctcgcaatgatcggctcgaaaggcgtgtcgttcttcaactccgtgggcggcaatgttgttgcccaggtcaccggcatgggggataacccttccctgtccgaactgatcggtccggtaaaagtgatgttgcaggcctacgacgaaggccgtctggacaagctttacattgtcagcaacaaatttattaacaccatgtctcaggttccgaccatcagccagctgctgccgttaccggcatcagatgatgatgatctgaaacataaatcctgggattacctgtacgaacccgatccgaaggcgttgctggagcagtgcagctgcatgcttaggtcaccggcatgggggataaccagtacagatacaactcgagctcgtaccgacttggcatgtcccatctggcttcttttagatccctaccccaagcttatgggtaatgcgccaaaagcgctggcgtctgtcgataaacgtggtgtaccagtaaataccattctggtgtctgcactggtaacggcgttgtgcgtactgattaactaccttgccccagagtccgctttcggactgttaatggcgctggtggtatctgcactggtaatcaactgggcgatgattagcctggcgcatatgaaattccgtcgcgccaagcaggaacaaggcgtggtaactcgcttccctgctctgctttatccgctgggtaactggatctgcctgctgtttatggcggcggtactggtgattatgctgatgaccccaggaatggcgatttcggtatacctgatcccgcccttacaaaccaacaccttcaactccacgaccattgcgatggcggattaccagatggaatccctgtcggcggaaatcaactttgcggcggcgaaactggcgcgagcttgtgctgacgagtggaccgcgcgcacgccagagaaaccgcgctacgttgccggtgttctcggcccgaccaaccgcacggcgtctatttctccggacgtcaacgatccggcatttcgtaatatcacttttgacgggctggtggcggcttatcgagagtccaccaaagcgctggtggaaggtggcgcggatctgatcctgattgaaaccgttttcgacacccttaacgccaaagcggcggtatttgcggtgaaaacggagtttgaagcgctgggcgttgagctgccgattatgatctccggcaccatcaccgacgcctccgggcgcacgctctccgggcagaccaccgaagcattttacaactcattgcgccacgccgaagctctgacctttggcctgaactgtgcgctggggcccgatgaactgcgccagtacgtgcaggagctgtcacggattgcggaatgctacgtcaccgcgcacccgaacgccgggctacccaacgcctttggtgagtacgatctcgacgccgacacgatggcaaaacagatacgtgaatgggcgcaagcgggttttctcaatatcgtccgcggctgctgtggcaccacgccacaacatattgcggagatgagtcctggccgtaaaaggttaacgcgcgcagaatcgagctcggtaccctcgacgctgccgggtaaagcctggctggaacatgcactgccgctaattgctgaacagttgcaggtcgccgctcagcggtgtttattccctttcgctggcgtaacgcagacctgggatgattacacagcgaaaacggctgcggttctcgctccgctgggtgtttctgtcaccggtattcatagcgttgtcgatcccgttgccgcgattgaaaatgctgagatcgtgattgtcggcggggggaatactttccagttggctgaaacagtggccgcgaagcgcgggctggtggcaccaattactggacgtgggcggcaggggctaaacttggttggccaaatattcgtaccaacaacgatatgccgattgtcgatccgcaagggtttcgatggcgctaaatctgttcccgctggcaaatcaacccggcacttcaccaacgcgctggcggaagggcataaaggtgaaacccgtgagcagcggtattcgcgaactggtggtcgtcgcgcccgaactgacgattattggtctaccggaaggttactggatcacggaaaaacattaaccgtaaaaggtaattatgtctataatggtcatttacgcaccgtattagtgatgaaatcggacggagatagtagtatacttcgggttcctagctatgtgaaaaatgctggaggaagcggcgcggccacgctaaacgggatcgaactcataactgtgaatggcgatgaatctccagcagatgccttcagatga

SEQ ID NO: 28835 - DNA, 1709 bp, Homo sapiens
  SIMILAR (915)..(1355): 871254mologous to Escherichia coli K12 putative flagellin structural protein,accession number AE000144,Smith-Waterman Score= 654.
atgaatggcacatttgttaccttgtgcgcattgccggatgcgatgctggcgcatcttatccggcctacgggtgccgataccatttccagcgccagcgttgccgctgccagagctagtgatttccgactgatcgtatgccggagccacttccactacgtccatacccaacaatgttagagatctttcaggccgcgtaccactttaatagcgcgatcggaggtcaggccgccaatcactggcgtaccggtgcctggtgcaaaagcaggatccagtcagtcgatatcgaaagtcaggtcaaccggcatatcacccacaatctgtatcacttgggcgataacgtcatccacgctgcgatccctacggcttctgcccgtttaccgctgacgctgatgacgcttgatgactgggcgcttgccaccattactggcgcggacagcgaaaaatatatgcagggtcaggtgacagcagatgtcagccagatggcagaagatcagcacctgctcgccgcccattgcgacgccaaaggtaaaatgtggagcaatttacgtctgttccgcgacggcgatggctttgcatggattgaacggcgcagcgtgcgtgaaccgcagctgactgaactgaaaaaatatgcggtattctctaaagtgaccatcgcgccagacgacgagcgtgtgctgcttggtgttgccggttttcaggcgcgcgccgcgctggcaaatctctttagcgaactgccttcgaaagaaaaacaggtagtcaaagaaggcgcgaccactttgctatggtttgaacacccggcagaacgtttcctgatcgtaaccgatgaagctactgctaatatgctgaccgataaatctgcgcgatcagattacaacctgtacgccaatactatcaccgtaactaacggcggtgtattggatgtgaacgttgatcagttcgatactgaagctttccgtactgacaaactggaactgaccagcggcaacatcgctgaccataacggtaacgtagtatctggtgtgttcgatatccatagcagcgattacgttctgaacgctgatctggtgaacgaccgtacctgggatacttccaagtctaactacggttacggtattgttgctatgaactctgatggtcacctgactatcaacggtaacggcgacgtagacaacggtactgaactggataacagctctgtagacaatgttgttgctgcaaccggtaactacaaagttcgtatcgacgacgcaactggcgctggcgctatcgctgattaccaagatccagaaattatctacggtaaaacggacgctcccaccaggcaaacgccgaacttctctggtgctacacagtcacccccaccggcttgccagaagataacggcaatcaatgcccaaacgaaggccgagagaaaaaacccgatcactgaaccggagtttgcctctgatattgtcgatcgttatgccgatcatattttttacggcagcggtgccacggggatggctctggttgttatcgacggtaaccagcgcgtctttcgcagttatggcgaaacgcgacctggttatgacccgcgagatgctggtgaaattgtcccccccgggggccccgaagttttaactggccgcaacatcatcgcccgaccacctttatgcccgttgatttcaccctcgaagcccatgaagacggtgcacagacggtgtgggtag

SEQ ID NO: 28836 - DNA, 2800 bp, Homo sapiens
  SIMILAR (1001)..(1861): 991254mologous to Escherichia coli 1-aminocyclopropane-1- carboxylate deaminase (EC 4.1.99.4) (ACC deaminase),accession number D90832,Smith-Waterman Score=1432.
atggcagaagatcagcacctgctcgccgcccattgcgacgccaaaggtaaaatgtggagcaatttacgtctgttccgcgacggcgatggctttgcatggattgaacggcgcagcgtgcgtgaaccgcagctgactgaactgaaaaaatatgcggtattctctaaagtgaccatcgcgccagacgacgagcgtgtgctgcttggtgttgccggttttcaggcgcgcgccgcgctggcaaatctctttagcgaactgccttcgaaagaaaaacaggtagtcaaagaaggcgcgaccactttgctatggtttgaacacccggcagaacgtttcctgatcgtaaccgatgaagctactgctaatatgctgaccgataaactgcgcggtgaagcggaactgtgggcaactggtatgagtgctggacccttcgctattgcaaggcgaagtggtatcagacggtccgttaagcccggccgaaatgaccatggaagtggcgcagctgctgcgcgatgctggcccgtgggggcagatgttcccggagccgctgtttgacggtcatttccgtctgctgcaacagcggctggtgggcgaacgtcatttgaaggtgatggtcgaaccggtcggcggcggtccactgctggatggtattgcttttaatgtcgataccgccctctggccggataacggcgtgcgcgaagtgcaactggcttataagctcgatatcaacgagacctcacggaacgctccgacgttcttagggggtatctttgactacgacgccaagaaagagcgtctggaagaagtaaacgccgagctggaacagccggatgtctggaacgaacccgaacgcgcacaggcgctgggtaaagagcgttcctccctcgaagccgttgtcgacaccctcgaccaaatgaaacaggggctggaagatgtctttagagcttcctcgttgtggtttggcgccctggttttggtgaagaaaccaacgatacgctgcaggacgggacgggaaattttcatcaaacgggatgacgtcacccccatggcaatgggcggcaataaattacgtaagctggaatttctcgcggcagatgctctgcgtgaaggtgccgatacgctgattactgccggggcgatccagtctaaccatgtgcggcagactgccgcagtcgctgccaaactcggtctgcactgcgtggcgctgctggaaaatcctattggcacaaccgcagaaaactatttaaccaacggcaatcgcttgttgctggatctgttcaatacccagatagaaatgtgcgacgcactgaccgatcccaatgcccaactggaagagctggcgacgcgagtcgaagcacaaggctttcgcccgtatgtcattccggttggcggttctaatgctcttggcgcgctaggttatgtggagagtgcgctggaaatcgcgcaacagtgtgaaggggcggttaatatttcatcggtggtagtcgcatcgggcagtgccggaactcacgccggactggctgttgggctggaacacctgatgcctgaaagcgaactgattggcgtgaccgtgtcgcgttccgttgccgatcaattgccgaaagtggttaacctacaacaggcgattgcgaaagaactggagctgaccgcatcagcggaaattttactctgggatgactattttgcacctggctacggcgtgccgaacgacgaaggcatggaagcagtgaaattgctggcgcggctggaaggcattctgcttgatcctgtgtataccggaaaagcgatggcggggctgattgacggtatcagtcagaaacgcttcaaagatgaagggccgattctgtttattcataccggcgctccggaaacgctcatgcaagaaagtatacaactggttattgattccttgccgttcctgctgaaaggggctgggtatacgctgcaactcagtatcggcggcatgttttttggcttactgctcgggtttattctcgcgctgatgcgtctgtcgccaatctggcccgtgcgctggctggcgcgtttttatatctctatttttcgtggtacgccgctcatcgcacaactgtttatgatctattacggcctgccgcagtttggtatcgaattagtcccattccgtcagcaaaagtgtgctgcgccagaccgacaaaaaacgccaccagcaggaagatttcaccccataccacaggggatttccattacggtgtacaaactgcgcttccgtgggattctgttcgcagcagaacgtggttacctggcggatgttgaactgtcgaaaattggcagcttcgaagccgctctgctggcttacgtcgaccgtgatcacgctccgttgatgcaagagatcaaccagaccggtggctacaacgacgaaatcgaaggcaagctgaaaggcatcctcgattccttcaaagcaacccaatcctggccgcaaggcattgaggagaagctcatggccggcgcaaaagagatacgtagtaagatcgcaagcgtccagaacacgcaaaagatcactaaagcgatggagatggtcgccgcttccaaaatgcgtaaatcgcaggatcgcatggcggccagccgtccttatgcagaaaccatgcgcaaagtgattggtcaccttgcacacgtgatgcggccgcggggaaaagggggtttaattgtgcaaagtactaaaatgggaaacaccgagaatgacgcggaagagccggagaagaagaagaggaaagttgaagagatattaccgctacgccaccgaagcctgttggctggggcccgaagctga

SEQ ID NO: 28837 - DNA, 423 bp, Homo sapiens
  SIMILAR (412)..(146): 1001254mologous to Escherichia coli K12 putative enzyme,accession number AE000490,Smith-Waterman Score=440.
cgtttatccggcatacatgatctctgcaatatattgaatttgcgtgattatgtaggccggataaggcgttcacgccgcatccggcatgaacaaagcgcattttgtcagcaatctaaccctcttcttttaaagagggtattgatcactctgccacttttttcttcgccgcacgcttcgctttggtcgctgcagctattttctgcgttttcgccgatggctttttcgcttttctcgcgtctttcttcgccgctttcggcttcgtttttttctcaccgcggaaggcgctgtctggctcaaagtttacctttttaccgacctgacgacgcttgccgccttttttacctgcatcgccttttttcgctttctcgcgcgccgttttaccgacgttgcgcggtgcgcgttcgctggagatcctctagagcg

SEQ ID NO: 28838 - DNA, 1431 bp, Homo sapiens; identical to SEQ ID NO: 17859
  SIMILAR (1)..(522): 961254mologous to Escherichia coli K12 transport of D- alanine, D-serine, and glycine,accession number AE000492,Smith- Waterman Score=865.

SEQ ID NO: 28839 - DNA, 1172 bp, Homo sapiens
  SIMILAR (1)..(561): 991254mologous to Escherichia coli deaD,accession number M63288,Smith-Waterman Score=943.
atgacggatttctctaaacacatgcgcggcgtaaatgtggttgctctgtacggcggccagcgttatgacgtgcaattacgcgccctgcgtcaggggccgcagatcgttgtcggtactccgggccgtctgctggaccacctgaaacgtggcactctggacctctctaaactgagcggtctggttctggatgaagctgacgaaatgctgcgcatgggcttcatcgaagacgttgaaaccattatggcgcagatcccggaaggtcatcagaccgctctgttctctgcaaccatgccggaagcgattcgtcgcattacccgccgctttatgaaagagccgcaggaagtgcgcattcagtccagcgtgactacccgtcctgacatcagccagagctactggactgtctggggtatgcgcaaaaacgaagcactggtacgtttcctggaagcggaagattttgatgcggcgattatcttcgttcgtaccaaaaacgcgactctggaagtggctgaagctcttgagcgtaacggctacaacagcgccgcgctgaacggtgacataaacaacgagtacattaatgagcgaaatgatttacggcatccacgcagtgcaggccctgctggagcgcgcccctgaacgttttcaggaagtctttattttaaaaggccgtgaagataaacgtctgttaccgctgattcacgcccttgagtctcagggcgtggttatccagttggcaaaccgccaatatctcgacgagaaaagcgacggtgccgtgcatcagggcattatcgcccgcgtgaagccaggacgtcagtatcaggaaaacgatctgccggatctgatcgcttcgctcgatcaaccgttcctgctgatcctcgacggcgtaaccgatccgcacaacctcggcgcgtgcctgcgtatgcggacgccgcagcttcatgcggtgattgtgccgaaagatcgctccgcacagctcaacgctacggcgaaaaaagtagcctgcggcgcggcagaaagcgttccgctgattcgggtgactaaccttgcgcgcaccatgcgtatgttgcaggaagagaatatctggatcgtcggtacggcaggcgaggcggatcatacactctatcagagcaaaatgaccggatcgctggcgctggtgatggggtcggaaagtgaag

SEQ ID NO: 28840 - DNA, 1218 bp, Homo sapiens
  SIMILAR (829)..(1215): 981254mologous to Escherichia coli matches PS00041: Bacterial regulatory proteins, araC family signature,accession number U00006,Smith-Waterman Score=664.
atggacgagcgcaaaatcgactttagcctgatctccagcgaacgcgcaccgcgcaacgtcggtaaaacggcgcgcgagaaagcgaaaaaaggcgatgcaggtaaaaaaggcggcaagcgtcgtcaggtcggtaaaaaggtaaactttgagccagacagcgccttccgcgtgcaggccctgctggagcgcgcccctgaacgttttcaggaagtctttattttaaaaggccgtgaagataaacgtctgttaccgctgattcacgcccttgagtctcagggcgtggttatccagttggcaaaccgccaatatctcgacgagaaaagcgacggtgccgtgcatcagggcattatcgcccgcgtgaagccaggacaaaaaccaaaaagcagtcgcttcgcgaatcgccacaacttcaacgttgaatttcaggttctgaccggccagcatgtggttaccatcaaccacgacgtgatcgtcttcaaccgcagtgatttcaaccggtaccggaccctggtcggtttcagccaggaaacgcatacctacctgcagttcatcaacgcccataaatacgtctttaggaacacgttgcaccaggttttcgtcgtactgaccgtaagcgtcgttcgcgccaacagcgacatcaaatttgtcgccaacttcatgaccttccagcgccgtttccaggccagagatcagggaaccgtgaccatgcaggctgtgcggctccgtggttaccgtggcaacagacggcaacaactcgggcggcgcatggaaagtgcgggcggcttcaaactgggtatggagcccctcaacggcggcgggaggatccccgatttgcttggcggccaaatccagaccgcctcacgcagccaggcactatttgaagctattcgcgattatatcgacgaacgctatgcctccgggcttacccgcgaatctgttgcacaggcgttttatatttcgccaaattacctctcgcacctgtttcaaaaaacgggggccattggttttaacgaatacctgaatcacacgcgactggagcacgctaagacgttattgaaaggctatgacctgaaggtaaaagaagtggcgcacgcctgcggctttgtcgacagcaactacttctgccgtctgtttcgtaaaaacaccgaacgctcgccgtcggaatatcgccggcagtaccacagccaactgacagaaaaaccgactactccagaataa

SEQ ID NO: 28841 - DNA, 864 bp, Homo sapiens
  SIMILAR (372)..(151): 871254mologous to Homo sapiens NAG13,accession number AF194537,Smith-Waterman Score=331.
ttaatcttcaatcaccaataccctttcttccacttgattgaatcggctattgaagcttgtgcatgcatcacaaagttctcgtgccatggttttcagctccatcaggtcatttatgttcttctctacactgtttattctagttagacgacagttttcaaggtaaacaatcatgttgtcagcaaacagtgacagtttgacttcctctttaccaatttggttgctctttatttctttctcttgtctgactgctctggctaggacttctagtactgtgttgaagaggagtggtgagagtgggcatccttgtcttgttccagttttcagagggaatactttcaacttttccccattcagtattatgttggctgtgggaggagtgctccactgtgaaatcaactgccgcatctgttccacaggacgatccgcaaacccgccgcttgattcatgtattttataagctaggatctgataccatagggatccattgagggggtggccagaaggaagacgggtaaaactccacagggagaaggaaatctctagctgaactgtgtaacaattcgaacaggacaagacatccgggatgcacactccttttgtcagttcgacttgcggcgaccagcgtgctgcgttcatttgcgcaagcagagttaagctgaatatttcaaccagaatgcgatgggtggtgtagatagcaatggtgttggagccaatcacattcagcaggctggtggagcgcataccgaatcgttgctcgtattgataaaacagcttcatgatcaccacaatcgataccagcgacaacagcagcgagatagtaaacaaccaggcaccgaccgccagaacggtaagcaaagaagccat

SEQ ID NO: 28842 - DNA, 1875 bp, Homo sapiens
  SIMILAR (37)..(990): 891254mologous to Escherichia coli ferrichrome-iron receptor,accession number M12486,Smith-Waterman Score=1483.
atgttcggcattagcgccaaaccgataaacgccatttatcttgcacgtaaattactgcgttatatgagagaacttgaaaactttcccgttgatacccaagttccagagcaagtttgccactggcgatatcgcccacaccttgctgaccggcgtaggcgtaatgacatcaacgctgtgtttggttacgacgactctgtgccactgctcaatctgtacaatccggtgaataccgatttcgacttcattgccaaagatccggcaaactcggccccttaccgcattctgaataaacagaaacaaacgggcgtttatgtcaaggatcaggcgcagtgggataaagtgctggtcaccctaggcggtcgttatgactgggcagatcaagaatctcttaaccgcgttgccgggacgaccgataaacgtgatgacaaacagtttacctggcgtggtggtgttaactacctgtttgataatggtgtaacaccttacttcagctatagcgaatcgtttgaaccttcttcgcaagttgggaaggatggtaatattttcgcaccgtctaaaggtaagcagtatgaagtcggcgtgaaatatgtaccggaagatcgtccgattgtagttactggtgccgtgtataatctcactaaaaccaacaacctgatggcggaccctgagggttccttcttctcggttgaaggtggcgagatccgcgcacgtggcgtagaaatcgaagcgaaagcggcgctgtcggcgagtgttaacgtagtcggttcttatacttacaccgatgcggaatacaccaccgatactacctataaaggcaatacgcctgcacaggtgccaaaacacatggcttcgttgtgggctgactacaccttctttgacggtccgctttcaggtctgacgctgggcaccggtggtcgttatactggctccagttatggtgatccggctaactcctttaaagtgggaagttatacggtcgtggatgcgttaggcttgtctacttttggtggattatccctaatacccaacagaagcatgttggtgctgtgcattagcatggcagtgctgggattgttcctcggtatagaagtacagaaacggcgactgtgctcgatgggggcactggccagcaccataaatattatcgtgctggataacccgatgactttccatttcagtcagtttctcgacagcgcattagggcaaatcgtcggctgtgtgctcgcgttcaccgttattttgctggtgcgggataaatcgcgcgacaggaccggacgtgtactgcttaatcagtttgtttctgccgctgtttccgcgatgactaccaatgtggcacgtcgtaaagagaaccacctcccggcactttatcagcagctgtttttgctgatgaataagttcccaggggatttgccgaaatttcgcctggcgctgacgatgattatcgcgcaaaagcgcctgcgtgatgcaccgatcccggttaacgaggatttatcggcgtttcaccgacaaatgcgccgcacagcagaccatgtgatatctgcccgtagcgatgataaacgtcgtcggtactttggccagttgctggaagaactggaaatctaccaggaaaagacgcatctgggaagcgccaccgcaggtgacggaaccggtaaatcggctggcgaccgcgtgacgtcggaaattccccttccaagcgttccacaacttcatgatcaccacaatcgataccagcgacaacagcagcgagatagtaaacaaccaggcaccgaccgccagaacggtaagcaaagaagccatcagcagatggcggcgcaacggcacctctttaacacaggtcattattgttgcgccaaaccaggggatcctctagagtga

SEQ ID NO: 28843 - DNA, 4401 bp, Homo sapiens
  SIMILAR (2998)..(3048): 1001254mologous to Escherichia coli phenylacetaldehyde dehydrogenase,accession number X97453,Smith-Waterman Score=108.
tcaacagcaagggttcttcttcagtccacggatacgcccttgcaaatcagccgtaatatttttcgctgtcaccagattaatccttcggcaattcgcaacgtaacgggaccgcgagtccccagatgccaggcccatcggcaaaacggaaaggcaggacaaaatcgacaccgttaacctgatatctggcatccaggcactaccgcctttcaacacgccgtgtcctcccgcgggaatcccgaaccgggccaatctcaccagcatgtaaatccctttaaagaggaaataggtaggatcgcgcccatcgacgctaaattttaggttgatggcggtaacacactgccgccagtgaacagcgtttgcacccgggtaccagtgacagcggcgcgcgtcttgtcctgcgacatcgccaggtggcattgcatacgcgtgtaaaactccctttccccagtagcgccaggccagctccagcgaccatcgcttacggtcattgttgacgagtaatttgccacggcaaatcgagcaacggatcgccgttacccgtgccagcacgatcaattgcccgctattttcctgccagtccagctcgcatccaccagtgacggttcctgcggcaagtttaacgtcgcagtagcatcccacatatgcgtcgaagccacctagcgccgtggaacatatagtgggtagaactgtagatgttgcacaataccggacgagcataggccgaaatggtcgaaggaatgagacaaccgatgatctcaagtagcgctggagactgatgtgcccaacggagagagagggtccatggagggcacacgagccactctctccaagtgctccaggcccgtcgttatgggcaaaaggtgcataagctgacgctgcaggcggttttagctgccctaaccgtgacggtaccatcgggcgtggtggctcacattctgtaatgttgcctcgtttgccgatgaagcgcagcagcatcgtccattgccgagcaaccgcccggactgcgtgccggatgcggtgctggactgctttgcgaatataaggaccagggttacgaagtgtggctggagctgggccggtcagccaggattcactttccagccggtcgagcatctgcaccagcaccggcgggaacacccactgccaccgtcttcgccgccggactgctgaagggtatgcgccaggctcggcgctgcgttttcgccagctcaccggtggcggtttcaaccctgatgatggcgtgaagctccccggctgataaatcgtctggatgcgggttctgtcgtctgtatcgtggtcaggcggtcgccgtcccagccgtaccaggtcattgggtttccgtgacagcgacatccagcccgtcaggtcccgttcacgtcgcccacccgttttgccaccctgcggcccagcgggtcgtaaagatagcggcttcgaccagcggctctgcatattgtgtccgcgtgtagtgcaccagccggtgtgactgtcgtaatggtaccggtgggtgcgctcatcatccgtgcggataacccttccgggatgaggtcggttttctccgtcagcgggcgatacggttatccggccacatctgagggtgctgtccgggtgcagctccgggtcgggcaggcggttacctgcgggtttaatacaaaactttagcggtatggtgtttctcgatttttcaatcaataacctgacactgatggcgttactatcgccaccggattcgtggtcgatgacgccatcgtggtgatcgaaaaatttcccgctgggtgccacagttgatggaaaaactccagcaactgcacagctttctgatgtctccagcgactggcaggacaaagggctggtggctatgtcaatgttgatcgcgacagcgccagccgtccggaagacgacatgcagatggtcaggatagtagacgagggaatgcggcaagacgacgacccaaaagtagcggcaaacaccagacctgcgtccacgtcgtcgcttgtcccagatcttcacatagaatgcagactgcgctacgaccacggtatctccacgagcctcgcgcatacagccgggcagtgacgtcatcgctgcgcggaaatggacgaacagtggggatacgtcggggctaaatcgcgcagcgctggctgttttacgcgtatgacaggctccggaagacggttgttgccacgtattcggtgaacgcacctttgacgtggtgatatggatgacggatggctggccgctgatgaatcccgcctgaagggaaagctgcacgtaatcagcaagcgatataccagcgaattgagcggtataacctgaatctgaggcagcacctggcacggcgggacggaagtcgctgtcgttctcaaaatcggtggaggttccaggcgctaaagtttgccagttggatccagccctgccagtccgcgtgcgtagccgcacttcatgccggaggctttcagtttcgcggcatagtcgccagatcctgccagcgtttacggcgggctgttccgggtctaatcctgcttcttgaaggcgtctttgtcgtaatagagaacgggggtcgagctgttgatggctgggagagtaagtggcccgttttgctgtcggagtagtaacccagtaggcctgataagcgcagccaatcaggcagggatcctctagagtcactgacgcatgagctgctgctcggacgatgttgcgcgtggcggaacgcccagcgaggctggtatccctgatggcgttttcaatgtcgtcaccgggcaggtgctgttgcacagataaccctttggtttctcgtgcgcactgcgacaaagtgtgttcattcctccacgatgcgcaggcacagcaagcagagctgattcgcgggtcgaatggaccgccggagaggggtattatgttgcgccaacgctggtggtaaatcccgatgtaaattgcgcttaactcgtgaagaggtgtttggtccggtggtaaaccgtttggtgggatgaagcagtcaggaacgggcgtgattttggccccgactggctggacggttggtgtgaaactaagtcggcgcagatcatcttgcgcggaccgccaattttgggaagcgcttacgcagcgcgtcgtcacatcagacgtgtcatccaccgacagcgtgatctgggtcataaaggaagcttctcttcgtttttgaccgtcagtttccacacatcgtccggcgattgaccagatacattcccccttccgggttactgtactggcccattgtccctccacttccgggtgcccggcgtgaccgatgagaatagattcttcgccacgcgactggcgcgggcgacttccatatgcacacggcgactgggcatcagggcaatcgccaaaagggtcatcgccatggtccttgctcactgcgcaccggcagatggcactctgtttccagtacgtgacgaccggcatcatgcctttgcagatgtccttatcaataacgcgtatatcgtctcgacaaccagcaagagaacatctggcctcgggcaccactgctacagtggtggtcactggcaaacagatcgcgacgaagccaggattcgttccttcacgtaaaatggcccatcgcctgcgtgagctatggttaatcacgatgggtattttctccattgctaaccaacatattcgcttccggtaaaactggcgaccgccattgtactggcgctgtttgttggctttacttccagctggaaacgccatcgctgggcggtactgacagcggcgattgtgccgccggtccggcctttgcacggcgctaccaggcatgcgcagcaacctgaatatggaatcttccgctgggcgcgggccatcgacgttaaaagcatcggccaggcttattctcaagacgctctgagctgctcgttcggctatggcgtaggcctcggtgaatcgcagaatccgggacccataaggttgttttaacaaccggttccttgccgcccaaaagtccctttcgttaattgtctgatatcgcagaaatgtctcaatgacggtggcctgggctacaggtaccaggcccgctgatggcggtccggcacggatgatgtcgccaaacgctgactgggcacccgtactgccattcgccagaacgcagctactctgtggtatcacgccaatactcccaacgcacggctcagcaggtctataacggccttgccggaatgtggcgggaagcggcggctttgttggtgatacgctgctggtaacggtgtacaaagcccgtacgttgaagtctcgcgtggctgggtgcgctgcgactgctgaacgcgtcgaactctcgtcgctatcaacgggcgagcgccgagagttctggtggatatgagcaacggcgatgaagtgtcgatcacctgtggcgattggcggtacgggaatacacat

SEQ ID NO: 28844 - DNA, 2475 bp, Homo sapiens
  SIMILAR (1)..(1266): 971254mologous to Escherichia coli DNA helicase,accession number L02123,Smith-Waterman Score=2110.
atgagcgccgaaatcaccgcgccgtggtatcggctacagctggacttgttcacgaaactggtcgctacctgcatggagcagtttcgcccgaagaccatcccaccgctggcgatccctgaacgtttgaatgcgcattgtgaagagttgtatgagcttatcgcctcgttaaacaacattctcaatctctacatgcctgccgggcaggaggcagagcaccgttttgcgatgggcgaactgccagatgaagtgctggagatctgccagcggctggcaaaactcaccgagatgctgcgtggcctggcggagttatttcttaacgatttaagtgagaaaaccggcagccatgacattgtacgtctgcatcggttgattttgcagatgaaccgcgcgttggggatgttcgaggcgcaaagcaaactctggcggctggcttcgctggcgcaatcttccggtgcaccggtgaccaaatgggcgacgcgggaagagcgcgaagggcagctacacctctggtttcactgcgtgggaatacgtgtcagcgatcagctggaaaggctgctgtggcgcagtattccgcacattattgtcacctccgcaaccttgcgttcgctgaacagtttttcgcgtttgcaggagatgagtggtctgaaagagaaagcgggcgaccgttttgtggcgctggattccccctttaaccactgcgaacagggcaaaattgttattccccggatgcgcgttgagccttccatcgacaacgaagagcagcatattgccgaaatggcggcctttttccgtaagcaggtggagagcaaaaaacatctcggtatgttggtactgtttgccagcggacgggcgatgcagcgctttctcgactatgtgacggatttacgtctgatgttgctggttcagggcgatcagccgcgttaccgtttagttgaactgcaccgcaaacgcgtcgccaacggtgagcgcagcgtgctggtgggcttacagtcatttgccgaagggcttgatttgaaaggtgatctgctcagccaggtgcatatccacaaaatcgcttttccgcccatcgacagcccggtggtgatcaccgaaggggaatggctgaaaagcctcaaccgctatccgtttgaggtgcaaagcctgccgagcgcctcgtttaacctgattcagcaggttgggcgactgattcgaagccacggttgctggggcgaagtggttatctacgacaggtacagagctcgatttgtggtgcgatggttcggacggtttacacatatgcagttcaactggggcatcgagagcgtctgttctggggccaccgggattaacgtcatggccatctggcgcgcgttattacaggtacttcaacacggcgatccacgtcgcgtggcgtgggatgatactacgcatgacttccccagcgtgactggcgatacccgctcgttgcgcccgttaggtcaaattctgctggaaaatcaggtcatcactgaaggactactcgatacagcactgcgtaatcgcgtcgaaggtctacgcctgggcggttcaatgctgatgcaggggctgattagcgccgagcagctggcacaggcgctggcagagcgatacggcgtggcgtgggaatccatcgatgcctggcagatcccttcctcgctgattgccgataatgccggcctccgtggcgctgcattatgcgcatcagtggctcacggatacagcaggcacggtgaaatctggcggcaatatgtgccgcatcagttcctgttcgccgaaataatgaccacgctcagtcatataatcgttaaaaccgctttcaagaaagcaggattagacccggaccagccgccgaaaacctggcaggatctggcggactatgccgcgaaactgaaagcctccggcatgaagtgcggttacgccagcggctggcagggctggatccaactggaaaactttagcgcctggaacggtctgccgtttgccagcaaaaacaacggctttgacggcacggacgcggtgctggagttcaataagccggagcaggtgaaacacatcgccatgctcgaggagatgaacaagaagggcgacttcagctacgtcggtcgtaaggatgaatccaccgagaagttctataacggtgattgcgcgatgaccaccgcctcttccggttctcttgccaacattcgcgagtacgccaaatttaactacggcgtaggcatgatgccttacgacgccgatgcgaaagatgcgccacaaaacgccattatcggcggagccagcctgtgggtgatgcagggtaaagataaagaaacgtataccgggctgcgtctgggcaacatgccgcagatccgcgtgattgtggatgaagagctggagagcgtgtggaccggtaagaagacaccacagcaggcactggataccgccgttgagcgtggaaatcagttgctgcgccgctttgagaaatcgacgaagtcttaa

SEQ ID NO: 28845 - DNA, 2025 bp, Homo sapiens; identical to SEQ ID NO: 24739
  SIMILAR (940)..(1194): 1001254mologous to Escherichia coli peptidyl-tRNA hydrolase,accession number X61941,Smith-Waterman Score=431.

SEQ ID NO: 28846 - DNA, 3042 bp, Homo sapiens
  SIMILAR (2307)..(1327): 981254mologous to Escherichia coli K12 soluble lytic murein transglycosylase,accession number AE000509,Smith-Waterman Score= 1658.
tcagtaaggagtcctggtaagtctaccaagggagggttgcttcatggaggtggtgtggtgcaggtgtggggggtggttagtgttgtggtgacggtgcttagatggagaaagagtgatgggggtggtggttgtgtgggtggtgttgtgtgggtgttggttgaagtgtggggagtgtcgggtgtgttggggcatttgtgtgggcgacgggatgggtggagaggtgtaagccgcgggtggtttgcgccgcgagggagtggagagagcgaaggcggagagcgttcgggctcgcgctttagcctgggtagcggccattgaccgcggtgcataactgagtggtaagtcgaccacaccaagatgatcgccccacatgccgggcatgaccgccggaacaccattcagcgtgcctttggcgatatcagccccttcgatatcagcaaaatctttacctgggaaaacggcgtgagcatggccaaacataatggcgttaacgcccggaatttcactgaggtaataaactgagttttccgccatcactttatacggatcggcagatagcccggaatgtgccagaacgacaacaacatcggcacctttctcgcgcatttcaggcacgtatttgcgcacggtttcggtaatatcattcaccgtcactttcccggataaattagctttatcccagcccatgatttgtggtggcacgacgccaatatagccaatcttcagcgtctgtttttttccgtctttatcgaccacttcggtgtctttaattaaatacggtgtaaacattggctgtttggttctggcgtcaatgacgttggcatttacataagggaatttcgctcctgccagcgcatttttcaggtaatccagaccgtagttaaactcgtggttgccaagcgttccgacggtatagtccagcgtatttaatgccttatagaccgggtgaatatcacctgcttttaatcctttcgccgacatgtaatcggccagcggactcccctgaatcaaatcgccgttatcaaccagtacgctgtttttcacttcattgcgggcatcgttaatcaggcttgccgtacgtaccagtccgaatttttccgtggcggtgtctttgtaataatcgaaatccatcatgttgctatgcagatcagtggtttccatgatacgcagatcgaccgtcgctgcattcacactggcggcaatcagcgtggccaggagcgttgcgctaaatcgattcttaataaaatcgaccgggaacgcctgcaagtaacgataggtcgcataacccgtaccaaagtcatccagcgcaaacgtaatgttgtgctgatatacacggcgttcaataagcgaagtagattgcgagcgcataatggcgtcatcgcgccagttcgcctgctcgtcggtgacatcgttgcccatcagacgccaggcgacgatatcgcgcagctcctgaatctgatcttcattaagctgctgcgcctgggcaagcgatgggatcatcagccgtgcattctcagcatcctgccgcgccacactggcaaacgccaccgccgccatttgacgggtaaaatcgttcgcgccagttgtacgcgcgaaggtcagtaccgtattagggttgttcgccagtgaaatgattgccgaggcgatagtctggtaatcggcaggcatctgccctgccagcactgttaccaggcctgtgttacccgctttcatcgccagacggatacgctctaaatacgccagcggatcttgtttacctgacgcacgccagacgctaaataacttgtcacaggcgttaggctggctcttgccggttagccacagctctttcgccccttgccaggcttcttcactctgcccggtgttccatttcgcatagtagtaattacattgcgcttcggtagttccgggcttttccgggctaaaggctaacaagccacgccagtcttcacgccgcgccagttcattgacgaaacgagattgcagcgtgcgagcgggaggaagcgtggggttagcgcgaacaaagttagtgaccgtcaccgccggttgattcatcagatcatcggtgatctggcggtattccaggtagggataaagcggataatccttcagtccaggcatcatttgttcgaccacatccatttgtcgattatcccaggcctgcttgatttgcgcgtaacgactacgctgctcatccagtgagtcggctcgcgccacgctgctgaccgtcagcagacagacaccggcagccaacagccgccaggtaacttgtttggctttttccacaagcgcatcctcgacgtagctgaagtcgcccttcttgttcatctcctcgagcatggcgatgtgtttcacctgctccggcttattgaactccagcaccgcgtccgtgccgtcaaagccgttgtttttgctggcaaacggcagaccgttccaggcgctaaagttttccagttggatccagccctgccagccgctggcgtagccgcacttcatgccggaggctttcagtttcgcggcatagtccgccagatcctgccaggttttcggcggctgttccgggtctaatcctgctttcttgaaggcgtctttgttgtaatagagaacgggggtcgagctgttgaatggctgggagagtaagtggcccgttttgctgtcggagtagtaacctgaaaccgtcggcacaaactgcgactcatcgaactgaatccctgcctctttaaacacgtcatacaccggtttaatggctttcgacgccatcatggtggcggtgccaacttcataaacctgcaaaatagccggcgcgttgccggtacgaaatgcggcaatccccgcgcttaaattctgttcgtagttgcctttataggtcggtacaattttgtaatccgggttttcggcgttaaaacgttgggccagagaatccacctctttacccagttccccttccatagaatgccagaacggaatggtcgtcactgcctgtgcattccccattaacgccagtccgagcgccagtgctgaagctgtataatgtaacggtttcat

SEQ ID NO: 28847 - DNA, 2306 bp, Homo sapiens
  SIMILAR (1344)..(2069): 871254mologous to Escherichia coli ugpA protein (AA 1- 295),accession number X13141,Smith-Waterman Score=1080.
cgagattcaatgtcgcgtccctgacaacgagctgactgggaataccctgtgcaggaccctatctatatctcgacttgaaacaggattacagaattatctcataacaagtgttaagggatgttatttcccgattctctgtggcataataaacgagtagatgctcattccatctcttatgttcgccttagtgcctcataaactccggaatgacgcacagccgtttacggtgcttatcgtccactgacagatgtcgcttatgcctcatcagacaccatggacacaacgttgagtgaagcacccacttgttgtcatacagacctgttttaacgcctgctccgtataggagtgggggcagtgacgaccattccgttctggcattctatggaagggaactgggtaaagaggtggattctctggcccaacgttttaacgccgaaaaccggattacaaaattgtaccgacctataaaggcaactacgaacagaattaagcgcggggattgccgcatttcgtaccggcaacgcgccggctattttgaggtttatgaagttggcaccgccaccatgatggcgtcgaaagccattaaccggtgtatgacgtgtttaaagaggcagggattcagttcgatgagtcgcgtttgtgccgacggtttcagccattcaacagctcgacccccgttctctattacaacaagacgccttcaagaaagcaggattagacccggaacagccgccgaaaacctgcaggatctggcggactatgccgcgaaactgaaagcctccggcatgaaggcggctacgccagcggctggcagggctggatccaactggaaaactttaggcctggaacggcatgatgccttacgacgccgatgcgaaagatgcgccacaaaagccattatcggcggagccagcctgtgggtgatgcagggtaaagataaagaaacgtataccggtgtggcgaagttcctcgatttcctcgcgaagccagaaaacgctgccgagtggcatcagaaaaccggttatctgccaatcaccaaagcagcgtatgacctgacccgtgagcagggcttttatgagaaaaacccaggggcggataccgcgacgcgtcagatgctgaataagccgccgttgccgttcaccaaagggctgcgtctgggcaacatgccgcagatccgcgtgattgtggatgaagagctggagagcgtgtggaccggtaagaagacaccacagcaggcactggataccgccgttgagcgtggaaatcagttgctgcgccgctttgagaaatcgacgaagccggataagcgaagcgcatccggcacagttcaggaattaaccgtaatgtcatcatcccgtccggtgttccgctcgcgctggctgccttatctgctggtcgcgccgcagctcatcatcaccgttatcttttttatctggcctgcgggcgaagcgttgtggtactcgctacaaagcgtcgatccgtttggtttctccagccagtttgtcggcctggataacttcgtcacgctgttccatgacagctactatctcgactccttctggacgacgataaaattcagcacctttgtcaccgtcagcggtttgctggtatcgctgttctttgcggcgctggtggagtacatcgtgcgcggcagccgtttctatcaaaccttaatgttgctgccttacgccgtggctcccgccgttgccgccgtattgtggatcttcctgtttaaccccggtcgcgggctgatcacccattttctcgcggagttcggctacgactggaaccacgcgcaaaacagcggtcaggcaatgtttctggtggtgtttgcctcagtatggaagcaaatcagctacaacttcctgttcttctatgccgcgctgcaatccattccccgttcgttgatcgaagccgcagccatcgacggtgcagggccgattcgccgcttctttaagatgctgcttttttcgcggggtttgtacgggcccgcccttcccgtgggccggtctttcgtgttcgcccattcctggtccgcccgtgacgctgtggatcgaactgggggtcctggggcaagaggcccagaggttggcattgccagtattggtgagcgcataccaatcgtgctcgtattgataaacagcttcatgatcaccacaatcgataccagcgacaacagcagcgagatagtaaacaaccaggcaccgaccgccagaacgataccacaagctggtgctggcggtgatcatcccgtgcaggaactcaccggtggaatcggcataagcggcattggaggcattgcttaa

SEQ ID NO: 28848 - DNA, 518 bp, Homo sapiens
  SIMILAR (5)..(517): 941254mologous to Escherichia coli CDP-diglyceride hydrolase,accession number M11331,Smith-Waterman Score=843.
ttaaggcgctccgcaacatcagatgatgtctacgtatcgtattaacggtcgtgaaagtcctatgttgacctatccttcaacgccgaacttcttttggttggcttggcaggcgcgtgattttatgagcaaaaaatacggccagccggttcccgatcgcgcggtttctttggcgatcaactcccgcaccgggcgtacgcaaaaccattttcatattcatatctcttgtattcgtcctgatgtgcgcaaacagctggataacaatctggcgaacatcagcagccgctggttgccactgccaggtggtttgcgcgggcatgaatacctggcgcgtcgggtaacggaaagcgaactggtacaacgcagcccatttatgatgctggcagaagaagtacctgaggcgcgggaacatatgggacgctacgggctggcgatggtacggcagagtgataactcatttgtattgctggcgacacaacgaaatctactgacgcttaaccgtgcttcagccgaggaaattc

SEQ ID NO: 28849 - DNA, 2085 bp, Homo sapiens
  SIMILAR (304)..(936): 981254mologous to Escherichia coli K12 putative chaperonin,accession number AE000297,Smith-Waterman Score=1048.
atgccatctacacgctatcaaaaaatcaatgcccatcactatcgccatatatgggtcgttggtgatattcatggtgaatatcagttattacaatcccgcttacatcaactctcttttttccccaaaatcgacttacttatttctgtcggcgataatattgatcgtggaccggagagtcttgacgtcctgcgcctgctaaaccaaccctggtttacgtcggttaaaggcaaccacgaagcgatggcgcttgaggcattcgaaactggcgatggcaatatgtggcttgccagcggtgtctataggattcccttggcggttatctggattattggcagtctgacaagcaaagcgtacaaagcagaagttcagcaacgccgtgaggcatttaatcgtgcgaaaatggactatgaccatttagtccgccagatccagcaggtaggcggcctggaaggttttatcgccaaacggacgatgctcgaaaaaatgaaggacgaaattctcgggttaccggaagaagagaaacgcgctctggcagcacttcatgacactgcaagggaacggcagaagcagaagtttctggagggattttttattgatgttgcctctattcccggcgttggccctgcgcgtaaagcggcgttacggtcttttggtattgaaacagccgcagatgttacccgtcgtggcgttaagcaagtgaaagggtttggcgaccatctgacccaggcggttatcgactggaaagcgagctgtgaacgccgttttgtgttcaggccgaatgaagcgataacgccagcagacagacaagcggtaatggcgaaaatgaccgccaaacgacatcggctggaatcggcgttgacagtcggcgcgacagagttgcagcgattccgccttcatgctccagcacggaccatgccgttgatggaaccgttacagccaaccgtgtcggtggtcgataaagtggtcgagaaaaaaggtactaaagaggtggcggaagcctacctgaaatatctctactcgccagaaggtcaggaaattgccgcgaaaaactactaccgtccgcgcgacgctgaggtggcgaaaaagtacgaaaatgcgtttccaaagctgaagttattcaccattgatgaagagttcggcggctggacgaaagcgcaaaaagagcattttgctaacggcgttatcgccgttgtggctgccggtattggttactggaaattaaccggtgaagagtcggatacattacgtaagattgtccttgaggaatgtttgaccaatcagcagcaaaatcaaaatccttcgccatgtgcggaagtcaaacccaatgccggatacgtggttttaaaagatcttagtggcccactgccatatctgttgatgccaacgtatcgtattaacggtactgaaagtcctttgttgaccgatccttcaacgccgaacttcttttggttggcttggcaggcgcgtgattttatgagcaaaaaatacggccagccggttcccgatcgcgcggtttctttggcgatcaactcccgcaccgggcgtacgcaaaaccattttcatattcatatctcttgtattcgtcctgatgtgcgcaaacagctggataacaatctggcgaacatcagcagccgctggttgccactgccagcccaccggaatagcgcaggcgttgttatcaacccggcaacatggaggagcccagtgcccgttattgccattatcgccattgttatcatcgtcatcattctgaacaaaaccggagtgtccgacagcctcacggccctgacacttgcaaccgttgccgcactactgacgggaggtggtgcagccggtgctgccagtgtcgcgctgacgccgttcgtcggcgtgccggtgcgactcatccggacgatgcaaatagatgtggaagccggactagacccggatgtaccgtataactatttcccgcacaatgatccgcaaaatacaccgcgagcgagctggcgtagtcacggtaatttactgtttaccaactggctcaactattacgtctaccagatcacgccatacgatctacggcacatgaatccaacgctggattaa

SEQ ID NO: 28850 - DNA, 1009 bp, Homo sapiens
  SIMILAR (169)..(513): 1001254mologous to Escherichia coli isomerase,accession number X00617,Smith-Waterman Score=565.
tcatgagaaaagtatattcttattattcccctttagcagatgagaaaaccaaggctcagagaggttaagtatcttgtccacaatcacagagctggcaagataatagagccaggatgtgaacacaggcattccaaccctcgaagctgaaaatgaaggcgcacaagttaagaagtttgcgcacgtcagatcgacgcggtactgaaaactcagggtgctgcggcattcgaaggtgcggttatcgcttacgaacctgtatgggcaatcggtactggcaaatctgcaactccggctcaggcacaggctgttcacaaattcatccgtgaccacatcgctaaagttgacgctaacatcgctgaacaagtgatcattcagtacggcggctctgtaaacgcgtctaacgctgcagaactgtttgctcagccggatatcgacggcgcgctggttggtggtgcttctctgaaagctgacgccttcgcagtaatcgttaaagctgcagaagcggctaaacaggcttaagtctgacaggtgccggatttcatatccggcacttactttccttaactcttcgcactgatgatcctgaatttcctcggctgaagcacggttaagcgtcagtagatttcgttgtgtcgccagcaatacaaatgagttatcactctgccgtaccatcgccagcccgtagcgtcccatatgttcccgcgcctcaggtacttcttctgccagcatcataaatgggctgcgttgtaccagttcgctttccgttacccgacgcgccaggtattcatgcccgcgcaaaccacctggcagtggcaaccagcggctgctgatgttcgccagattgtgatccagagatgcggggcataatctaaaccgtccgtggttgtccgatgaagatagttgagtggactcggagtagatccatcggtaaagcagcacagaacagactcttcgccagatcctctcttttcgcttcttcgcggcggtaagtactggcctgctgccgtgggtg

SEQ ID NO: 28851 - DNA, 2493 bp, Homo sapiens
  SIMILAR (321)..(4): 991254mologous to Escherichia coli CDP-diglyceride hydrolase,accession number M11331,Smith-Waterman Score=535.
ttaacgcaaaatctcacactgatgatcctgaatttcctcggctgaagcacggttaagcgtcagtagatttcgttgtgtcgccagcaatacaaatgagttatcactctgccgtaccatcgccagcccgtagcgtcccatatgttcccgcgcctcaggtacttcttctgccagcatcataaatgggctgcgttgtaccagttcgctttccgttacccgacgcgccaggtattcatgcccgcgcaaaccacctggcagtggcaaccagcggctgctgatgttcgccagattgtgatccagctgtttgcgcacatcaggacgaatacggggatcctctagagtaacgcgtggctgacgaacgcaactcgaaacaccaaccagctgaaagtaacaaccatccataaccggggtgtaactgagtggacagggcatgagtaaaataacagcgacaaccagcccatgaatcagcaaggaaagccatctgctcgccgccattgcacccaaggtaaatgtggagcaatttacttgtccgcgaggcgatgcttgcatggatgatcgatttaagttaaagccagcttggtccagatttgttttcttcgttctggcgttgtgcacacaacggcttgtgtcattccaggattcgcgggacccgtcgctgtcgaggtcaatagttgtgctgtgtggcgtttcaaggagctttcttatttgccgctgccgttgccgctcttttgttagcggcggcctgggcatttgcgcgacgttgcttctcttgctggatttcctgttgcgctccgcgacccattcgtcatgctgcctttgctcttcatttttactgctgttccgcttctgcgacagcagagagttgatctggtggtcgtgcattggtccgttggtctcgttggtgtgctccctcgtgcggctgtgttgcggtcgtgggcttgcaccctttccggctgcgtttgtatcgtgcgccgtgtcgtcggagggcgtgggcgcccatatgtggtggtcttcttgcgcccggctgacgtggagtcggatgcttgtggttggatggggcggatgcgtggcacccaggtgcagtgtgaccatgatgagtattcgggctcgtacccgtccagttgctgatgtggtttgatcgcacgcgatagagtatatcggtgcggtagttgggattgagatcgaccgcgccacagtgcgtcctatcacgtcagctattgttgatccaaatgtcttagtcattcgacacatcaagtaacaatgtctcattgcatcggcggccccattatgagctccggcaacaatagcatccatatcataaccgaactggtgaagcactgttagtaatgctgtttggagcagcccatttatggctttgaaattccttcgtcgtgaggtggggcgaggagcactgacaagcaacacgggtgcacctatttgtggtattctcttgtgccccgtttttacccggtgtctcctcataaagatgtgtccgtgaaccaacttgttcccatttgcgtaagatggtttccaacccgtgggcctgtggcaaccagtcacgaaggtcagttcattgcctatgtgccatttagtccggtgatgtgccagggcgaagacctgcaatggttcggcatggcaccgttgtcgtttgatgaaaaataccgtggacaggggctggcacgccaactggtctatgaaggactcgattcgcttaatgagttcggctatgccgcagtggtgacgctgggcgatccggcgctgtacagtcgtttcggctttgaactggcggcgcatcacgatctgcgttgccgctggccgggcacctgcgccttccgctaccagacgctctttttgccgtttggtcagttgcttaacgcgatattccgcccgtaacgccagcgaacgatcgcccactggcgcggaaaacaccagcgttagttctcctttcccgcgcagtgctttcgcccctttgccgctttggtgctgctgatagcggcgttcgacatccgtggtgatcccggtataaagcttattgtcggcggtacggatcaagtaaagaaaccagggtgtcatcgtctgcgtcgcatgttaagccgttggctggcaaaacaacatgttgtcacttggtgtgtgcagcaggaaggggaactctggtgcgctaatgccttttatctttttgatgcgcagaaagtcgccttctacattttgacggaagaaaaaacgcgccacgcgcagatgagtgggccgcaggctgcggttgccggaacggtaaacggtcagccgaaaacggtagcgttaattcgcggtgtgcagtttaaaggtgagatccgcaggctggaaggtgaggaaagcgacctcgcgcgcaaggcgtacaatcgtcgcttttcggttgccagaatgctgtccgccccggtgtgggaaatccggctcgatgaaatcaaattacgctttttttcttttcttcgtcttctcttgcgttctcgcgagagtagataa

SEQ ID NO: 28852 - DNA, 1557 bp, Homo sapiens
  SIMILAR (609)..(4): 981254mologous to Escherichia coli ATP:glycerol 3- phosphotransferase (EC 2.1.7.30),accession number M18393,Smith- Waterman Score=1022.
ctagaagccacccccaaggcctgcgagataggccgcacccaatgcggtgacttcgcgcattcccgggcgctcaacgcgggtgccgagaatatcggactggaactgcatcaggaaattgtttgctactgcgccaccatccacgcgcagggcgtgcagacggataccagagtcggcctgcatcgcttccagcacgtcacgcgtctgataagcaatagactccagcgtcgcgcgtataatgtggttagcgttcaccccacgagtcagaccgaaaatcgccccgcgcgcatacgggtcccagtacggcgcacccagcccggtaaatgccggaaccacatacacaccattggtgttttgcactttggtggcgaaatattcggaatcgtaggcgtcgttaatcaacttcatttcatcgcgcagccactgaatggatgcgcctgccataaacaccgcaccttccaacgcatagttcacttcgccagtcgggccgcaggcgatggtggtcagcaggccgttttctgatttcaccgctttctcgccagtgttcatcagcataaagcagccagtgccataggtgttcttcgccatcccttctttcacgcacaactgaccagggtccgccagtgagaaaagcaccagcatgcctgcgaaccacaggcctatccaaatccagaaatcacggcgtccaatacgcccgttaaggtttaatagtgcaccgccggagttaccgcggttaatggaagcatctgtctggataaagttttccagaccttcaagattcaacccgctgcggcctaatgcggaaacaatgccagaggtggcggtttgcccaaggccaaatgggttaccgaccgctacggcaaaatcaccgacgcgcaatttatcggagtcggcaatagcgatttgcgttaatttgctcgggttttgaatttgtaacagggcgatatcgctctggtcatcgctaccaatcagttttgcatcaaactcgcgcccatcattgagctgaatactgattttctgtgcctgattaatcacatggttgttggtcagcacatagcctttactcgctgtgataggcgacatcgtagcatggacgaagccaagtaagggataatagttggccaccccctggtctcttttatcacaggctttcctcatgggcttgaagtcatgaatgtccacccaggcaaggctttccccagatacctctgtgcccccgagacgaggatattcaatgaccttgggatgtggcttattttgcaggccggaaaaacgggaaaagtgctggtcgtcggtacagatggcattccggaagcccgcaaaatggtggaagccggacaaatgaccgcgacggttgcccagaacccggcggatatcggcgcaacgggtctgaagctgatggttgacgctgagaaatccggcaaggttatcccgcaaatggctgcgataaaacatgcagaacaccttgttaaaagcaatgaagagctggccaaaattctgcttttcattatcagcgtagattagtaataacaccgacccatagtcatcaattcgagtcat

SEQ ID NO: 28853 - DNA, 978 bp, Homo sapiens
  SIMILAR (364)..(975): 991254mologous to Escherichia coli K12 putative LACI-type transcriptional regulator,accession number AE000482,Smith-Waterman Score=1005.
atgggaccaggagcccgggaaatgccagtcctggccctggccctggccggtctgtgtgctcccaggctgcgcccaatccgaagcctccgtgtggatgcagagcccgaagctggaggccatccccaggtccacactcctgtgactgcaagtgacagaaaaccggggcagaagcggctggggccaaagggggaatgcggggctcagggcggcagcccaggcctcccgcacggtttcagctcagccgccctccccagaagaggttgttgtgaagacatagtgagatgtgtctacaagccagagaggcctcaccaggagccgaccatgcaagcacgctggtcccagattttcagcctccagagctgcatttatctggttaatctcgatgaaaaaatcgacatggataatctgaaaaaagctggcggcaatgtggaagcttttgtcaccaccgataacgttgctgtcggggcgaaaggcgcgtcgttcattattgacaaattgggcgctgaaggtggtgaagtcgcaatcattgagggtaaagccggtaacgcctccggtgaagcgcgtcgtaatggtgccaccgaagccttcaaaaaagcaagccagatcaagcttgtcgccagccagcctgccgactgggaccgcattaaagcactggatgtcgccactaacgtgttgcaacgtaatccgaatattaaagcgatctattgcgcgaatgacacgatggcaatgggtattgctcaggcagtcgcacacgccggaaaaacgggaaaagtgctggtcgtcggtacagatggcattccggaagcccgcaaaatggtggaagccggacaaatgaccgcgacggttgcccagaacccggcggatatcggcgcaacgggtctgaagctgatggttgacgctgagaaatccggcaaggttatcccgctggataaagcaccggaatttaaactggtcgattcaatcctggtcactcaataa

SEQ ID NO: 28854 - DNA, 1968 bp, Homo sapiens
  SIMILAR (1)..(534): 861254mologous to Escherichia coli genX,accession number X59988,Smith-Waterman Score=810.
atgaatctctggttaatgaccagcccggaataccatatgaaacgcctgctggttgccggttgtgggccggtattccagctgtgccgcagcttccgtaatgaagagatggggcgttatcacaaccctgagttcactatgctggagtggtatcgaccgcactatgatatgtaccggttgatgaacgaggtggacgatctcttacaacaggtgctggactgcccggcagcagaaagcctttcttatcaacaagctttcttgcgttatctggaaattgacccgctctctgccgacaaaacgcaactgcgggaagtcgcagcgaaactggatttgagcaatgttgctgataccgaagaagaccgcgacacgctgctacaattgctgtttacctttggcgtagagccaaatattggcaaaaaagaaccgacctttgtgtaccactttccagccagccaggcattactgggcgcaaatcagtaccgaagatcatcgggtcgtgaatttcagtatcgaaccctagcaacgtaccctggtttccgggtttacttttttcagcacttccgcgatgtgagtcccatcgacgttagaaacaaagtgcatgttcaggtggtttttgtacggacgcagagcttcggtcaccatgtatgggccgaggtcagaaccgccgatcccgatgttcactaccaccgcgttgacttccggcattacgtctttgccatcaaccaaaatcggggtattgctacggttacgcagcgctacgtgcagcacggcgcggtacggtatattccgttttttacaggagaatttatgctgcccgactcatcagtccgtttaaataaatacatcagcgaaagcggaatttgctcacgccgcgaagcggatcgctatatcgagcaaggcaatgtgttccttaatggcaagcgagccaccattggcgatcaggtgaaacccggcgacgttgtgaaagtaaacggtcagttgattgaacctcgggaagccgaagatttggtacttatcgccctgaacaagcccgttggtattgtaagcaccaccgaagatggcgagcgcgataacattgtcgatttcgttaaccacagcaaacgcgtgttcccgattggccgcctggataaagactcccatgggctgattttcctcaccaatcacggcgatctggtgaataagatcctgcgttgctggcatgatcatgagaaagagtatctggtgacggtcgataaaccgattaccgaggagtttattctcggcatgaaggcgctgaacgcggcgcaggccatcggcgatgaccgtttacaacagcaaagtcaggggcgagtagtaccagacagtttcactcatggcacttctcagcaacgctacagctggtttaaacgtggtttcgacagcggcgatccggcacaatgcaatacttttggaaaacatcgcgtgactatcgaaaagcacaacgatgattatcgtatttcgctggaacaaggtacgccgggctttgagccaccgctggaaggtgaaacacgtgcggcgattatcaacgcgcttcatctcactgaggacgatattctgccaggcttgccaattcaggtggcaacaacaggacactcaaaagtgatgatcccactgaaaccggaagtggatatcgacgccctttctcctgaccttaatgcgctgaccgctatcagcaaaaagattggctgcaatggtttcttcccgttccagatccgcccaggcaaaaacgaaaccgatggtcgcatgttctcgcctgcgattggtattgtggaagatccggtgactggcaatgccaatggcccgatgggtgcatggttggtacatcacaacgtattgccccacgatggcaacgtgttgcgtgttaaaggccatcaggggcgcgcattagggcgtgacggtatgattgaagtgacggtggctgttgtcataccttgtggaaggagtggtatttag

SEQ ID NO: 28855 - DNA, 7410 bp, Homo sapiens
  SIMILAR (7184)..(7369): 1001254mologous to Escherichia coli formylglycineamide ribonucleotide synthetase (EC 6.3.5.3),accession number M19501,Smith-Waterman Score=348.
ttattgagtaccagcgcactcgcagacaatatcggcaccagcgcagaagagctggggctgagcgattatcgccattttgttatttatccccgtctcgataaagcgcagatccacatcctgcggttcggtactcatttcgacgatttgacgataggcctctttacgctcatctttcaacgacttgatttgcggtgtgtactcggccagccacgccttcgccagtctatcggcctcgccatcgaagtaatcctgcacctccatcaccagccccatgccagcaacggtaacacgagcctccatgattgcttccagatattcctctgcatcctcttctcgatccgcaaccttatcggccagatattcgacataggtacgtgaaacatccgggagccgggcagtgacgtcatcgtctgcgcggaaatggacgaacagtggggctatgtcggggctaaatcgcgccagcgctggctgttttacgcgtatgacagtctccggaagacggttgttgcgcacgtattcggtgaacgcacctttgacgtggtgatatggatgacggatggctggccgctgtatgaatcccgcgtgtttctgttcaccatattgctggcgctgaattccccagcctgccatcagcattgtgcgattcgccgccatcagttcagcgagtttgactatctgcgcttccggtacgccagtaatttccgccgcccagaccgcgctcttcggcgtattatcgctcttacctgtcagatactcttcaaactgcggatacccggtagtgtatttttcaaggaacactttatcgtgtttgccttgtgtcatcagggtatgcgcaatccctaacatcagtgccacgtcggtgcccatattcggcgcgatccaggtggcattatcgtcaaagaattcgatggtttcggagcggataggatcaatggcaatcactggtttgccagattttttcagctgatggaagtattccagcccttgctcatcggtactgctccaggcaatttttaaggtattcagcgggttcattccccacagcaccacaacctggctgttttccagaatcagcggccaggaggtctgctgttcatacacctctacagaaccgaccacatgcggcatgatcacctgtgctgccccggttgaataatcgccgctatgcccggaataaccgcccgccaggttcatataacgttgcagtaaggtttgcgctttatgcaacacgccagaagagcgccagccgtaagatccggcaaaaatggccgatggtccgttagctttacgaatacgatcatgttgctcatgaatcagttttaatgcctgttcccagctcacctgtacataggtatcttcgccacgacctttcgccggttgcagtggattatcgagatagctttttctcaccatcggatgctgaatacgcgccgtggtgtgtacctgatccgccgccgtagactgtaaggaattcggtatggttttcgccagcgcgcctgttgaagaaacaatcttgccgtccttcacttctacgttcatcgctccccaacgtcccgcggtgaggattttaccgcccttctcttctgcccatgcggggagcggtgctgccgatgtcaccaccagcgctccagcggcaataccgtgtttctcggtaatatctttggcgttgtactggaaataccgcgttaaaatgtccagttcgttttcgctcatgctggttcgtgcccccattcctttggcaatggacggccacgcattgacggtgtaatggtcggcggcaataggggcatgacaaccagcgcaataggtatcgtcaagtttttcagcgtattgccatagcggtttacggtccgctaatgcgggatcggtaagcgcaccctgtaaagacgcctgacgccattgattgccgtattcgtcagcctgccattccccgtttacagtgagcgccttgataccttcttcacttaatgtggctagcgccagccgttgacctgccgccaggtagagcgtgttttcactgccctgcatttgataaccctgcaacagaacgatcggctgtttgccactggcatcaacgacggtgagatcggttccaggattcacggtagccagctcgcctatgtgagaagttttgaaaggataaatatgtgcgccattagtaactgaagtagcggcctgactttccagctcatgcgccgcgttgtcattgttcgtctgactgccgctgtaggcttcgtcgccgcgcatcatcgcagcctgcatgctctgcgtcaccgccccggtgccgctgtcggtcagtaaatcgataaaaacatcttcgctatccagcaggaacgggttcataccggatttaataattgcctcaatacagaagctggagaaaatccgccccagcaggtcgtctgaagtaaattccccggtgatttcgcttaagttctgctgtgccagacgcaactcttccgccagcagttcacctgcccaggctcccaacagttgcgctttgccctgttgtagatgttccgctgcctgttccagcgcctgtaggtggcgacgacgcgccaggaagccgccttccatgttggtgtcaaagcccatgctctgtttgagatggttacgcagcacgtccacgccttcaccagtccggcaattgccgacgactctggtctggcggtagatgtgcttggcggcgcgccgggcatttactccgcgcgttattccggtgaagacgcgaccgatcaaaagaatctgcaaaaactgctggaaacaatgaaagacgtaccggacgaccaacgtcaggcgcgtttccactgcgtgctggtatatctgcgtcacgcggaagatcccactccgctggtatgccacggtagctggccgggcgtgattactcgtgaaccagcgggcactggtggctttggttatgatccaatcttcttcgtaccttccgaagggaaaaccgccgccgaactgacccgcgaagaaaagagcgccatttcccaccgtggtcaggcgttgaaactgctgctggacgctccgctgagtctctacattcacatcccgtggtgcgtgcagaaatgcccgtactgcgatttcaactctcacgcgttgaaaggagaagtgccgcacgacgatatgttgcaggtaccgagctgataccatatcccagtctccggcttcaaccacaggttgaatgatggtgaagacgttcgcaaatgtcaccaccagtacgacaaccactgtcgcaatcattgccgacaaatgcgttttgaaaatcacaaacggtctgtcgagatcctgacgtgctttaaagaacgggaaagccagcgcgaggaacaggtaaggaagcgtcatagacacgttcgccatcagcgtcagcttgttaaagaacgccgatgcggtaccgccaccaaacgaaaccagcaggatgaagacagtaaccaacccgcactgcatccacatggcgatagacggcatccccatcgcattcaggcgcgtcatcggttccggccacaatgctttcggcgtcccctggatgatggctttcaacggtgaatagcaaagcgtaaagaacgcaccggtataggcgaggaacatcgaaagtccagtaatacgcgcaaaccatacgcccagcgacaatgacgcttcaggtgacaaatgcagtgcattacccagcgtcatcccaaggctcttcatcagcacataggtaatattgccgaggttaacggaaccattacttaatacctgctgccagtttgtgctgacgccccataaaaatattgccagcgaataaccgattgaaataacaatagcggcaaaaacaatacctttggcaaagttcttttctggattttccgttttatcgaccagaccaccaaccgcttcaattccgccataggcaaaaatggcaaataccacaaacgatagcattgccagaccggactgataacccgggttcggtgatgcaaggaaattaatatcctgcgcgaaatgcccaccatttaataacaaaatagtaatgcttactaacagcaatactaaattcagacacattactgcaataccgcccaccgcagtaatgcgggcaattttattaatccccttagaagcaacgacggtgaccagaatcatccatgccacagccagcagaccaaccacctgcgtaggctccagtccggcaatacgccagtgctgggtcatgtcgctaccatagaggaatgttgagaacggtacccaaactttcgcggaggtactcaccatccagatgatataagaggaaaaccacataaacgtaccaatgaaggcaaaacgtggtccgacactattattcatccaggaatagataccgccttcttctttgcgataagcagctcccatttcagccatcattaaggcgaatggaataaagaataacaatgcagaaaatatataaaagggatcgcactccagcgttttggcatcaacgaagcgggcaaagcctttgattacatcaacgttatttttaccgagcacgttttcataggaagtatgaatacggtcgatataggcggtacggctggcgatcaacgtttcccagttgaatttattgatagtggtatcaaaaccataatccgggccgtacatatggatcgcttcacggatttgcgccgcgtgccacatcacttttttcggcacacagccaacatttacgcaggtgccgcccagctctttggcttcaatcagcgcacatttctggccgtacatagccgcgcggttgatggaggcgataccgccgctgccgccgccgatggcgatgtaatcatagtgtttagtcatgacaaagtgtccgcgattgtagcgcgagacgtaataggtgccagcaatggctgcaattactccggcacgatccagggtggcgtgcccggtgcctgccggaaccagtttgctgtgcagccacggcagcacgttattcatctgttgttccagtttccacggcgggttaatcacaatcatgccggaagcggtcatgccacggcgatcgctgtctggcagtaccgccagttcaatttgcagaattttgcgaataccggtcgcttccagatcgtggatcatgcgcttaatttgctgacgcagcaccaccggataccacagtgcgtaaataccagtggcgaaacgtttgtaaccttctgctatcccgctgaccaccgcttgatagtcagttttcatgtcatacggcgggtcgataaggattaaaccacggcgggaaaccggcggcagtttggccttaagctgctggaaaccgtcggctttttcgacacgcgcacggctatctttctgaaattcagaacgcaacaacgggtaatcgctcgggtgcagttcggtcagttgcaggctgtcctgttcacgcagtagcaggcgagcaatcaacggcgaaccggggtagtaacgcaactgaccgctacggttgaagtgttttaccacattgatgtacgcctccagttctgcgggcaaatcgtcctgctgccagatacgggcgatgccttcgagatattcgccggtacgctcggcatgttcgctgcctaactgataacgcccggcccctgcgtgggtgtcgagatagagaaacggtttatctttctctttcagcgactcgatgatcaggctctctttaaccaggactgcgcgaatgacgaatccgttactgactccctttgaattgcctccgttttctaaaattctcccggaacatgtcgttccagccgtgactaaggcattgaacgactgccgcgaaaacgtggagcgcgtagtagcgcaaggggcaccgtacacctgggaaaatctctgccagccgctggcggaagtggacgatgtgttggggcgtatcttctccccggtcagatcagctcggtaccgagcgtaggctggtttctcttcgccgaacacacatttatccagccgcttttgcgcgtaaacaaacaacgcctcgtaatgctccggctccgctgacgccatcacgccgcagctttctaccgaagatacgcactgctgctgattgatttgggcaaaggcaataacgcgctgggcgcaacggcgctggcgcaggtttatcgtcagcttggcgacaaaccggcagatgtacgcgatgtcgcgcaactgaaaggcttctatgacgcgattcaggcgctggttgcacagcgtaagctgctggcgtatcacgaccgctctgatggcggcctgctggtaacgctggcggaaatggcctttgctggtcattgtggcattgacgcggatatcgccactctgggtgacgatcgcctggcggcgttgtttaacgaagaactgggtgcggtgattcaggttcgtgccgctgaccgtgaagcggtcgagtccgtactggcacagcatgggcttgctgattgtgtccattatgtagggcaggcggtttccggtgaccgttttgtgattaccgccaacgggcagactgtattcagcgaaagccgcaccacgttgcgtgtctggtgggcagaaactacctggcagatgcagcgcctgcgtgacaacccggagtgtgccgatcaggagcatcaggcgaaatctaacgacgccgatccgggcctgaatgtaaaactgtcgttcgatatcaacgaagatgtggcagcaccgtatattgccactggcgcacgtccgaaagttgccgtactgcgtgagcagggcgtgaactcgcatgttgaaatggcggcagctttccaccgtgcaggctttgatgctatcgacgtgcatatgagtgacctgctgaccggacgcacgggcctggaagatttccacgccctggtcgcgtgcggtggtttctcctacggtgatgtgcgtgtacgcgatgagtttgcaaccttcttccaccgtccgcaaacgctggcgctgggggtatgtaacggttgccagatgatgtctaatctgcgtgaactgatcccaggtagtgagttgtggccacgttttgtgcgcaatacctccgatcgctttgaagcgcgtttcagcctggttgaagtaacccaaagcccgtctctgctgttgcaggggatgttgggctcgcaaatgccgattgctgtctctcatggtgaagggcgcgtggaagtgcgtgatgcggcgcatctggcggcactggaaagcaaagggctggtggcactgcgctatgtcgataacttcggcaaagtcaccggctaacccgaacggttcaccgaacggtattacggcagtcacgactgaaagtggtcgagtcaccattatgatgccgcacccggaacgtgttttccgtactgtcagcaactcctggcatccggaaaactggggcgaggatggcccatggatgcgcattttccgcaatgcgcgtaagcagttggggtaagtcgtcagcccattggttttgcagcccggatgcggcat

SEQ ID NO: 28856 - DNA, 1291 bp, Homo sapiens
  SIMILAR (704)..(1288): 491254mologous to Escherichia coli Cytochrome C-type protein TorC,accession number D90829,Smith-Waterman Score=403.
atggtgtacacactcatccctagagactttgacgaatgcctgacatttggtttactaggaggaaggcttgatgaaggatggatcgggttgttagaggatcgccagtgctgtcgtgacggcgttgaccgatatatcgagagtgcggttggatggtgtggttgtgttcgtgtcgtgtgtggttctcttgtgttggtggtgcgtctggcgggtgtgcgaagaggtgcgtataagcataatcgtgctgtggtctggaccgtgtgtggtactggcctctggttgcccgtattaccgtattgcgccgattgcggcggtcttgcttcgcctgcggtgttgtccctgcacgatcgtgagtccgcgggttcgcgtgagtttgcgcgcagcttggcggcgtcgccgccattcggaaactgcttttctgctgcacagcgacgacagcgatgtgcgcatccgctactttacgccaacggttgaagtgccgatttgcgtcaacgcgacaggaaaacatcgcgtgactatcgaaaagcacaacgatgattatcgtatttcgctggaacaaggtacgccgggctttgagccaccgctggaaggtgaaacacgtgcggcgattatcaacgcgcttcatctcactgaggacgatattctgccaggcttgccaattcaggtggcaacaacaggacactcaaaagtgatgatcccactgaaaccggaagtggatatcgacgccctttcgcctgaccttaatgcgctgaccgctatcagcaaaaagattggctgcaatggtttcttcccgttccagatccgcccaggcaaaaacgaaaccgatggtcgcatgttctcgcctgcgattggtattgtggaagatccggtgactggcaatgccaatggcccgatgggtgcatggttggtacatcacaacgtattgccccacgatggcaacgtgttgcgtgttaaaggccatcaggggcgcgcattggggcgtgacggtatgattgaagtgacggtgacaattcgtgataaccaaccggaaaaagtcaccatttcaggcacagcgggtgcgcttcccgatcccgcattagcggaccgtaacccgctatggcaatacgctgaaaaacttgacgatacttattgcgctgtttgtcatgcccctattgccgccgaccattacaccgtcaatgcgtggccgtccattgccaaaggaatgggggcacgaaccagcatgagcgtaaacgaactggacattttaacgcggtatttccagtacaacgccaaagatattaccgagaaacagtga

SEQ ID NO: 28857 - DNA, 735 bp, Homo sapiens
  SIMILAR (157)..(732): 1001254mologous to Escherichia coli recR product (AA 1- 201),accession number X15761,Smith-Waterman Score=995.
atgcagaaaatgcaggaagagatcgcgcagctggaagtcaccggcgaatctggcgcaggtctggtaaaagtgaccatcaacggtgcacacaactgccgtcgcgtagagatcgacccgagcctgctggaagacgacaaagagatgctggaagacctgcttatggaagcactgcgctgtctgccgggcgttggcccgaagtcggcgcagcgtatggcgttcacgctgcttcagcgcgatcgtagcggcggaatgcgtctggcgcaggcgctcacccgggcgatgtcggaaatcggccactgcgccgattgccgcactttcaccgaacaggaagtctgtaacatctgttcgaatccgcgtcgtcaggaaaacggtcaaatctgcgtggtggagagtccggcggacatctacgccattgagcagacggggcagttttcaggtcgttattttgtgttgatggggcatctgtcaccgctggacggcatcggtccggatgatatcgggcttgatcgtctggaacagcgtctggcagaggaaaaaatcactgaagtgatcctcgccaccaaccccacggttgaaggtgaagctaccgctaactacattgccgagctttgcgcgcaatatgacgtggaagccagccgaatcgctcatggcgttccggttggcggcgagctggaaatggtcgacggcaccacgttgtcacactcccttgccgggcgtcataagattcgtttttaa

SEQ ID NO: 28858 - DNA, 675 bp, Homo sapiens
  SIMILAR (1)..(234): 701254mologous to Escherichia coli aspartate transcarbamoylase catalytic chain (pyrB),accession number K01472,Smith-Waterman Score=251.
atgctcgatgaaaaagggatcgcatggagtctgcacagctctattgaagaagtgatggcggaagtagacatcctgtacatgacccgcgtgcaaaaagagcgtctggacccgtccgagtacgccaacgtgaaagcgcagtttgttcttattcactcaaggatctgcacctttgctgccaaaattacaactgcagaccccaaggagcccagttcaattgatgaagtttattcagaggagaaggagcatgcagaaggaatacaatactacagatttagaggccaagaaagactcttaatcagagttgagataagggtgggacgaagtggactgggggcaaagagcaaccacgaggtccgaatcacaatggaagggtcaagaatgaaataccgcatcgctttagctgtttctctctttgctcttagtgccggtagttatgccactaccctgtgtcaggaaaaggagcaaaatatccttaaggagatcagctatgccgaaaaacaccaaaaccagaatcgtattgacggtctgaataaaaccctgagtgaaatccgggccaactgttcagatagccagctgcgtgccgatcatcaaaagaaaaacgcaaagcagaaagatgagggggcggaacgccagcaaaatttagccgaggcgaaacaaaaaggcgatgccgattag

SEQ ID NO: 28859 - DNA, 424 bp, Homo sapiens
  SIMILAR (8)..(304): 861254mologous to Escherichia coli glutamate-1-semialdehyde 2,1-aminomutase,accession number X53696,Smith-Waterman Score=474.
cgcaagaaatgaagtcgcgcagccgggcgttcacgaaacgctggatgagctgacaacacgtctggcagaaggtctgctggaagcggcagaagaagccggaattccgctggtcgttaaccacgttggcggcatgttcggtattttctttaccgacgccgagtccgtgacgtgctatcaggatgtgatggcctgtgacgtggaacgctttaagcgtttcttccatatgatgctggacgaaggtgtttacagcatggaagatatcaataacaccatcgatgctgcacgtcgggtgtttgcgaagttgtgatccagcatggtttgtcggatgcggcgtgaacgccttatccgacctacgattcggggccgtttgtaggcccgataagacgcgccagcgtcgcatcgggcatccgttgtcgcgtaaacg

SEQ ID NO: 28860 - DNA, 1482 bp, Homo sapiens; identical to SEQ ID NO: 24638
  SIMILAR (1261)..(1199): 951254mologous to Escherichia coli TldD protein,accession number D44451,Smith-Waterman Score=94.

SEQ ID NO: 28861 - DNA, 2413 bp, Homo sapiens
  SIMILAR (1)..(741): 981254mologous to Escherichia coli Anaerobic dimethyl sulfoxide reductase chain A precursor (EC 1.-.-.-) (DMSO reductase),accession number D90801,Smith-Waterman Score=1294.
atgattgtgttcatcgaaaactttaagacctcatcgccaaaatatgccgacattctgctgccagacctgatgaccgttgagcaggaagatattattcctaacgactacgccggtaacatgggatatctcattttcctccagcctgtcaccagcgaaaaattcgaacgcaaaccgatttactggatcctgagtgaagtcgcgaaacgtcttggacctgacgtctatcaaaagttcacagaaggtcgcacgcaggaacaatggttacaacatctgtacgccaaaatgcttgccaaagatccggcgttaccgtcttacgacgaactgaaaaaaatgggtatctataagcgtaaagatcccaatggccattttgtcgcctacaaagcatttcgtgacgaccccgaggcaaatccacttaaaacgccttccggtaagattgaaatttattccagcaggctggcggaaattgcccgtacctgggaactggaaaaagatgaagtgataagcccattgccagtttatgcctcaacctttgaaggctggaactcccctgaacgtagaaccttcccactgcaactgtttggtttccattacaaatcccgtactcactcgacctacggcaatattgatctcctgaaggctgcctgccgtcaggaggtgtggatcaaccctatagatgcgcagaaacgtgggattgccaacggcgatatggtgcgggtgtttaaccatcgtggcgaagttcgggctaccagccaaagtaacaccacatcctgtggggacgtggactgccgaaccatcgtaaattcgggtgaacggcgttctttccggaatcggttcccggttgaagcccacgcttcgcccttgggattttgcgtagcccctcgcaggaaaggccttgccactgggacgtttgtacagcaccattctattgtgtgcgggaggcgttgtgatgtctcaatcatggtttacgcagttattgcgttgctgggtgtggcaattggctggctgtttgccagttatcaacatgcgcagcaaaaagccgagcaattagctgaacgtgaagagatggtcgcggagttaagcgcggcaaaacaacaaattacccaaagcgagcactggcgtgcagagtgcgagttactcaataacgaagtgcgcagcctgcaaagtattaacacctctctggaggccgatctgcgtgaagtaaccacgcggatggaagccgcacagcaacatgctgacgataaaattcgccagatgattaacagcgagcagcgcctcagtgagcagtttgaaaacctcgccaaccgtatttttgagcacagcaatcgccgggttgatgagcaaaaccgtcagagtctgaacagcctgttgtcgccgctacgtgaacaactggacggtttccgccgtcaggttcaggacagcttcggtaaagaagcacaagaacgccataccctgacccacgaaattcgcaatctccagcaactcaacgcgcaaatggcccaggaagcgatcaacctgacgcgcgcgctgaaaggcgacaataaaacccagggcaactggggcgagcccaatcctgtgcgcttgcgctttataaaaatccttaccgggaacattcgtaacgttttaaagcactatgatgagacgctcgctgtcgtccgccactgggataacatcgaagttcgcgcaaaagatgaaaaccagcgtctggctattcgcgacgctctgacccgtattccgggagaaaccgtgatgcagacccaggtccttgttgaacatccactaaatgggaaaatgcgtacatggctgcgcattgagtttttgattcagcaactcaccgttaatttacccatcgttgaccacgctggcgcgctgcatttcttccgtaatgtcagtgaattactggatgttttcgagcgcggcgaagtccgcactgagctgttgaaagaacttgaccggcagcaacgtaaactccagacctggattggcgtgcctggcgtggaccagagccgtattgaagcattaattcagcagttaaaagcggcggggagcgtattaatttccgcgccgcgtatcgggcaatttctgcgtgaagatcgtttgattgctctggtgcgtcagcgactgagcatcccaggcggctgttgcagctttgatttacctacattgcacatttggctgcatctaccccaggcgcagcgcgacagccaggtagaaacctggattgccagcctgaacccgctcacccaggcacttaccatggtgctggatttaattcgccagtcggcccccttccgtaaacaaaccagcctgaatggtttttatcaggataacggtggcgatgccgacttgctgcgcctgaatctgtcgctcgattcacagcgtttatccgcaaagtttccggacataagaggccgga

SEQ ID NO: 28862 - DNA, 1757 bp, Homo sapiens
  SIMILAR (789)..(10): 981254mologous to Escherichia coli RhsE protein (fragment),accession number D90785,Smith-Waterman Score=1389.
ttacggtttatagtacagccccgactcctcatcatgctgctgccttgtcagacggtacggctggtgcagctgatgcgggttctcctcattaagctggttgccccattcatcatactccccgcgccacgccgtattgccgtcttcgctgatgagcgccagcggcaggccccggtggtcgcagtggtaaaaatgaacttttcgcgccggtgtgtattccggctccacctgtctggccagttgctccaccgtcagcccgcactgcgcaagccacgcccggctttcactgctcacgcggtctgcccggatttcttcctccagcctgtccagcagccgcaccagttcagccgggaacaccacgccgtggccgttctcactcccttcctgctggagcgtctctgccaggctgcgccgctgcgctttttcccgctcgccgttctctgtctcgacccggatgagcggcgtgaagcttcccggctcgtataccgtctggatacgtgtggtgtcagtctgcaccgtcgtcagcctgtctccgtcccagccataccacgtcacctccggtttacgcgacagcgacatccaccccgtcaggtcacgctcccgccgccagacccgttttgccattcgccgtcccagcgggtcgtagaggtagcggctctcgaccagtggctcgccatgctgtatccgcgtgtagaacaccaggcggtgctggctgtcgtagtggtagtggtgggtccgctcgtcgtccgtccgtatcacacccgccgggatgcggtccgtcttctccgtgaggatcctgctagagtcgacctgcgcatcactcgttcctgttcttgttgctctgtgtgtgatgggtgtgttctgctgtctctctcgtctctgtgtctctgtctttccgtgtgtcttgcgttctgtatcgctcgctcgttgttgtttcttgtcgtctcgtctccgaacccgcgtattgttccctacggcctcgttaaaaaggcttgcacaaggccgttcgagggaccctgttgaatgttgatcggccatcgttttcacggcctgaccagagatagccgctaacgatagcgcacaagtaccaataattccctcggcgcaatacgtgccgtcattgaatcccagtgcacttagctgctgcaaggtttgcggatcgccattacggctgagaatgcaggcggtttcatcgaggataaacagcgcacactctcgcggtgccatatattcccaggcatcttccagcgcagcctgcccgagcgtcagcatcgctttcttacgccgataaatagaagcaaatgtcacgccctgggcctgatgtggtacgttccatgtctcccgtttcatcagcttattgcatcgctcccaggaggttgcaattaagggagatatgccccgaccatcgttgttaaaagcgccactcatatcccgcatcctccagtggttccatgggttgtccataagagaacgcttgggtactattaaattgatgcgcctgggtttcatcgtttcgccagtgctgatgttcacgcagtaacgcttcaagcgccggttctcattctccatcctggaggtgtcctttaacgcgtcctgcgtcatcctcttcgcttcatccagaagcctttccctgaaacaccatcctggtgtgtcctgcagaagtgtcatcatcctgatgttcacttcgttgtctgactccctgtcgacgaagatagaatcgtctttttcgcgaagtcttacaaggcgcttacagacaatgc

SEQ ID NO: 28863 - DNA, 2727 bp, Homo sapiens
  SIMILAR (766)..(1488): 991254mologous to Escherichia coli ferrienterobactin receptor precursor,accession number U82598,Smith-Waterman Score=1265.
  misc_feature (1)...(2727): n = a,t,c or g
atgagtcttaacctggtaagtgaacaattgctagcggcgaacggcctgaaacatcaggacttgttcgcgatcctcggtcaactggccgaacgtcgccttgattatggcgatctctattttcagtcgagctatcacgaatcctgggttttagaagaccgcattattaaagatggttcttacaacatcgatcagggcgttggtgtgcgtgcaatcagcggtgaaaaaaccggatttgcttacgctgaccaaatcagcctgctggcgctggaacagagtgcgcaagcggcgcgcaccatcgtccgtgatagtggtgatggttgccgcgaagcggacaagcgcgtacaggaagtgactgccagcctcagtggtgtctatgaattaattttggttgcggccaccgacggcacgctagcggcggatgtccgtccgctggtgcgtctttccgtgagcgttctcgtcgaagaagatggcaaacgcgaacgcggtgccagtggcggcggcggtcgttttggttatgaattcttccttgccgatctcgacggcgaagtccgtgcggatgcatgggcaaaagaagcagtgcgtatggcgctggtcaatctttctgccgttgctgcaccagcgggcaccatgccggtagtacttggcgcaggttggccgggcgtgctgttgcatgaagcggttggtcacggtctggaaggcgacttcaaccgccgtggcacttcagtatttagtggatcaaaggttttcgcgttagcgggatgcgtcgtgttgatgacgaccatgcccgacagttgcaattcgtggcaaaaatgcaggaataaaacaatgaacaagaagattcattccctggccttgttggtcaatctggggatttatggggtagcgcaggcacaagagccgaccgatactcctgtttcacatgacgatactattgtcgttaccgccgccgagcagaacttacaggcgcctggcgtttcgaccatcaccgcagatgaaatccgcaaaaacccggttgcccgcgatgtgtcgaagatcatccgtaccatgccaggcgttaacctgaccggtaactccaccagtggtcagcgtgggaataaccgacagattgatattcgcggtatgggtccggaaaacacgctgattttgattgacggcaagccggtaagcagccgtaactcggtgcgtcagggctggcgtggcgagcgcgatacccgtggtgatacttcctgggtgccacctgaaatgattgaacgtattgaagttctgcgtggtccggcnagtgcgcgttatggcaacggcgcggcgggcggcgtggttaacatcattaccaaaaaaggcagcggcgagtggcacggctcctgggacgcatatttcaatgcgccagaacataaagaggaaggtgccaccaaacgcactaactttagcctgaccggtccgctgggcgacgaattcagcttccgtttgtatggcaacctcgacaaaacccaggtgacgcgtgggatatcaaccagggccatcagtccgcgcgtgccggaacgtatgccacgacgttaccagccggcgcgaaggggtaatcaattcttccatattcatactaagatcctcggaaaatggacgatatttgcgcattacctggcacaggtccgggacaaaatctcagcggctgcaaagcgttgcggccgttctccagaagaaattacgctgcttgcagtcagtaaaacaaaacctgcgagcgccatcgcagaagccattgatgccgggcagcgtcaatttgagcatttcgactggtgtcataccatcgaccgtttgcgcatcgctacccgtctcaacgaccagcgcccggcagaacttccccctcttaacgttctgattcaaattaacattagtgatgaaaacagtaagtccgggattcaactggctgaactggacgagctggcagctgcggtcgctgaactaccgcgtttacgtctgcgcgggttgatggcaatccctgcgcctgagtcagaatatgtaaggcagtttgaagttgcacgccaaatggctgtagcatttgccggactgaaaacgcgctacccgcatatcgacacgctctctctgggaatgtcggacgatatggaagccgccattgcggcaggtagcacgatgtttgtagtgaaggtaacgcagccaattatcgggccactgcgccgcgttattccggcaatggggccaattgacagcgcctcgctgctggttgcctatattctcagttttatcaaagccatcgtgctgtttaaagtggtgaccttcctgccaatcatctggattgccggtttactgattctgctgaaaaccatcggcctgctgattttctgggtcctgctggtgatggcgattatgagctggtgcaagacagaattaattatctttcgcgatcttccggcgctcggtaaactgttcagccagtcgccgccggtcgcgctggatcaacgcttctttggtgacttcattctcgaagccagcgccaaatatgctgatgttgcgctgatatatggcctggaagacgggcgagaatatcgtgataagcagcaaacgctgggtgaaattgtccagcagttgttaggcgcggcaccggttgtcggtgaccaggtagagtttgccgggatgatctggacggtggccgagaaagaagataatgaagtgttgaagattggcgtacgggtggctgaagaggaagctgaatcttaa

SEQ ID NO: 28864 - DNA, 2253 bp, Homo sapiens
  SIMILAR (7)..(633): 1001254mologous to Escherichia coli glycogen debranching enzyme,accession number J01616,Smith-Waterman Score=1134.
atggccccctggcaacccgccgaggggcatcgctttaacccggcgaagttgttgattgatccttgcgcgcggcaaattgacggggagtttaaagataacccgctgctgcacgccggtcataatgaacctgactatcgcgacaacgccgccattgcgccgaaatgcgtagtggtggttgatcactatgactgggaagatgatgccccgccgcgcacgccgtggggcagcaccatcatttatgaagcccatgtcaaaggattaacgtacttgcacccggagatcccggtcgagatccgtggcacttataaagccctcgggcatccggtgatgatcaactatttgaaacaattgggcattaccgcgctggaactgctgccagtggcgcagtttgccagtgaaccacgtctgcaacgcatggggctaagtaactactggggttacaacccggtggcgatgtttgcgctgcatccggcgtatgcctgctcgccagaaacggcgctggatgagtttcgcgatgcaatcaaagcactgcataaagcgggtatcgaagtcattcttgatatcgtgctcaaccatagtgcggaactggacctcgacggcccgttattctcgctgcgtgggatcgataaccgtattgatgttgatatttgtcgtggtgttgccgctgctgtatttggtgacgacacgaaagtgaaatataccccgctcactgcaaaagaacgcttcaccgctttacagtcaggggaggtggatttgctctcccgtaatacgacctggacttcatctcgcgatgccgggatgggaatggcatttaccggcgtcacttattacgacggcattggcttcctgacgcacgataaagcggggctaaaaagcgcgaaagaactggatggcgctaccgtctgtattcaggcgggtactgataccgaactcaacgtcgccgactacttcaaggcaaacaatatgaagtacacaccggtgactttcgatcgctctgacgaatcagcgaaggcactggaatctggtcgctgcgatacgctggcctcggatcaatcacaactgtatgccctgcgcatcaaattaagcaacccagctgaatggattgtcttaccggaagttatctcaaaagaaccgcttggtccggtagttcgtcgtggcgatgatgaatggttctcgattgcctacaaacggaacataaccgtaggtcggataaggcgtttacgccgcatccggcagccgttgcctgatgcgacgctgtgcgtcttatcaggcctacaaacggaacataaccgtagcctgctggcgctggaacagagtgcgcaagcggcgcgcaccatcgtccgtgatagtggtgatggtaaagtacagacgctgggcgcggtagagcatagcccgttgtatacctcggtagatccgctgcaaagcatgagccgtgaagagaagctggatatcctgcgtcgcgtcgataaggttgcccgcgaagcggacaagcgcgtacaggaagtgactgccagcctcagtggtgtctatgaattaattttggttgcggccaccgacggcacgctagcggcggatgtccgtccgctggtgcgtctttccgtgagcgttctcgtcgaagaagatggcaaacgcgaacgcggtgccagtggcggcggcggtcgttttggttatgaattcttccttgccgatctcgacggcgaagtccgtgcggatgcatgggcaaaagaagcagtgcgtatggcgctggtcaatctttctgccgttgctgcaccagcgggcaccatgccggtagtacttggcgcaggttggccgggcgtgctgttgcatgaagcggttggtcacggtctggaaggcgacttcaaccgccgtggcacttcagtatttagtggacaggtcggggagctggtggcttcagaactgtgtaccgtggttgatgatggcacgatggtcgatcggcgaagatcgggggggatggagagaaagtaccccagcagtaaagtgctgatgttttttttaaaggagtctcgctctgtcatcagcctggagtgcagtggcaggataaaggtggtaccgagctcgattgtaatcatgtcatataagtggcagagcaagaaaccaaacccaacactatccactttcaatgctgttaccgtccagctgtggccccagctcaaatcaccactaagaaaacagttttatttcagcaaacagcaaaaatacattgggaagaacgccggcctagttcccaagtag

SEQ ID NO: 28865 - DNA, 2853 bp, Homo sapiens
  SIMILAR (424)..(1059): 991254mologous to Escherichia coli trimethylamine-N-oxide reductase,accession number X73888,Smith-Waterman Score=1155.
atgctgcaaggtgatttgcgcctgcttaacattggtcagagcattactttcggtgacttcaaaaataagttgccacgcttcaatctgatatttagccagcaactgactgacttcaacaggaaaacgagcctgacataccgaggttggagacagattaatagcaaacgcgtatgctcaatgacccacatgtcgatactcgacgataaaccaaattcgtgcgcgaccgacaagaaggtatcggggctgactcagttcatcatctcacgttggaccgccagcagtgctgctaataaaaagatacccacccaaatttcattttttttcgtttgcatgaactcaattcccaaacatcaatgcggtcagcacaaaatccagccccagaacagccagagacgagtggacaacgcggcggcagttttaccgatcaaccgcattattgaaggcttgcgcaagctggaaacggttatcgccatagataaccagtggacctcaacctgccgctttgccgatatcgtactgcctgcgaccacgcagtttgagcgtaacgatctcgaccagtacggcaatcactccaaccgtggcattatcgccatgaaacaggtggtgccgccgcagttcgaggcgcgcaacgacttcgatattttccgcgagctgtgccgtcgctttaatcgcgaagaagcctttaccgaagggctggacgaaatgggctggctgaaacgcatctggcaggaaggtgtacagcaaggcaaaggacgcggcgttcatctgccagcgtttgatgacttctggaataacaaagagtacgtcgagtttgaccatccgcagatgtttgttcgccaccaggcattccgcgaagatccggatctcgaaccgctgggcacgccgagtggcctgattgagatctactcgaaaactatcgccgatatgaactacgacgattgtcaggggcatccgatgtggtttgagaaaatcgaacgctcccacggtgggcctggctcgcaaaagtatccgttgcatctgcaatctgtgcatccggatttccgacttcactcgcagttatccttcgagcagtgcgcgggcttcttgcgcattaaccacggtgataacccgctggacgcgtctaccgttcacccggaagcctatccggtggtggaacgcattctggcagcaacacagcaggcactgaaagatctgatgggtaacagcagcgaactgcgtaacctgaaagcgtctgactttactgatgagaaattcggtgtgccgacggtaaccgacatcatcaaagagctggaaaaaccgggtcgcgatccgcgtccggaatttaaaaccgctcagtttgccgatggcgtcgagacaatgaacgacctgcaaccgggtatgatcctcgaaggcgcagtgaccaacgtcaccaactttggcgcgtttgtcgatattggcgtgcatcaggacggcctggcagaactgattaaagatgtttacggcattgatgacgcactgcgcgcgattgccggtgacagcgtttcaggcctcggaactggcggcatcaaccgtcacgttcgggcgcgcttcataaatcacgccaataacccccagcggtacgcgacgacgctcaacttgagtcatctttcagaggaattaagcaacctcccctatgccacacagctgagaaggaaagggatggatgaacctatggatttaaccgtgaccgcgcgcgctgtcgacgaatttggcgcgttgctgatcatcgatgaagtgatgaccggtttccgcgtagcgctagctggcgcacaggattattacggcgtagtgccagatttaacctgcctcggcaaaatcatcggcggtggaatgccggtaggcgcattcggtggtcgtcgtgatgtaatggatgcgctggccccgacgggtccggtctatcaggcgggtacgctttccggtaacccgattgcgatggcagcgggtttcgcctgtctgaatgaagtcgcgcagccgggcgttcacgaaacgctggatgagctgacaacacgtctggcagaaggtctgctggaagcggcagaagaagccggaattccgctggtcgttaaccacgttggcggcatgttcggtattttctttaccgacgccgagtccgtgacgtgctatcaggatgtgatggcctgtgacgtggaacgctttaagcgtttcttccatatgatgctggacgaaggtgtttacctggcaccgtcagcgtttgaagcgggctttatgtccgtggcgcacagcatggaagatatcaataacaccatcgatgctgcacgtcgggtggtttactgctggtgttcgctgactgatcccggcggggctgctgtcaacctttatcggcgcgccatattttatctatttgttgagaaagcagagccgttaatttttccatataacggccactgtacgcctggacggataaagcgtttacgcgacaacggatgcccgatgcgacgctggcgcgtcttatcgggcctacaaacggccccgaatcgtaggtcggataaggcgttcacgccgcatccgacaaaccatgctggatcacaacttcgcaaacacccgacgtgcagcatcgatggtgttattgatatcttccatgctatgatcgcgggtggcacaacgcacaccgcagcgcgcctctttatcactgacatcaacctcttttgcccactgtgcctgcgggaaacaatcaatcaaccgctggcgattctgctgctgatcgtcctcactgtacgccgtatcttcgctgccgcgatgataactggcaccaatacaatgatgttgattcgccggattttgtggcgtgagatcagcaagcaacacacagcgtag

SEQ ID NO: 28866 - DNA, 1434 bp, Homo sapiens; identical to SEQ ID NO: 1457
  SIMILAR (325)..(1182): 701254mologous to Escherichia coli Anaerobic dimethyl sulfoxide reductase chain A precursor (EC 1.-.-.-) (DMSO reductase),accession number D90801,Smith-Waterman Score=1016.

SEQ ID NO: 28867 - DNA, 918 bp, Homo sapiens; identical to SEQ ID NO: 22461
  SIMILAR (229)..(504): 951254mologous to Escherichia coli glutamate-1-semialdehyde 2,1-aminomutase,accession number X53696,Smith-Waterman Score=455.

SEQ ID NO: 28868 - DNA, 1617 bp, Homo sapiens
  SIMILAR (139)..(867): 971254mologous to Escherichia coli Anaerobic dimethyl sulfoxide reductase chain A precursor (EC 1.-.-.-) (DMSO reductase),accession number D90801,Smith-Waterman Score=1264.
atggtcactataaagccttatattcttggtgaaggtgacgatgaaacagcgaagaacgccgcagtgggcttcgcaaaagaaccggtagcccggaggaccgtatcatcaaactggcgctctggatcagagtgtctatatgatcatggtccgcaaatgacggcaatccgcgacggcgtccgcggcaaagataaactggatgtgcccattaagttcatctggaactacgcgggaaataccctcgttaatcagcattctgacatcaacaaaacgcatgaaattctgcaggacgaatcgaaatgcgaaatgattgtggtcatcgaaaactttatgacctcatcggcaaaatatgccgacattctgctgccagacctgatgaccgttgagcaggaagatattattcctaacgactacgccggtaacatgggatatctcattttcctccagcctgtcaccagcgaaaaattcgaacgcaaaccgatttactggatcctgagtgaagtcgcgaaacgtcttggacctgacgtctatcaaaagttcacagaaggtcgcacgcaggaacaatggttacaacatctgtacgccaaaatgcttgccaaagatccggcgttaccgtcttacgacgaactgaaaaaaatgggtatctataagcgtaaagatcccaatggccattttgtcgcctacaaagcatttcgtgacgaccccgaggcaaatccacttaaaacgccttccggtaagattgaaatgtattccagcaggctggcggaaattgcccgtacctgggaactggacaaagatgaagtgataagcccattgccagtttatgcctcaacctttgaaggtctggactcccctgaacgtaaaaccttccactggcactggttggttccattacaaattccgaatcatcaacttacggcatatgatctcctgaaggggaccaaaaaaatttcttcccccgaatggggcacggggctcacagaacacggacggtcaaccacacatcaaaggccgaagatgagcacacacgcacacacaaactctcgggagaaaacagcagagagaacaaccgaccgcactactgccaggcggcggctgaacagaaaccagccctttcaagagtccaccactgatatcaaccaaccagctgacactgcccctccttttctgcctgataagagaccaccaaccacagaacgattctggttagtctatggagaatgtgcagtaagggtgtcctttgcttcaccttttgacatagaagaactgaaaatgccacccttagatgatgctaatgcagccacttttgtacatgggacccacgaaggagcattgaactccattgcctggggcttagattgcgtctcgctccgcgcccttgtttgggtggtgtgcgggccgataggtatccttccgggatttaattccgatagaggaaatagccggacctctgacttccaggaatatgccaagttcagagtctccacaggtttttctcagggacagggtgtacaggaaaggggctcgttaagccatgcccaagggggagccttcagtcagagggcctgcccagcagagccagtggaaagagctggtttctggtccctggaacctggttaa

SEQ ID NO: 28869 - DNA, 2504 bp, Homo sapiens
  SIMILAR (1919)..(1776): 641254mologous to Escherichia coli ferrichrome-iron transport protein FhuB,accession number U70214,Smith-Waterman Score=133.
  misc_feature (1)...(2504): n = a,t,c or g
gagttacttgcgcaacttggcgtgacctttgaacgtattgttacgggcattgaggagcagcgtcagccgcaggagagcgcgcagcagtatgttgtgcgtctggcgcgcgagaaagcacgggcaggtgtcgcgcaaacggcgaaggatctcccggtgctgggtgcggatactatcgttatcctgaacggagaagtgctggagaaaccgcgcgacgcagagcatgcggcgcagatgttgcgcaaattatcgggtcagacccatcaggtgatgacagcagtggcgttggccgacagccagcacattctcgattgcctggtggtcaccgatgtgactttcagaacgttaacagacgaagacatcgcgggctatgtcgccagcgatgaacagacacttttggcgaaggggttctatattgactccattcgcagccaccgccgtggattaaagccgagcgttatgcacaccgacgacacgctggtggatggcctgaagccggatatccccatgaaagagtcggtaaatctggtacgtcgcgacctgaatatggaagcggttgtcgcaccagagatttctccgacggtgggcgtggctgcggctttcgcggttaaccccattgttggcgcggcagtgtttgccgccagtaaagtgctggggccgctgtggagcaaagtctccattgtgcgctatcacatttcgggtccgctggacgatccgcaaatcaacgaagtgttgcgccaaccgcaatccggcagccgttgcctgatgcgacgctggcgcgtctttatcaggcctacaaacggaacataaccgtaggtcggataaggcgtttacgccgcatccggcatctcaatatcagatcttacatgcgccgctttcgcagccatccaactgctgcatcggcactttctgacgggaagcgtgacggatggcagcagctgatgccgcgtgtcgctctagaggatccattcggcaggtggaaatcgaagctgatggagcgcccgattgtggtcgcgaatggcaaagcgcggataggtcgtccaccggagcagggcagaaggtttacagttggagcccgagaagcgtgtcgatctagaggatccccgacgaaggtgtttacctggcaccgtcagcgtttgaagcgggctttatgtccgtggcgcacagcatggaagatatcaataacaccatcgatgctgcacgtcgggtgtttgcgaagttgtgatccagcatggtttgtcggatgcggcgtgaacgccttatccgacctacgattcggggccgtttgtaggcccgataagacgcgccagcgtcgcatcgggcatccgttgtcgcgtaaacgctttatccgtccaggcataaaatatggcgcgccgataaaggttgacagcagccccgccgggatctggaatggaaacagcaccatccgcccacaccagtcagcgaacaccagcagtaaaccacccaccagcgccgaaattacgatgtgtggcatcgtccgtcgaaagcccatcatccgcgcaatatgcggtgccattaaaccaacaaaactcaacggtccaatagtcatcgtcgcggtcgccgtcaggcaagccgctaacagcagcagcgcaattcgcgtcggcgtcagcgccattcctacggctcgggcggtatcaccacccagcggtaaaatggtcagccagccggcggcaacaagcgggggtaaatcgcccaaggcaaaaattccacccaatccaacaaattcccggtgcgccagacctgcgcatcggtcgcgtngtcgaaccggaaatccaggtcagcacttgcgccattcgcgggtcaccacttgcctgcaacatcatcaaaagcatgtgaacgcgtgcttaagcaaaatcaacagacaacagacgacccgcgaatgccggggaaaacgcagccttaaaataggccggatgcggcgtaaacgccttatccggcatacgattttattcggcctggctccccgtaggccggataagaacacatctattgttgttgttggtggtggtggtggttatgtaggcttgctgggcgaggatatcggcggcggtgatccagcgcagcgggatgcccggtgtgcgcgtatgcgggcggataaaaagctgctcgaaggcggtacgctgtcagcggcatgtctttgcaacatgtgtctggaacggacgtcaagtcacgtccggcgcaggaacgtggtcaacaatcgcctggtacagcggggtcatgtcttccgccatatcttcgtggtccagacccgcgataccgttcagcgcagaagcgtaaacgatcgggaagtccagctgctcgtcggtcgcgtcgaggttaacgaacagatcgaatacctgatccacaacccaatcaggacgcgcgccagggcggtcaactttgttgataacaacaatcggcttcaggccgtaagcaaacgcttttttggttacgaagcgcgtttgcggcatcgggccgtcaaatgcgtcaaccaccagcagcactga

SEQ ID NO: 28870 - DNA, 1602 bp, Homo sapiens
  SIMILAR (286)..(1461): 971254mologous to Escherichia coli RhsE protein (fragment),accession number D90785,Smith-Waterman Score=2062.
atgaatcaaatagacgcaataaaaaatgataaaggggatgtcaccgccgatcccacagaaatacgaactaccatcagagaatactacaaacacctctacgcaaataaactagaaaatctagaagaaatggataaattcctggacacatacactctcccaagattaaaccaggaagaagttgaatctctaaatagaccaataacaggagctgaaattgtggcaataatcaatagcttaccaaccggacagagtccaggaccagatggattcacagccgaattgggtaccgagctagaccataccagtgaaggccaccgcgtgtcggtccactacggctatgacgataaaggccgcctgaccggcgaacgccagacggtggagaacccggagacgggggaactgctgtggcaccatgagaccggacatgcgtacaacgaacaggggctggcaaaccgcgtcacgccggacagtctgccgccggtggagtggctgacctacggcagcggctatcttgcgggcatgaagctgggcgggacgccgctgctggagttcacgcgcgaccgcctgcaccgtgagacggtgcgcagcttcggcagcatggcaggcagtaatgccgcatataaactgaccagcacatacacccccgcaggccacgttacagagccagcacacttgaacagcctggtgtatgaccgtgactacgggtggaatgacaacggcgacctggtgcgcatcagcggcccgcgacagacgcgggaatacggctacagcgccacgggcaggatggagagtgtgcgcaccctcgcaccagacctggacatccgcatcccgtatgccacggacccggcgggcaaccggctgccggacccggagctgcacccggacagtacactcacagtgtggccggataaccgcatcgcggaggatgcgcactatgtctaccgccacgatgaatacggcaggctgacggagaagacggaccgcatcccggcgggtgtgatacggacggacgacgagcggacccaccactaccactacgacagccagcaccgcctggtgttctacacgcggatacagcatggcgagccactggtcgagagccgctacctctacgacccgctgggacggcgaatggcaaaacgggtctggcggcgggagcgtgacctgacggggtggatgtcgctgtcgcgtaaaccggaggtgacgtggtatggctgggacggagacaggctgacgacggtgcagactgacaccacacgtatccagacggtatacgagccgggaagcttcacgccgctcatccgggtcgagacagagaacggcgagcgggaaaaagcgcagcggcgcagcctggcagagacgctccagcaggaagggagtgagaacggccacggcgtggtgttcccggctgaactggtgcggctgctggacaggctggaggaagaaatccgggcagaccgcagcccacattccacaatccgcgctaccttccaatatacacccatcatcgcgttcggattgctccacatccacagaagtgcacgcggacgtgctctctacaagaaccaatgccgtggcctgatgcgcccattaagcgcgggg

SEQ ID NO: 28871 - DNA, 3794 bp, Homo sapiens
  SIMILAR (1971)..(2513): 971254mologous to Escherichia coli Anaerobic dimethyl sulfoxide reductase chain A precursor (EC 1.-.-.-) (DMSO reductase),accession number D90801,Smith-Waterman Score=943.
ctgtacttcagcagggccgcctgggggatctggtagttggtcatgggctttctgaaggagtagatcttctggagaataaactcccggatcttcgtcactgcatttcgggtccgctggacgatccgcaaatcaacgaatgtttgcgccaaccgcgtaaagaaaaagcgcaatgatttgacgagggcgcgtaattgccccaatctcataggataatcgttgccaaaggccaacgagccagaacataaccgtaggtcggatagggcgttcacgccgcatccggcagccgttgcctgatgcgacgctgtgctgtcttatcaggcctacaaacggaacataaccggaggtcggataaggcgtttacgccgcatccggcagccgttgcctgatgcgatgctgtgcgttttatcaggcctacaaacggaacattaccgtaggtctgataaggcgtttacgccgcattcgacagccgttgcctgatgcgacgctgtgcgtcttatcaggcctacataccggaacataaccgtaggctgaacggcctgaaacatcaggacttgttcgcgatcctcggtcaactggccgaacgtcgccttgattatggcgatctctattttcagtcgagctatcacgaatcctgggttttagaagaccgcattattaaagatggttcttacaacatcgatcagggcgtaggtgtgcgtgcaatcagcggtgaaaaaaccggatttgcttacgctgaccaaatcagcctgctggcgctggaacagagtgcgcaaacggcgcgcaccatcgtccgtgatagtggtgatggcatggttgtcggatgcggcgtgaacgccttatccgacctacgattcggggccgttgtaggcccgataagacgcgccagcgtcgcatcgggcatccgttgtcgcataaaatatggcgcgccgataaaggttgacagcagccccgccgggatctggaatggaaacagcaccatccgcccacaccagtcagcgaacaccagcagtaaaccacccaccagcgccgaaattacgatgtgtggcatcgtccgtcgaaagcccatcatccgcgcaatatgcggtgccattaaaccaacaaaactcaacggtccaatagtcatcgtcgcggtcgccgtcaggcaagccgctaacagcagcagcgcaattcgcgtcggcgtcagcgccattcctacggctcgggcggtatcaccacccagcggtaaaatggtcagccagcggcggcacagcgggcctgtccagcagccgcaccagttcagccgggaacaccacgccgtggccgttctcactcccttcctgctggagcgtctctgccaggctgcgccgctgcgctttttcccgctcgccgttctctgtctcgacccggatgagcggcgtgaagcttcccggctcgtataccgtctggatacgtgtggtgtcagtctgcaccgtcgtcagcctgtctccgtcccagccataccacgtcacctccggtttacgcgacagcgacatccaccccgtcaggtcacgctcccgccgccagacccgttttgccattcgccgtcccagcgggtcgtagaggtagcggctctcgaccagtggctcgccatgctgtatccgcgtgtagaacaccaggcggtgctggctgtcgtagtggtagtggtgggtccgctcgtcgtccgtccgtatcacacccgccgggatgcggtccgtcttctccgtcagcctgccgtattcatcgtggcggtagacatagtgcgcatcctccgggatgcgggttatccggccaactgtgagtgtttcggcccgctacgcgtccggcaccgttgcccccgggtccgcgcttacggattcgattccactctgtgccggttgcccccttctcgcggccgggccttacgtttccgtttttggcgctttacccatgacgttataacccgaagaggaaaacgaggaggggctataaccgggggttgtgacatagtacagatgttcacagaaggtcgcacgcaggaacaatggttacaacatctgtacgccaaaaggcttgccaaagatccggcgttaccgtcttacgacgaactgaaaaaaatgggtatctataagcgtaaagatcccaatggccattttgtcgcctacaaagcatttcgtgacgaccccgaggcaaatccacttaaaacgccttccggtaagattgaaatttattccagcaggctggcggaaattgcccgtacctgggaactggaaaaagatgaagtgataagcccattgccagtttatgcctcaacctttgaaggctggaactcccctgaacgtagaaccttcccactgcaactgtttggtttccattacaaatcccgtactcactcgacctacggcaatattgatctcctgaaggctgcctgccgtcaggaggtgtggatcaaccctatagatgcgcagaaacgtgggattgccaacggcgatatggtgcgggtgtttaaccatcgtggcgaagttcggctaccagccaaagccaatatgtctggcgataaaatcgaccatggcggctgtgtgaatacgctcaacactctgtgggcctttaacattggggaagggaacccgcagcaactatcggtccagatcggaaaatataccacgacacgtattcgggtgacctcggcgaagccacatggcacgcggaacctcccgagggccagaaggaacacagaactgaaactcgctggatgccgcagagacacgacggatacaggcggggaccgaaacaggggacccagcaccggactgcaaccgggcgaggcaactgagtccaaaaatcggagatatagagttgtcacggccgtacacgacacgcagcacccgcccaccagcccccccctccccgcaccggctcgcaacccccctcaccgcgtgaaacttaaactactacacgtccagcagcagacgcgtcggatcttccagcaactctttgatcgttaccaggaagcccacggattcgcgaccatcgatcagacggtgatcgtaggacagcgccaggtacatcatcggcaggatctcaacctgaccattcaccgccatcggacgatctttgatagcgtggatacccagaattgggctcttgggcgggttgataatcgggttaacattcggggaaccggaacacccccgtgcacgaagccacaaaggaggcgggagctgacgcagacgccgacgacagagactgagccagaacagggaaaacgcgaacaccgaggagaccgagggagggcagaggaagcagacaaggcgagagccgacgaccagcggcgaggcgggaggcgggagagaagcggcgagaccgagaacaagaccgagcagagggagaggaagaaacggcgaaaccacgcgcggggaggcagaccacccaaggacagacggcgagagaaagagagagacggcagagcaaccgctcgaacagcggcgcgcggggcgggaaccggaacaggaagagagagaacaaaaacggaacgcagagcaagcgaggaaggatgcaagagagagggaaggaggaagacgaacaggaacggggaggagacgagacaagcgcgagcaagaacaggacaaaaaagagaaggacgaagcacagggggagtagagacagcgacggaagaagacgaggagaaagagaagcagagacgagagagagacgccacgcaaggaagcgggacaaggcgtagcgaagacaacgcagcaagcaacacgaacaggcaagcggagcgaaaggagaaggagacagcagaggaacggacgagatga

SEQ ID NO: 28872 - DNA, 1182 bp, Homo sapiens
  SIMILAR (438)..(10): 991254mologous to Escherichia coli D-mannonate oxidoreductase (EC 1.1.1.57) (Fructuronate reductase),accession number D90849,Smith-Waterman Score=746.
ctaagacgtgactcgtaatgccagcaacgaccagtccgtttcgcgcccttgatgtatgcgaatacctgccagcatgcgttgcggtaatttctggctgccatccatcgcgatttgccaggtcttatgtttcagcgccggattagcaaaacgtgcaattaacttatccgcatattgtgttaaatcgacatctttaatttgcagtgtcggcgcttgctcatccagcattaatgttctggcggcatggcgaaatgcgcgatcctgcatgcaatcactgatatgggcgaatcctgagaggtaacccagataagcgagaaaagagtggctgccattaagcatccgcagtttcatctcttcccatggcaggacatcattcaccatttgtacacctgcgacttcccaggcaggacgcccagcgacgaagttatcttccaccacccacgtcggaacccgtgaagaaagccagcgcgtcattgacgccttacgtgcggagcaagtttgatgagtcagaagtatctttttatcgatcgcgatggaaccctgattagcgaaccgccgagtgattttcaggtggaccgttttgataaactcgcctttgaaccgggcgtgatcccggaactgctgaagctgcaaaaagcgggctacaagctggtgatgatcactaatcaggatggtcttggaacacaaagtttcccacaggcggatttcgatggcccgcacaacctggtaccgagctagaatcgtctcaaccgagctaaggtgtatcaaaaatcccaaaggaaccgtgacgacaaagcccagtacgctcacagccaatgacgttgtaccagtacgggtgtagcacattaaacgccggctgcgcaataaattaatttcagggagaatgccggcggtaatgcgcttgccagtgcttatcatctgcagatgttcgctgttcaaatgacatgccataccaacgagaagcagtgccagtggcatcagaatcagcttcaggaaggtgttataagcaatttcggcactgaactcgaatttatgtgcagccagagtcaaccccgcagcgaataccgctacccctgagttagccttcgcaatcagattaaaggttgggtcccatgctgccggaatttttaccccaaccaacaccaggatcgttgccagaacaggtgcccatactactggctccat

SEQ ID NO: 28873 - DNA, 2163 bp, Homo sapiens
  SIMILAR (1890)..(952): 1001254mologous to Plasmid R100 transposase of Tn10,accession number AP000342,Smith-Waterman Score=1636.
ttaaaacgccacgatctttgcagggcgattggtgaactgatcacctttgaggtgaaagatgtcgcgcaactgaccaatccgctgccgaaagggccgtacggcacagtgttgagcaacccgccatacggggaacgtctggacagcgaaccggcgctgattgcgctgcatagcctgctgggtcggatcatgcacaaacaagttggtggctgggaatctacatgatacattcagctcggtaccaatcccctggttacccgagccggagttactcatagccggaagcgtagcgccgcccatacgcgcatcggatgccgcgctggtacgaatcacaatggatgaagagagatctttcgccagcaaaccgcgctcgcactgtttttccagcgtcgcgccaatatgcagcccccacttaccgctcaaaccttcctgcgataacgcacaatttagcttcgcggaatcgagaataaagcggatcgccgcaaacgggacttcattgacgaacttcaggatctcagccagcgtcgttctggaaagcaccgtcagcggagactcttgctcgccctctgccacacacgcctgctgggtaaacaccacaccatcgtgcgtctcgatatgcacaatgttggtatgcccgccgacgatggtgacacacgcccacttctcaccgttccagactttggcgcgtgagaagaggatttcatcgcaaggttcctggatcttaacggagactttccccgccgccagcagtgcttccagttctggcggagcaaccgccgccgccagcgccatgaaatcgttttgaggaagaataaagatgttcggaaaattatcacttgatgcagtcccgttccatgaaccgcctgcgtgcgctttacgcccagtaattccgattaacgcttgcaccctccgtattaccgcggctgctggcacggagttagccggtgcttcttcatgtgtgaatagattttgagtaagcagggttgcagccacgagtgagtcttcccttgttattgtgtagccagaatgccgcaaaacttccatgcctaagcgaactgttgagagtacgtttcgatttctgactgtgttagcctggaagtgcttgtcccaaccttgtttctgagcatgaacgcccgcaagccaacatgttagttgaagcatcagggcgattagcagcatgatatcaaaacgctctgagctgctcgttcggctatggcgtaggcctagtccgtaggcaggacttttcaagtctcggaaggtttcttcaatctgcattcgcttcgaatagatattaacaagttgtttgggtgttcgaatttcaacaggtaagttagttgctagaatccatggctcctttgccgacgctgagtagattttaggtgacgggtggtgacaatgagtccgtgtcgagcgctgattttttcggcctttagagcgagatttatacaatagaatttggcatgagattggattgcttttagtcagcctcttatagcctaaagtctttgagtgactagatgacatatcatgtaagttgctgataggtttccagttttccgctcctaggtctgcatattgtacttttcctcttactcgacttaaccagtaccaacccagcttctcaacggatttataccatggcactttaaagccagcatcactgacaatgagcggtgtggtgttactcggtagaatgctcgcaaggtcggctagaaattggtcatgagctttctttgaacattgctctgaaagcgggaacgctttctcataaagagtaacagaacgaccgtgtagtgcgactgaagctcgcaataccataagccgtttttgctcacggatatcagaccagtcaacaagtacaatgggcatcgtattgcccgaacagataaagctcttcacacctggaggaaggggaccgggcagggggtgggaccacgatattcccagagggaaaagcaaaagctgaggggaaggagaggagggtccaggagatggaaactcaggtcccctagaccaacgagccggctgtctagttgctcgctgaatcttttcatgattgtgttcttcatggctcgattcaccgaaaaggcggatttccgtctggcagcttgaacccattctcaaggtcttatagtctcccaagcccaacttgtccccgctgcccat

SEQ ID NO: 28874 - DNA, 2453 bp, Homo sapiens
  SIMILAR (880)..(1710): 881254mologous to Escherichia coli K12 imidazoleglycerolphosphate dehydratase and histidinol-phosphate phosphatase,accession number AE000293,Smith-Waterman Score=1265.
atgggtcaggaaaagctatacatcgaaaaagagctcagttggttatcgttcaatgaacgcgtgcttcaggaagcggcggacaaatctaacccgctgattgaaaggatgcgtttcctggggatctattccaataaccttgatgagttctataaagtccgcttcgctgaactgaagcgacgcatcattattagcgaagaacaaggctccaactctcattcccgccatttactgggcaaaattcagtcccgggtgctgaaagccgatcaggaattcgacggcctctacaacgagctattgctggagatggcgcgcaaccagatcttcctgattaatgaacgccagctctccgtcaatcaacacctgaccagctgcctgatcaaaccgccgttaacttcggtgcattgcccgtatatttttcgatatacaccaacgctgagttaccggcacaggcatttgccagctgcgagctggggatatccgccgttaacacccattttccagatctggccatgcaccttcatgcacgcataccacgccttttttgatcccgtcagtcaccaccgcgcctgtcaaaatctgaccacgtttgttccagacacgcaccagatcgccattcgcaataccaaagcgtgcagcatcttcgaacgcgaatacctgatggccgcactggaaagagatcccctgcgtagagcagttttcgactctgaaaccaactacattctggcgcgctttaaagcctccagtgcggtgtttaaatctttgtgggatcagggcattatcttacgtgatcagaataaacgaccctctttaagcggctgcctgcgaattaccgtcggaacccgtgaagaaagccagcgcgtcattgacgccttaccaagtttgatgagtcagaagtatctttttatcgatcgcgatggaaccctgattagcgaaccgccgagtgattttcaggtggaccgttttgataaactcgcctttgaaccgggcgtgatcccggaactgctgaagctgcaaaaagcgggctacaagctggtgatgatcactaatcaggatggtcttggaacacaaagtttcccacaggcggatttcgatggcccgcacaacctgatgatgcagatcttcacctcgcaaggcgtacagtttgatgaagtgctgatttgtccgcacctgcccgccgatgagtgcgactgccgtaagccgaaagtaaaactggtggaacgttatctggctgagcaagcgatggatcgcgctaacagttatgtgattggcgatcgcgcgaccgacattcaactggcggaaaacatgggcattactggtttacgctacgaccgcgaaaccctgaactggccaatgattggcgagcaactcaccagacgtgaccgttacgctcacgtagtgcgtaataccaaagagacgcagattgacgttcaggtgtggctggatcgtgaaggtggcagcaagattaacaccggcgttggcttctttgatcatatgctggatcagatcgctacccacggcggtttccgcatggaaatcaacgtcaaaggcgacctctatatcgacgatcaccacaccgtcgaagataccggcctggaatcagctcggtacctaaattgcgctcaaatgcgaaagcatcagcgcacgcgccagccgttcatcatcgccgaagtgttctgctaccaccaccacaggcattgttgcggtttggaccggaaactttcaaggatctcaagccagcgtcgttctggaaagcaccgtcagcggagactcttgctcgccctctgccacacacgcctgctgggtaaacaccacaccatcgtgcgtctcgatatgcacaatgttggtatgcccgccgacgatggtgacacacgcccacttctcaccgttccagactttggcgccggtgatatcgcacagtcgcgggaaatgctcgaaccggcgcataaagggcttccggacgatccggcactgatccgacaactggcctacgtgaaccagcgtctggatgacatgcctgcgacgcagcactacgcccggctggtgattgatgacattgataatcaggcgctgataaccccactgaccccagaacaaaatcaacaacgcttcaatttccgccgtttgcatgaggaggtcggtcgccgctggacgttcagtttcgattcttccatcggcttgcgttccggcgcaatgagtaccgctaacaataatgtcggcggcgcagcgccagggaaaagctatcgtagctacggacaactggaagccgagtaccgcatcggacgcaatatgctgctggaaggcgacctgttctcagtttatagccgcgtctttgccgataccggagaaaacggggtgatgatgccggtgaaaaataagatgtccggcaccggtatgcgcaggaatccgctgctcgatcagatctccgggtcggacgcttgaattagataatgagg

SEQ ID NO: 28875 - DNA, 175 bp, Homo sapiens
  SIMILAR (146)..(36): 861254mologous to Homo sapiens Human secreted protein HCHPF68, SEQ ID NO:163,accession number Y86248,Smith-Waterman Score =165.
tcagtgtagactggcattatccaatccttgcagatcttcttcttcttcttcttcttcttcttcttcttcttcttcttcttcttcttcttctccttctccttctccttctccttctccttcttcttcttcttcttcttcttcttttttgagacagagcctccctctattgcccagc

SEQ ID NO: 28876 - DNA, 414 bp, Homo sapiens
  SIMILAR (3)..(176): 521254mologous to Plasmodium falciparum glutamic acid-rich protein,accession number J03998,Smith-Waterman Score=139.
atgaagaagaagaagaaggagaaggagaaggagaaggagaagaagaagaagaagaagaagaagaagaagaagaagaagaagaaggaagaagaagaagaaggaagaagaagaagaagaagaagaagaagaagaagaagaagaagaagaagaagaagaagaagaagaagaagaagaaagaaagttctttctccttcttcaactgacctgaaatccagcagtgccaagctgagatctgcagccagcactcaagtgggagaggagcccacacagaacactaagagggagaacaggtgcaaatgtgagaaaacacaggagagccatgtggctaagcaaaagcctacatacaggccattaagtgtaaatgccatctactggattacaggatacattgaaccaccaaaaatacttcgctaa

SEQ ID NO: 28877 - DNA, 391 bp, Homo sapiens
  SIMILAR (1)..(390): 861254mologous to Escherichia coli ORF_f260,accession number U18997,Smith-Waterman Score=505.
  misc_feature (1)...(391): n = a,t,c or g
tttcgcaaacatgcgccgctgttggtgcgccagctctataatgtcggggtcctgtcgatgctgattattgtggtttctggcgtgttcatcggaatggtgttggggctgcaaggttatcctggttctgaccacttatagtgcggaaaccagtctgggtatgctggtgagcngttatcgctactgcgtgaactggggccggtggttgccgcgttgttgtttgccgggcgtgctggttcggcgctaaccgcagaaatcggcctgatgcgcgctacagagcaactctccagtatggagatgatggcggtggatccgctgcgtcgggttatttctccccgtttctgggctggggttatttcattaccactgttgacggttaatttcgtcgccgtgg

SEQ ID NO: 28878 - DNA, 1641 bp, Homo sapiens
  SIMILAR (1368)..(1613): 581254mologous to Escherichia coli Periplasmic transport system protein ArtP,accession number D90724,Smith-Waterman Score= 180.
atggcaactgagtttatgactcaggtagcgaagctggaaggtatcaggaagatcaagcgaaaaaactggcgaaacagcaagttgaaggtgatcagcaatggggcagatgttccgtctgaccaccttgcaggacaatacctcaccaccagcctgcaatatgctaacggccggataaggcgttcacgccgcatccggcgatgtgcactgaagcctgatgcgacgcttaccgcgtcttatcatgcctacggttacgcattacgttgcaacaacatcgacttgatatggccgatggcgcgcgcggttcatgatgctgtgaagcggaatacgctgaatgcatcactcaaaccgtcgaggcggctgtcagttcggtatcacggctatcaatcaggaaacgatatgccgctaacaagcctgcgggccgataaacttatcgggattccaccagaaagacggacaagagcactgctggcggcgctgtttgtttgcctgaaggcggcgaacgtgactccatacgtactgaaccgacctacacgctttatgcgacgttcgataacatggcggcctgaaagcgcgctctccggtcagtattggtggcgttgttgtggtcgggtggcggatattacgctggacccgaaaacctatctgccgcgcgtacgctggaaattgaacaacgttataaccacattccagataccagttcgcgagcattcgtacttccggcctgctgggggaacaatatctggcattaaactcggttttgaagacccggaactggggactgctatcctgaaggatggcgaacaattcaggacactaagtctgcgatggtggacctgcaggcatgataaatcaaagcccacagcagtccccggtgttgacatcaaacccacgattcacgccagacgtttcgcggttgagaagttatcggatcgtaatgccatttctctttgccgctggcgcatcaagcgcaaacaggcgctggtgagcggtacacaggatcagccagatgccgaagaagaccagaatgtcgctgcgcggatcagcgcccagaagtcgaaaccaacttcccagacgccccaaatcatggtccgagcagcagggctgcgtatagccaaagcgcggcgcgtttactgcgcccagcatccaggcgacgccgagcatcacaaggccagcgatagggtactatcttcgacctcaataccatcagactgccagtatacgagtgtcaatgaggattcaattaaacggcataattgcttctacggcgcgcatcaggcgctgttcgatatcacgctggattcccacagggcgaaacgctggtgttacttggccccagcggcgcggcaaaacctgattgaagcgccctgcgtgtactgggggttgataaagatcaagcgctggcccgtgcagaaaaatctggaacgttgcgtctcaaaccttatagcgatcgttacccgctgcatcttctggtgtcaagcagcagcgtgttgctattgcccgtgcgttgatgatgacccgcaggtactgctgttcgatgaaccgaccgccgcactgaccccggaattacggcacaaatcgtcagcatcattcgtgagctggcagaaacgaatatacccaggtgatcgtcacccacgaagttga

SEQ ID NO: 28879 - DNA, 3039 bp, Homo sapiens; identical to SEQ ID NO: 18189
  SIMILAR (1)..(798): 901254mologous to Escherichia coli K12 putative transport protein,accession number AE000362,Smith-Waterman Score=1237.

SEQ ID NO: 28880 - DNA, 1422 bp, Homo sapiens
  SIMILAR (784)..(1101): 941254mologous to Shigella flexneri VpsC,accession number AF053073,Smith-Waterman Score=494.
atgaggactgggcacggcgggcccgcgaggagcagcagccttccggctgcggagctgctccaggaagtctcgggctccggaggtccctctgccgcccctaacccctgcggcgcccagtgccgcgcagagccgcattcgccctcctgcagggggctcatagaaacatcatacaagatggtgacaatgtccccagtcagccgcatgcaactggaagttcaaggacctgcagctcactctggaggagaaaacaccttcacttgggaatgggctgacccttctgcagctggcatcctaagctgtgtcaagcagtctggagccaagagtcactcacactgggccactgaggaacagcatgaaaacagaaggtggcgtggggaagatgacgatgagaaacttaacccaacagcaaaaatcaggaaaggaatgcatgcaagtataataagtaataagcaagatgcaaagaataaaatcaagtatatctggctcatcttcctttactcagctgttcgagggaacaccttgcagcacaaagaatgccttgaggaaaggggccctgttaatcccctggaatccccaacaattgactgccgcataaaaggaatgaggaaagcaatgagagccagtgaaggaattcggcttgatgcgcgctacagagcaactctccagtatggagatgatggcggtggatccgtggcgtcgggttatttctccccgtttctgggctggggttatttcattaccactgttgacggttattttcgtcgccgtggggatctggggcggatctctgcactgctggcggcgctgtttgtttgcctgaaggcggcgaacgtgacgtccatacgtactgaaccgacctacacgctttatgcgacgttcgataacattggcggcctgaaagcgcgctctccggtcagtattggtggcgttgttgtgggtcgggtggcggatattacgctggacccgaaaacctatctgccgcgcgtaacgctggaaattgaacaacgttataaccacattccagataccagttcgctgagcattcgtacttccggcctgctgggggaacaatatctggcattaacagtcggttctatagatgcgaaaagttccattaacttaatgtccaaaagcaagtttagtcctttggtttccctacttcaaaatgtagcatttgccttcttcatgaccaaaaaaagaggaagaagaagaaggagaaggagaaggagaaggagaaggagaagaagaagaaaagaagaaaagaagaagaagaagaagaagaaggagaaggagaaggagaaggagaaggagaagaaaagaaaagaagaagaagaagaagaagaagaagaagaagaagaagaagaagaagaagaagaagaaaaaatgtatgcatatggatgtccaagccagaaaaacaaataa

SEQ ID NO: 28881 - DNA, 1503 bp, Homo sapiens
  SIMILAR (781)..(1500): 1001254mologous to Escherichia coli NikC,accession number X73143,Smith-Waterman Score=1226.
atggtggagcttgacgcactggcaaaaccttatcgcttcccgttagcgggcgtgcatggggcggagcgccgtgacatcaatggtaaaacacatatcgttcatctgccggatgcgattgcgcgtgatattagcgtgcaactgcatacagtcatcgctcagtatcccggcgcggagctggaggcgaaagggatggcttttgcgctgcattatcgtcaggctccgcagcatgaagacgcattaatgacattagcgcaacgtattactcagatctggccacaaatggcgttacagcagggaaagtgtgttgtcgagatcaaaccgagaggtaccagtaaaggtgaggcaattgcagcttttatgcaggaagctccctttatcgggcgaacgcccgtatttctgggcgatgatttaaccgatgaatctggcttcgcagtcgttaaccgactgggcggaatgtcagtaaaaattggcacagtatctaaccggattgcaccaccagacgagcacgccgccagtgccggtggccttgccgttggcatactgggggcactgaaagccgcaggcggactgtggtttggctggagtggtgaaacagggaatgaggatcagccgctaaaaaaggtgaaaaaaggtaaaaacagcaaaatcggtgcaggttcgcgtctctgggcgaacgtaaccatttaccatgagatccagatcggtcagaattgcctgatccagtccggaacagtggtaggcgcagacggctttggttatgccaacgatcgtggtaactgggcgattgatttgccgtcgcgcctgctttcgccggatgcgcagcactggctgggcaccgatcacttaggtcgcgatattttctcgcggctgatggcagcgacccgcgtgtcgctcggttcggtaatggcctgcctgctgctggtgctgacattagggctggttattggcggcagcgccgggttgattggcgggcgcgttgatcaggccaccatgcgcgtcgccgatatgtttatgaccttcccgacctcgattctgtcgttctttatggttggcgtgctcggcaccgggctgaccaacgtaattatcgccatcgccctgtcgcactgggcgtggtatgcacgcatggtgcgcagcctggtgatttcactacgccaacgcgagtttgtgctggcgtcacggctttccggtgcgggccatgtgcgggtgtttgtcgatcatctggcaggcgcggtgatcccttcgctgctggtgctggcaacgctggatatcggccatatgatgctgcacgtcgcggggatgtctttccttggcctcggtgtgaccgcgccgaccgccgaatggggcgtgatgattaacgacgcgcgccagtatatctggacccagccgctgcaaatgttctggccggggctggcgctgtttatcagcgtgatggcctttaacctggtgggtgacgcactgcgcgatcatctggaccctcatctggtgacggagcacgcacactaa

SEQ ID NO: 28882 - DNA, 1762 bp, Homo sapiens; identical to SEQ ID NO: 24188
  SIMILAR (395)..(1351): 831254mologous to Escherichia coli alpha-amylase precursor,accession number X58994,Smith-Waterman Score=1460.

SEQ ID NO: 28883 - DNA, 1122 bp, Homo sapiens
  SIMILAR (1)..(708): 1001254mologous to Escherichia coli alpha-amylase precursor,accession number X58994,Smith-Waterman Score=1273.
atgtcgctagcctttttgccggatatcaaaaccgaatcaactaccgcttctggtctgccggtgttctataaaaacaaaatggatacccacgccaaagccattgacggctatacgccgcgcgattacttaacccactggttaagtcagtgggtccgcgactatgggattgatggttttcgggtcgataccgccaaacatgttgagttgcccgcctggcagcaactgaaaaccgaagccagcgccgcgcttcgcgaatggaaaaaagctaaccccgacaaagcattagatgacaaacctttctggatgaccggtgaagcctggggccacggcgtgatgcaaagtgactactatcgccacggcttcgatgcgatgatcaatttcgattatcaggagcaggcggcgaaagcagtcgactgtctggcgcagatggatacgacctggcagcaaatggcggagaaattgcagggtttcaacgtgttgagctacctctcgtcgcatgatacccgcctgttccgtgaagggggcgacaaagcagcagagttattactattagcgccaggcgcggtacaaatcttttatggtgatgaatcctcgcgtccgttcggtcctacaggttctgatccgctgcaaggtacacgttcggatatgaactggcaggatgttagcggtaaatctgccgccagcgtcgcgcactggcagaaaatcagccacgcaatattgtcctgcatccatttaccgagccacggcttcaggtcgatgtcatccgcctggagccagacgcgaccattgcttaacaacccctcatcatcgcgcaaatccatgcgcacctgcatcacgccgtgctgtccggcgttttatatttcgccaaattacctctcgcacctgtttcaaaaaacgggggccattggttttaacgaatacctgaatcacacgcgactggagcacgctaagacgttattgaaaggctatgacctgaaggtaaaagaagtggcgcacgcctgcggctttgtcgacagcaactacttctgccgtctgtttcgtaaaaacaccgaacgctcgccgtcggaatatcgccggcagtaccacagccaactgacagaaaaaccgactactccagaataa

SEQ ID NO: 28884 - DNA, 2600 bp, Homo sapiens
  SIMILAR (3)..(1202): 871254mologous to Escherichia coli alpha-amylase precursor,accession number X58994,Smith-Waterman Score=1867.
cgccgcctcaatggcgattgttcagggacggcgaatatacgctgcaaatagacacccgctccggtacgccaacattgatgatttccatccagaacgccgccgaaccggtagcaagcctggtccgtgaatgcccgaaatgggatggattaccgctcacagtggatgtcagcgccactttcccggaaggagccgccgtacgggattattacagccagcaaattgcgatagtgaagaacggtcaaataatgttacaacccgctgccaccagcaacggtttactcctgctggaacgggcagaaactgacacatccgcccctttcgactggcataacgccacggtttactttgtgctgacagatcgtttcgaaaacggcgatcccagtaatgaccagagttacggacgtcataaagacggtatggcggaaattggcacttttcacggcggcgatttacgcggcctgaccaacaaactggattacctccagcagttgggcgttaatgctttatggataagcgccccatttgagcaaattcacggctgggtcggcggcggtacaaaaggcgatttcccgcattatgcctaccacggttattacacacaggactggacgaatcttgatgccaatatgggcaacgaagccgatctacggacgctggttgatagcgcacatcagcgcggtattcgtattctctttgatgtcgtgatgaaccacaccgggtatgccacgctggcggatatgcaggagtatcagtttggcgcgttatatctttctggtgacgaagtgaaaaaatcgctgggtgaacgctggagcgactggaaacctgccgccgggcaaacctggcatagctttaacgattacattaatttcagcgacaaaacaggctgggataaatggtggggaaaaaactggatcagaacggatatcggcgattacgacaatcctggattcgacgatctcactatgtcgctagcctttttgccggatatcaaaaccgaatcaactaccgcttctggtctgccggccggcaaaacccgccaggaagcaggggacctgcccgacaataccccccagatgcagacctccgtcgtcatcaggaacagcggtgtgtacgggcgatcaggtagccaccgccggttaccatggtttacggcgtggatcagcgcggagacaggcgtcggggcccgccatcgcgtcggcaagccatgtctgcaacggcaactgcgcagatttaccgcccgcaccgcccagcagcatcagcgtcgcccacatcagcatgttattgccgtcagcaaagtgcgctggtgccagttccaccatttcgcggaagttcagggtgcccagttcgttgtaaagaatgaacagtgcgaaagcgaggaacacgtcacccacacgggtcacgacgaacgctttcattgccgctgcgccattcttcggatcggtgtaatagaacccgatcagcagataggagcacaggcccacgccttcccagccgaggtacatcagcagcaggttgtcggcaagcaccagaaccaccatgctggcgatgaacagggttatatcgacaggaaaggagatatggcaaaggggattggattttttgcacggtgcctcatgtgccagcctgcttcaacacaaggtaacagaaaaatttccaacccaattttttcaaatgaacatttgccggtatttcaccaacgtcttatggaaattgttaatgagagcatcattaaaattaatgaaaataatcgcatctgcctccgattctctgcagaagcagaaagacattggatcgaattctacaaccaggtcgagtcagaaatgagaatgattggccttctttatgattttaaggattatgcttctaaaatggcggagaacatggcgaggcttgctgccttacttcattacttcagcggtgatggaggcgatatatctgttaccgcagtaaaagcagcagtggagatagtggcttggtatattgaagaatacatccgcttgttctctaaaaaagaagagttttctttagatgtttcagaagcagatgagctttattgttggataaaagattactgcacgcaaaaattttcttcctgcatcaagaaaaatgtttctttagagcgcatcacaattatcgcccgggagaagatgatgaaaaagactgccgcaattatttctgcctgtatgctgacttttgccctgagcgcctgttccggttcgaactatgtgatgcacaccaatgacggacgtaccatcgtctctgacggcaaaccacagactgataacgataccgaatatcagataattatctccccggagtatcaggggaaaggtctggcaacccgtgccgccaaattagcaatggactatggctttaccgttctcaatctctataagctgtatctgatcgttgataaagagaatgaaaaagcgattcacatttaccgcaagcttggcttttcggttgaaggtgaattgatgcacgagttctttattaatggtcaatatcgtaatgccattcgcatgtgtatattccagcatcagtatctggcagagcacaaaacaccgggtcagactctcctgaagccgaccgcacaatag

SEQ ID NO: 28885 - DNA, 1248 bp, Homo sapiens; identical to SEQ ID NO: 28494
  SIMILAR (478)..(1038): 981254mologous to Escherichia coli seryl-tRNA synthetase,accession number X05017,Smith-Waterman Score=934.

SEQ ID NO: 28886 - DNA, 1633 bp, Homo sapiens
  SIMILAR (201)..(1241): 1001254mologous to Homo sapiens D-amino acid oxidase (AA 1 - 347),accession number X13227,Smith-Waterman Score=1887.
ttggggtccattgcaacccgaggcgagactagagttcccaagcgagaagggaagaggcagtgggtgcacgtggaaggcggacagagggctggaaacaagacgctccagaatcaggagcttcccctcaggaaatagcatcctgtgtccccgcactgcagttgtctggtctctccagcagtttggtacttccggctgctgcaatgcgtgtggtggtgattggagcaggagtcatcgggctgtccaccgccctctgcatccatgagcgctaccactcagtcctgcagccactgcacataaaggtctacgcggaccgcttcaccccactcaccaccaccgacgtggctgccggcctctggcagccctacctttctgaccccaacaacccacaggaggcggactggagccaacagacctttgactatctcctgagccatgtccattctcccaacgctgaaaacctgggcctgttcctaatctcgggctacaacctcttccatgaagccattccggacccttcctggaaggacacagttctgggatttcggaagctgacccccagagagctggatatgttcccagattacggctatggctggttccacacaagcctaattctggagggaaagaactatctacagtggctgactgaaaggttaactgagaggggagtgaagttcttccagcggaaagtggagtcttttgaggaggtggcaagagaaggcgcagacgtgattgtcaactgcactggggtatgggctggggcgctacaacgagaccccctgctgcagccaggccgggggcagatcatgaaggtggacgccccttggatgaagcacttcattctcacccatgacccagagagaggcatctacaattccccgtacatcatcccagggacccagacagttactcttggaggcatcttccagttgggaaactggagtgaactaaacaatatccaggaccacaacaccatttgggaaggctgctgcagactggagcccacactgaagaatgcaagaattattggtgaagcaactggcttccggccagtacgcccccagattcggctagaaagagaacagcttcgcactggaccttcaaacacagaggtcatccacaactatggccatggaggctacgggctcaccatccactggggatgtgccctggaggcagccaagctctttgggagaatcctggaagaaaagaaattgtccagaatgccaccatcccacctctgaagactccagtgactgctgcctccccccacaagaactcccttctcccctcagccaatgaatcaatgtgctccttcataagccattgcttctccctcacttctttcctcaaagaagcatgaggtgagagaaagccacraagtcagtgcctggagaagggttcagcccaacatggggcccctctcatcactgaaatccctctaccttctctgggtctggcattataaagaacagctgaggctgtcattccatgagtcttcagaagaaaggacagctcagaaagtcaaagaggccaactgcccagagccacagaaaatggaggataattgaggctaagtaacctgattacaagttgtactaacatattaaaggttctgaaaagtcctgcaaaa

SEQ ID NO: 28887 - DNA, 2827 bp, Homo sapiens
  SIMILAR (1345)..(2142): 951254mologous to Escherichia coli alpha-amylase precursor,accession number X58994,Smith-Waterman Score=1391.
atgcccaggcataccccatcactccagcccacagctgtcaaccaccagatatgtgagggaggccaccctagaccacccagacatgagctgacgttccagctgacacactcacagccaagccagaccccagaatggttaactgagaggggagtgaagttcttccagcggaaagtggagtcttttgaggaggtggcaagagaaggcgcagacgtgattgtcaactgcactggggtatgggctggggcgctacaacgagaccccctgctgcagccaggccgggggcagatcatgaaggtggacgccccttggatgaagcacttcattctcacccatgacccagagagaggcatctacaattccccgtacatcatcccaggggacatttaccccaaagaggacaaaggaatgagtgagatagtaatacgccacgcagaaacacgggattacgaggccatcaggcagattcacgcccagccggaggtgtattgcaacacactacaggtgcctcatccttccgatcatatgtggcaggagcgactcgccgatcgtcccggcatcaagcaactcgtcgcctgtattgatggagacgtcgtgggccatctcaccattgacgtgcaacagcgcccacgccgcagtcatgttgccgattttggtatctgtgtcgactctcgttggaagaaccgcggcgtcgccagcgccctgatgcgagagatgattgaaatgtgcgacaactggttgcgggtagatcgcattgaactaaccgtgtttgtcgataacgccccggcaattaaggtctataaaaaatacggctttgaaattggagggactggtaagaagtacgcattgcgtaatggtgaatatgtcgatgcatattatatggcgcgggatcaatttgcccacatctatttcgagctcggtacctgcttgttgttgtgcgtcttcgctaacacctcactcgaaaacaccagagtgagtaacataagaatcatcgccccatatcgtcgtatgggagtcaaaatcatcagcgaacaggggacaggaacatttgtcagccacgcgcagttgcccaaaggtacgcgtccactaacgctaaattttgaccaacagtgctggcagcctgcggatgcgataaaactcaatcagatgctttccctgcaaccttgtagcaacacgccgcctcaatggcgattgttcagggacggcgaatatacgctgcaaatagacacccgctccggtacgccaacattgatgatttccatccagaacggcggcgaaacggtatgcagcctggtccgaagtatatcccccggtgtggacaaaacacatgatgatgagctggaccggcatagctttaacgattacattaatttcagcgacaaaacaggctgggataaatggtggggaaaaaactggatcagaacggatatcggcgattacgacaatcctggattcgacgatctcactatgtcgctagcctttttgccggatatcaaaaccgaatcaactaccgcttctggtctgccggtgttctataaaaacaaaatggatacccacgccaaagccattgacggctatacgccgcgcgattacttaacccactggttaagtcagtgggtccgcgactatgggattgatggttttcgggtcgataccgccaaacatgttgagttgcccgcctggcagcaactgaaaaccgaagccagcgccgcgcttcgcgaatggaaaaaagctaaccccgacaaagcattagatgacaaacctttctggatgaccggtgaagcctggggccacggcgtgatgcaaagtgactactatcgccacggcttcgatgcgatgatcaatttcgattatcaggagcaggcggcgaaagcagtcgactgtctggcgcagatggatacgacctggcagcaaatggcggagaaattgcagggtttcaacgtgttgagctacctctcgtcgcatgatacccgcctgttccgtgaagggggcgacaaagcagcagagttattactattagcgccaggcgcggtacaaatcttttatggtgatgaatcctcgcgtccgttcggtcctacaggttctgatccggtgcaaggttttccgtttgacctgcaatactttacgacgctcttcaagagcgcccagcttatctacatccagcttaaagccccggcgtgccagtttttcagcgactgcgtctggctcattacgcagcagatagggatcgagcatgcttatcctgtgcttatcgaattaaatgggagatgtggccacagcctgcgaccacagggatacagtaacaacattaccgcaacgataacattaacggtagcgttttatggggctattttgatcctgttcagccagccaggcgagcttttcgccaatcttgccttcaaggcccctgtttgtcgggaaataatagcgtgtttgtgctatttccggcgggaagtaaacctcaccggcagcataagcgttcgcttcatcatgagcgtaacgatattcctgcccgtagcccatttccttcattaatttcgtcggcgcattacgcaaatgaaccggcacgttattaatccgggcgttcgcgagcatcggccagcgcggctttaaacgcagtgtagacagcgttgctttttggcgcgcaggccaggtaaacaatcgcctgagcaatggcgcgttcaccttccgccgggccaacgcgagtaaagcaatcccaggccgcaattgccacctgcatcgcccgtggatcggcattaccgacgtcttcagacgcaatcgccagacagcgacgcgcgacatataacggatcgccaccagcggtaataat

SEQ ID NO: 28888 - DNA, 1086 bp, Homo sapiens
  SIMILAR (1)..(561): 981254mologous to Escherichia coli K12 bundles of cytoplasmic filaments,accession number AE000404,Smith-Waterman Score=943.
atgaccaccgtgaacatcaataccggagcgtttgtcggtcatcgcaatctggacgacaccattttcaataccaatattgaagcgacgcaggctatcgctcgcaagtcccggttgcgtaatctgggcgggattatcattattgatttcatcgatatgaataatgaagatcaccgccgccgagtgctgcactcgctggagcaggcgttgagcaaagaccgggtgaaaaccagcgttaatggtttttcggcgctggggctggtggagatgacgcgtaaacgcacccgcgaaagcattgagcacgtactgtgtaacgaatgcccaacctgccacggtcgcggaacggtgaaaaccgtggaaacggtatgctatgaaatcatgcgcgagattgttcgtgtccaccatgcttacgactccgaccgtttcctggtctatgcttctccggcagtagctgaagccttgaaaggcgaagagtcacactcgctggcggaagtggaaattttcgttggcaaacaggttaaagtacaaattgaaccgctctataaccaggagcagtttgacgtcaacgtgcgggaacgctgtgggcacctggcaccatcgacattttccggtggcgaacagcagcgcgtcaacatcgcccgcggctttatcgtcgactaccccattctgctgcttgacgaacctaccgcctcgctggacgccaaaaacagcgccgcggtggtggaactgattcgcgaagccaaaacccgtggcgcagccatcgtaggcatcttccatgacgaagctctggtgctggaaaacgaggtggtaagcggttcgctggaggtgcagaacggcgaaatccgcgcctttgccgaaagccagagccgcctgccggaggcgatggacggcgaaggcggctggctgctgccggggctgattgagctgcataccgataatctggataaattcttcaccccgcgcccgaaagttgactggcctgcccactcggcgatgagcagccacgacgcgctgatggtggcgagcggcatcaccaccgtactggatgccgtggcaattggcgacgtgcgcgacggcggcgatctatag

SEQ ID NO: 28889 - DNA, 1440 bp, Homo sapiens; identical to SEQ ID NO: 1582
  SIMILAR (875)..(949): 1001254mologous to Escherichia coli ORF_o492,accession number U14003,Smith-Waterman Score=116.

SEQ ID NO: 28890 - DNA, 996 bp, Homo sapiens
  SIMILAR (781)..(891): 971254mologous to Homo sapiens Human Y218 protein,accession number Y41245,Smith-Waterman Score=192.
cggcgaggtaaaacccattaccttaatgacaaaaatcacaattacttctgcaccaacctaatagaagcccagagaatggcagcctctgaggaaacagaggaggaagaaatgaagaagagcaatcagcaggcctttcagcgacgtcggtttcagggtcagggttttctcctgccagttcaggccggaggtgaagtccatcaccgataccgtggtgtcatcaatcttaatgttgacgttgtccagtgccacccgtgtcagggtgatgggatacggcgtggagagatccagcggaccgctatcttcctcttcttcaacctgttcagaaggaggcatttttttactgtcgatgttgacctgaatgtctttcagcgccagatcattaatacaaacactgctgttccacaggcactcaagcccgacagccagatgcagattgcccgcttttaccgccacgcctggctgctcataacgaacgtcagacaaggtgagatcgcgccagccgccggtgaccttgccaatatccagtcctggcacccagcgatccgccgctttaaataccagatgcaggccgctggtggtgcccaccagaaacgccaccgatgcccagcaacactcaggcacttggccacagtgataaccacatcagacttcgatgcagaaaagcccacacataactttcatccctgttgccatggccacctaataccccctgacaccagactaaatgctctggctgcaaggaaatacagtaccttacatgtcaagttaatgcttgagagtcaagaaagaaatcttttgcaagccttaaggcaccctaaggctgtggcatttggagaaatgggcttggattactcttacaagtgcaccacgcctgtcccagaacagcgcaaggacccttgtgattacattcggcccacatggacattccaggatggtctccccttctcccgatccttaccattacccacatcttccaagttcttcttgcccttgtaa

SEQ ID NO: 28891 - DNA, 1425 bp, Homo sapiens
  SIMILAR (588)..(4): 991254mologous to Escherichia coli similar to,accession number D90861,Smith-Waterman Score=987.
ttagagacccatggtgaagaactggctggcaatttctggaataaaccaggcattaacgatcacgccccaaatcacccagaccattacggcggtcaggacaatcaataccagccagtcaccaaaggtaaacggacgttgttcaacatcagcctgcttttcacgaaagaagcggtcggactcatgcacgcgtgacagaagaggattctttttcactcgtgaggcgtacaccatggtaaagatcaggccaatcagagtggcgataacccacaccacgatgcgcaacccggagccagaaagcaccggaacgccggcaatcccctgagcaacgaccacacaaaacgggttcatccacgaactggcaaaaccgatttgcgtggcaatataggtcaccaggacggtggtaatactgtcatagcccagccggaccattagcggtgcgatgataatggcaaaggcgacggcctcttctcccataccaaataccgcgccgccaagtgaaaacagaataaacagcgcaggaataaagagaatttcattcccgcgggtatggcgaataagcgccaggataccgttatcaatggttccactgtcgatgttgacctgaatgtctttcagcgccagatcattaatacaaacactgctgttccacaggcactcaagcccgacagccagatgcagattgcccgcttttaccgccacgcctggctgctcataacgaacgtcagacaaggtgagatcgcgccagccgccggtgaccttgccaatatccagtccgatgtaaaactgtaacccgtgttcgtctttatccgcgaccggtacggcaaaatcgagtttgattggcccgaccggcgattcccagcgcacgccgaccccggtaccggttttaaagtcgctgcggcgaatatcgcttaccgcttcgccactatcgacaaacaccgcgccccaccattttccggtcacgttgtactggtattccagcgatccggttatcaacttcgaggcccctttcaggtcaccgttggcgtatttcggagcgatagatttgtatttgtagccacgaatactgcggtcgcccccggcgaagaaacgcagatccggcggtactttgtcgaaatcaccggtttcaatccagcccagcgtgccgcgtgtaacaaaacgatggcgatcgtacagtgtgcggatccagacgttctgcgcctggggctggctcgcagaatagcccggtgggcgctgtccatggtcctgccacaccactggggccatctgcctgctagtaatttgggactccacataacagctgaaaggaatctccttgaccagttccccaaattgctttatattgtgagttttggaagagaacttggtcaagtgaggaagatcctgctctcgcacgccatgtaagccaatgttatgctgctgggccat

SEQ ID NO: 28892 - DNA, 1916 bp, Homo sapiens
  SIMILAR (25)..(591): 1001254mologous to Escherichia coli HisP-like nucleotide binding protein (phnK),accession number J05260,Smith-Waterman Score =968.
atgtgctgcaacagatgcaggaattacgcgccgggcaaaggctttagcgatgtctcttttgatttatggccgggggaagtgctgggcattgtcggggaatccggctccgggaagaccacgctgctgaagtcgatctccgcgcgcctgacgccgcagcagggggaaattcactacgagaaccgttcgctgtatgcaatgagcgaggccgaccgccgtcgcctgctgcgtaccgaatggggcgtggtgcatcagcatccactcgacggcctgcgccgccaggtgtcggcaggcggcaatatcggcgagcggctgatggcgaccggggcacgtcattacggcgatattcgtgccaccgcgcagaagtggctggaagaggtggagattcccgccaaccggatcgacgacctgccgaccaccttttccggcggtatgcagcagcgtttgcagattgcccgcaacctggtgacgcatccgaagctggtgtttatggatgaaccgaccggcgggctggatgtgtcggtgcaggcccgcctgctcgacctgctgcgcggcctggtggtggagctgaacctcgcggtggtgattgtaacctcttccccagaccaggactggggctttaccccagagcctcgcctcgccgcccgcttcccaggatccactcactcgtcccggagccgccgcaaccgcggccgccgccatccccggccccggagcctgcccacacccagcgcaccccacagtcgggcgcccggagatggcgtcaagctcgtcccgcccccggcgcgcgtgacccgaaatgagcccgcaccttccgactcagtaactttgggggttccacacgagcccggggcgtgtattgggaccccaattctgacctttgtccgaccctcgacttcagctataaatgccgctgctgaagaatccactggaacaatattatttggtgcaggcggttttaagcgcactgacctgaacgataccgaatctgactccactacgctggtggcttctcgctactgggatctctccagcggctggcagcgtgccattaacctgcgctggagtctcgaccactttactcagggtgaaattaccaataccacgatgctgttttatcctggggtgatgattagccgcacgcgttctcgtggtggcctgatgccaacctggggcgactcgcaacgctactctatcgactactccaacacggcctggggttcagatgtcgatttctccgttttccaggcgcagaacgtctggatccgcacactgtacgatcgccatcgttttgttacacgcggcacgctgggctggattgaaaccggtgatttcgacaaagtaccgccggatctgcgtttcttcgccgggggcgaccgcagtattcgtggctaccaataccaaatctatcggtccgaaattacccaacggtgacactgaaaggggcctcgaagttgataaccggatcgctggaataccagtacaacgtgaccggaaaatgtaccaagtggcagttcggcgaatggctggcgcccggcgaggtgcgcctggcccccggcgccacgctggccacgcccgagctggtggccagctgctcgaccgagggcctcaacggcctggccgccaatttccacgccgaactgcgcgcccgcctgccctggcacggcggcgcgatgaagccgcgcccggtgcacctgaacacctgggagggcttctatttcgatctccagcccgacaaggtcaaggcgctggccacggccgccgcggcgctcggcgtcgagcgcttcgtgctcgacgacggctggttcaatgcccgccaccacgaccgcgccggcctcggcgactggtggcccgatgcgacgaagttcccgcaggggctgggcgagctggtcgcgcatgtcaaccccttttatgcataa

SEQ ID NO: 28893 - DNA, 2193 bp, Homo sapiens
  SIMILAR (2046)..(1411): 1001254mologous to Escherichia coli hsp70 protein (dnaK gene),accession number K01298,Smith-Waterman Score=1047.
aagaagattgcccgcttttaccgccacgcctggctgctcataacgaacgtcagacaaggtgagatcgcgccagccgccggtgaccttgccaatatccagtcctggcacccagcgatccgccgctttaaataccagatgcaggccgctggtggtgcccaccagaaacgccaccgatcccagcaacagtaagataacgataaccacgccgaggctgatttttttccataaactcataattctggccccagaccgatgtaaaactgtaacccgtgttcgtctttatccgcgaccggtacggcaaaatcgagtttgattggcccgaccggcgcattcccagcgcacgccgaccccggtaccggttttaaagtcgctgcggcgaatatcgcttaccgcttcgccactatcgacaaacaccgcgccccaccattttccggtcacgttgtactggtattccagcgatccggttatcaacttcgaggcccctttcaggtcaccgttggcgtatttcggagcgatagatttgtatttgtagccacgaatactgcggtcgcccccggcgaagaaacgcagatccggcggtactttgtcgaaatcaccggtttcaatccagcccagcgtgccgcgtgtaacaaaacgatggcgatcgtacagtgtgcggatccagacgttctgcgcctggaaaacggagaaatcgacatctgaaccccaggccgtgttggagtagtcgatagagtagcgttgcgagtcgccccaggttggcatcaggccaccacgagaacgcgtgcggctaatcatcaccccaggataaaacagcatcgtggtattggtaatttcaccctgagtaaagtggtcgagactccagcgcaggttaatggcacgctgccagccgccttgcgtgtgatgtcgggggttctggaaggcagtaacgtcaatgccgtttcggcaatgagcgacatgattgccagcgcgcggcgttttgaaatgcagatgaaggtgatcagcagcgtcgatgataacgcaggccgtgccaaccaactgcctccggattacaaatcggcacgggggtacgcccggtcgccactgaacgcttacacagccagggaaacctttctgagtacagtcaggatctacgagattctggttctctcggaaggcccgaacatgtatggacggcgtcaacatcccctttgcgagcatagtgtcatggcgcctcataatttctggctcctgtccaggccggttctggtggtttcgggttacgtctcctgcggccacccagtggaagttgttgggcgttgatttgttagttggcgttggtgcagcgtgaggggtcgtatatataaggccctctggtggtgtatcaattagatgaacattttccgtgcaccgggctgtatcgtgccagtgtaccagagatttgttatcagccgcacgtttacgttcaccctgcagcacatggatggttaccgcagactggttgtcttcagcggtagagaacacctggctgtgcttggtcgggatagtggtgtttttcgcgatcagcgtcgtcatcacaccgcccatggtttcgatacccagagacagcggggtaacgtccagcagcagtacgtcttttacgtcaccagtcagaacaccaccctgaacagcagcaccgattgctacagcttcgtccgggttaacgtctttacgcggctctttaccaaagaactcagcaactttcttctgaaccattggcatacgagtctgaccaccaacgaggataacgtcgtcgatatcagatacggacaggccagcgtcctgcagtgcaactttcagcggctcaatggaacggtttaccagatcttcaaccaggctttccagtttcgcacgagtcactttgatgttcatgtgtttcggaccggtcgcgtctgcagtgatgtatggcaggttaacgtcggtctgctgagcggaagacagttcgattttcgctttttctgccgcttctttcaggcgctgcattgccagcggatcgttgcgcaggtcaatgccctgatctttcttgaattcggattcgtaagccgtgaaaacagcaacctccgtctggccagttcggatgtgaacctcacagaggtcttttctcgttaccagcgccgccactacggcggtgatacagatgacgatcagggcgacaatcatcgccttatgctgcttcat

SEQ ID NO: 28894 - DNA, 2440 bp, Homo sapiens
  SIMILAR (1622)..(1768): 911254mologous to Escherichia coli HisP-like nucleotide binding protein (phnL),accession number J05260,Smith-Waterman Score =232.
atggcgggtttgccgtggatcgcggcgatggccttcttcatgcaggcacttgatgccactattcttaataccgccttacccgcaatcgctcatagccttaatcgttctcctctcgcgatgcaatcagccatcatcagttatacgctgacggtggcgatgcttattccgctggttgtcttccgggttattcaggggataggcggcgcaatgatgatgcctgttgctcggctggccttactgcgcgcttatcctcgtaatgaacttcttccagtattgaattttgtcgccatgccgggtattgcgggccttctttacgcgcgcaaacatatgcccaatttcagcaccgcacgacgcagattcgatatcactggctttttgctgtttggcctcagccttgttctcttctcaagcggaatagagctattcggggaaaagattgtcgccagctggattgccttgacggtaattgtcaccagcatcgggttactgcttctctatattctccatgcacgacgcacgccaaacccattaatttcattagatttatttaaaacccgcactttctcgatcggtatcgtaggcaatattgcaacccgtctggggaccggctgtgtaccgttccttatgccattgatgttacagcgttacgttccttattgcaaatcgatgttacccaggttcttagtcgactgggtaggccgcaggtgtcgcagcgcaatatcgcgaacggctgatgccgaccgggcacgtcattacggcgatattcggtgccaccgcgcagaagtgctggaagagtggagattcccgccaaccggatcgacgacctgccgaccaccttttccggcgcagcgtttgcagattgcccgcaacctggtgacgcatccgaagctggtgtttatggatgaaccgaccggcgggctggatgtgtcggtgcaggcccgcctgctcgacctgctgcgcggcctggtggtggagctgaacctcgcggtggtgattgtcacccatgatttaggcgtcgcccgcctgctggcggaccgtttgctggtgatgaagcaggggcaagtggtggagactgctggtgtcatcggttttgcagaattgagccggtgccggatgcggcgtaaacgccttatccggcctacaaatgcgctccccgtaggtcggataagacgcgtcagcgtcgcatccgacacccgaaccacgaggcgaaaaatgattaacgtacaaaacgtcagtaaaaccttcatcctgcaccagcaaaacggcgtgcgcctgcccgtcctcaatcgcgcctcgctcaccgtcaacgcgggcgaatgcgtggtgctccacggccattccggcagcggcaaatcaactctgctacgctcgctgtacgccaactatctgcccgacgaaggtcaaatccagatcaaacacggtgacgagtgggtagacctggtcaccgcgccagcgcgcaaagtggtggaaatccgcaaaaccaccgtcggctgggtgagccagtttctgcgcgtcatcccgcgtatctcagcactggaagtggtgatgcagccgctgctcgataccggcgttccgcgtgaagcctgcgccgctaaagccgcgcgtcttctcacccgcctggaacgtgccggaacgcctgtggcacctggcaccatcgacattttccggtggcgaacagcagcgcgtcaacatcgcccgcggctttatcgtcgactaccccattctgctgcttgacgaaactaccgccttccttgacgccaaaacagcgccgcgctatcccggctatatgcagcgtttcttccgcgaccacaatatcaccattgagatgactgaaagtgacgcagaagatttaaaacataccgtcgatttcatctcttttagttattacatgactggttgtgtttcccacgacgaaagcattaataaaaatgcgcagggaagtggtaagccagaaatgtatgcttctgacctggtgacgctgttaaaagaagtggcagatttcgatatctccgtggcggcgtatccggaagttcacccggaagcaaaaagcgctcaggcggatttgcttaatctgaaacgcaaagtggatgccggagccaaccgcgcgattactcagttcttcttcgatgtcgaaagctacctgcgttttcgtgaccgctgtgtatcggcgggcattgatgtggaaattattccgggaattttgccggtatctaactttaaacaggcgaagaaatttgccgatatgaccaacgtgcgtattccggcgtggatggcgcaaatgttcgacggtctggatgatgatgccgaaacccgcaaactggttggcgcgaatattgccatggatatggtgaagattttaagccgtgaaggagtgaaagatttccacttctatacgcttaaccgtgctgaaatgagttacgcgatttgccatacgctgggg

SEQ ID NO: 28895 - DNA, 2219 bp, Homo sapiens
  SIMILAR (1137)..(1787): 971254mologous to Escherichia coli HisP-like nucleotide binding protein (phnL),accession number J05260,Smith-Waterman Score =1065.
atgagtaaaaaccttctgaaagcaggttactcgctggtggttgctgaccgtaacccagaagctattgctgacgtgattgctgcaggtgcagaaacagcgtctacggctaaagcgatcgctgaacagtgcgacgtcatcataaccatgctgccaaactcccctcatgtgaaagaggtggcgctgggtgagaatggcattattgaaggcgcggagccagcgaaaggcattgatatgctggatgctccggtgagcggcggtgaaccgaaagccatcgacggtacgctgtcagtgatggtgggcggcgacaaggctattttcgacaaatactatgatttgatgaaagcgatggcgggttccgtggtgcataccggggaaatcggtgcaggtaacgtcaccaaactggcaaatcaggtcattgtggcgctgaatattgccgcgatgtcagaagcgttaacgctggcaactaaagcgggcgttaacccggacctggtttatcaggcaattcgcggtggactggcgggcagtaccgttttggatgccaaagcgccgatggtgatggaccgcaacttcaagccgggcttccgtattgatctgcatattaaggatctggcgaatgcgctggatacttctcacggcgtcggcgcacaactgccgctcacagctgcggttattgagatgatgcaggcacttcgagcagatgcgcgcgcatttgttaccgttagtattgaacaacttccggcactgaaagcctttgataccgtcttttcgatgggcgtgctttaccatcgccgttcaccgctggagcatctatggcagttgaaagatcaactggtcaatgaaggtgaactggtgctggaaacgctggttattgatggtgatgagaacacggtgctggtaccaggcgatcgttacgcgcaaatgcgtaatgtctatttcatcccttccgcgctggcgctgaaaaactggctgaagaagtgtggttttgtagatatccgcattgcggatgtgagcgttaccaccacagaagagcagcgacgcaccgaatggatggttaccgaatcgctggccgatttcctcgacccacatgatccggacgcgtcagcgtcgcatccgacacccgaaccacgaggcgaaaaatgattaacgtacaaaacgtcagtaaaaccttcatcctgcaccagcaaaacggcgtgcgcctgcccgtcctcaatcgcgcctcgctcaccgtcaacgcgggcgaatgcgtggtgctccacggccattccggcagcggcaaatcaactctgctacgctcgctgtacgccaactatctgcccgacgaaggtcaaatccagatcaaacacggtgacgagtgggtagacctggtcaccgcgccagcgcgcaaagtggtggaaatccgcaaaaccaccgtcggctgggtgagccagtttctgcgcgtcatcccgcgtatctcagcactggaagtggtgatgcagccgctgctcgataccggcgttccgcgtgaagcctgcgccgctaaagccgcgcgtcttctcacccgcctgaacgtgccggaacgcctgtggcacctggcaccatcgacattttccggtggcgaacagcagcgcgtcaacatcgcccgcggctttatcgtcgactaccccattctgctgcttgacgaacctaccgcctcgctggacgccaaaaacagcgccgcggtggtggaactgattcgcgaagccaaaacccgtggcgcagccatcgtaggcatcttccatgacgaagctctggtgctggaaaacgaggtggtaagcggttcgctggaggtgcagaacggcgaaatccgcgcctttgccgaaagccagagccgcctgccggaggcgatggacggcgaaggcggctggctgctgccggggctgattgagctgcataccgataatctggataaattcttcaccccgcgcccgaaagttgactggcctgcccactcggcgatgagcagccacgacgcgctgatggtggcgagcggcatcaccaccgtactggatgccgtggcaattggcgacgtgccgacagaacgagactgtgtctcaaaaaataaaaataaaaatgaagaaaagaacaaaaaaaagattgatgttatgagtcccttccattttccaaaccacctttccatcagtcccatcaaggggccatctattccagagtttatggctaattcatttgttaggtcgtgctag

SEQ ID NO: 28896 - DNA, 2550 bp, Homo sapiens
  SIMILAR (707)..(928): 931254mologous to Escherichia coli Mutator MutT protein (7,8- dihydro-8-oxoguanine-triphosphatase) (8-oxo-dgtpase) (EC 3.6.1.-) (DGTP pyrophosphohydrolase),accession number D90819,Smith-Waterman Score=369.
tcaccgactcaccacaatgggtcgtaatgctgcgtagggctctataacctcgcccttatggaaatcattcggtgtgctaggccaataacggggtcttttgtcctggatcaggttgggccccgcgcagtcgagataatcaaacggccgtttcgctagcgcgtctgccctggtgcgaatggttgtgcgcgatactgatcgcctattaacgccacctgtcatatggcgcactgcgtgctctatcagccgggcgaatacaacccggtaatcgagacggacacccttcggatgatgctgagacgcagttgcttggcgcgatatctcacggcgagatccgttacgttgacgattgctggtgatcctcgggaatcctcctgcgctgaagaaataggtcaaggggtcctccactggctgttccacaggcactaagcccgacagccagaggcagattgcccgcggtgaccgccacgcctggcgctcataacgaacgtcagacaaggtgagatcgcgccagccgccggtgacttgccaatatccagtccgttggcgtatttcggagcgatagatttgtatttgtagccagaatactgcggtcgcccccggcgaagaaacgcagatccggcggtacttttcgaaatcaccggtttcaatccagcccagcgtgccgcgtgtaacaaaacatggcgatcgtacagtgtgcggatccagacgttctgcgcgcgaagaactgggcatcgaagcaactgtgggtgaatatgttgccagccatcagcgagaagtttcggggcggattatccatcttcatgcctggcacgtacccgacttccacgggacgttacaggcacatgaacatcaggcgctggtctggtgctcacctgaagaggcgctgcaatatccgctggcccctgctgatatcttgctggtcaccgcgccagcgcgcaaagtggtggaaatccgcaaaccaccgtcggctgggtgagccagtttctgcgcgtcatcccgcgtatctagcactggaagtggtgatgcagccgctgctcgataccggcgttccgcgtaagcctgcgccgctaaagccgcgcgtcttctcacccgcctgaacgtgccgaacgcctgtggcaccgcctcgctggacgccaaaaacagcgccgcggtggtgaactgattcgcgaagccaaaacccgtggcgcagccatcgtaggcatctccatgacgaagctgtacgtaatgacgtcgccgaccgcctgcacccaatggagcctcttcatgattatcaataacgttaagctggtgctggaaaacgagtggtaagcggttcgctggaggtgcagaacggcgaaatccgcgcctttgcgaaagccagagccgcctgccggaggcgatggacggcgaaggcggctggcgctgccggggctgattgagctgcataccgataatctggataaattcttcccccgcgcccgaaagttgactggcctgcccactcggcgatgagcagccagacgcgctgatggtggcgagcggcatcaccaccgtactggatgccgtggaattggcgacgtgcgcgacggcggcgatcggctggagaattgatgcgcagatgcagcagtacgagaagagcactggcggccgacggaagcctggtcgcaagcggatcgcgaaccttggcggcctgttgccggggcgaaaaaattgggcttgccggcccgaaagtccacacaagcccagtgggtgaattccacacgttggtgggggatacaaagaagggggcaaaagcgccctagggaattcataggatagttccttggtccgggctttttcgcccaactcgtcttgacgattgacccgttccgactttttttgtcgattgcctcgcgggggggccgtgaccgctagtaacctagacgacaccttggccgtccgagtaccacctcggtacgtcagtgcaaattccgtgggcaattgcaagtttggcccccattgcggcacagtttcgattgtcggtcgggctgtatagaactcaattactgactgcgagttactcaggaatactggtaaccgcaccacagccaagccaatcgacaggtaattgggtgacgtcaaagactgatcgaatagattacggtagcgaaaaccttcattatatccagcaccgcgcagggcaagacacggttttgactgtatgtacactgacacgatgataatccttggggtctggtacagagctagtaattctgggtcgtggtgggtggttggtggtgaaacgggaatatagtgggcgtaaggtttatgccacaagcgccgcccatacggctcctggaaacgttgtatattactgcctgggtaaatttgcccatttacgaggttcctaaagggggtggtgcggggccccgggggtaaaggcccctgattaaatttgggggttataatatataagccgggcacgccataaggcacagaagaacccagcacggggggcccccattggtctgttaaacccgggcggttgttccccttggtgaccccatgggttttggccattgggtcccccat

SEQ ID NO: 28897 - DNA, 1014 bp, Homo sapiens
  SIMILAR (127)..(561): 991254mologous to Shigella flexneri YrbC,accession number AF053073,Smith-Waterman Score=740.
atggtgctggaagatctcattggtcagttcctttacggtagtaaaggcgatgacaataagaatagtggcgatgcgccagctgctgcgccaggtaataatgaaaccactgaacctgagaaccgacgcatgtttaaacgtttaatgatggtcgctttgctggtgattgcacctctgagtgcggcaaccgcggcagaccagaccaatccgtataagctgatggacgaggcggcgcaaaaaacgttcgatcgcctgaagaatgagcaaccgcaaattcgggccaacccggattatctgcgtaccattgttgatcaggaactgctgccatacgtacaggtgaaatacgccggtgcgctggtgctgggccagtattacaagagtgcgacccctgctcaacgtgaagcctactttgccgctttccgtgagtacctgaagcaggcttacggtcaggcgctggcgatgtatcacggtcaaacctatcagattgcgccagaacagccggtgggcgataaaaccattgtgcctattcgcgttaccattattgacccgaatggccgtccgccggaggtgattggcgaagcataccggcataagatgctgtttgttatcagccagtcagacaaagctgaacccaccagcggtggaaatatcctttccacagagcagaaacaaaatatcagccgcaaaatctgcctgctgcatgagctattccagcccgtgcatccggtgtgtgccgtgtcggttcgcctgcagtggggactaagggtgatggcagagcggatgattaagtgtctgccgcgtgaggccagcagcccggtagtagcgctactgcaacatccctttcgaacaacggtagcccgggagcaggcacgtgacgatttcggtgaaaccgtaggtgccatactcgatacggtaagcacctttccccttattcccgccccggtgcggaccattattcaggccgtgcgttcctcggtggtgtcagtggcccgcgctgtctgggatttcttcttctga

SEQ ID NO: 28898 - DNA, 1097 bp, Homo sapiens
  SIMILAR (364)..(969): 871254mologous to Escherichia coli K12 putative GTP-binding protein,accession number AE000349,Smith-Waterman Score=889.
atggaacactttggtcgcaacgaccacgtcttcacgacgggcgaaatcccgcagtgcgcgaccgacgatctcttcgctgctgccgtcagaataactgttggcggtatcaaagaaatttatgccgccttccagtgcacgtttaattatgggacggctgctttcttccggcagtgtccatgcgtgattacgactctagagatccccacgtaccgagccgtgtctgagaccactggtgaaatcctttttgacctcttgtgcgctaacggtccagagtggaaccgcttcgttacgctggaaatgaaatatggccggatcatgctggatacggccaaaattattgatgagcaggacgttccgacacatatcctgagcaaactgacttttactttacgtaatcatcctgagtacctagaagcctctgttttgtctcccgatgatcagataaatcagttaacccactacgagccagtgatcggcatcatgggtaaaactggggcgggaaagagtagcctttgcaatgccctgtttgccggtgaagtatcgccggtcagcgatgtagcggcctgtacacgtgatcctttacgctttcgcctgcagattggagaacactttatgaccatcgtggatctgcccggcgtgggcgaaagtggcgttcgcgataccgagttatctgcgctgtaccgcgaacaacttccccggctcgacctgattctgtggctgattaaggctgatgatcgggcactggcgactgatgagcatttttaccgtcaggtgattggcgaagcataccggcataagatgctgtttgttatcagccagtcagacaaagctgaatccaccagcggtggaaatatcctttccacagagcagaaacaaaatatcagccgcaaaatctgcctgctgcatgagctattccagcccgtgtggtctgtgtgtgccgtgtcggttcgcctgcagtggggactaaggcagacgaccaatcagagtacttttgccgtcatcgacgctaccacaggtcagaaaacgcagcaggcttttatgttgttgcgcaatcatccaggcttcgacgccgccttcattggcgatttgttgtgcaa

SEQ ID NO: 28899 - DNA, 2493 bp, Homo sapiens; identical to SEQ ID NO: 9229
  SIMILAR (7)..(516): 941254mologous to Escherichia coli similar to E. coli YjhG,accession number U70214,Smith-Waterman Score=829.

SEQ ID NO: 28900 - DNA, 882 bp, Homo sapiens
  SIMILAR (13)..(879): 971254mologous to Escherichia coli K12 putative GTP-binding protein,accession number AE000349,Smith-Waterman Score=1439.
atgcccggaggagtggtgatgaaaaattttgaagttctgcagccactacagaactccctttccggtctaccgctatgggtatctgaacgtatattgcagcagataaatcagttaacccactacgagccagtgatcggcatcatgggtaaaactggggcgggaaagagtagcctttgcaatgccctgtttgccggtgaagtatcgccggtcagcgatgtagcggcctgtacacgtgatcctttacgctttcgcctgcagattggagaacactttatgaccatcgtggatctgcccggcgtgggcgaaagtggcgttcgcgataccgagtatgctgcgctgtaccgcgaacaacttccccggctcgacctgattctgtggctgattaaggctgatgatcgggcactggcgactgatgagcatttttaccgtcaggtgattggcgaagcataccggcataagatgctgtttgttatcagccagtcagacaaagctgaacccaccagcggtggaaatatcctttccacagagcagaaacaaaatatcagccgcaaaatctgcctgctgcatgagctattccaacccgtgcattcggtgtgtgccgtgtcggttcgcctgcagtggggactaatggtgatggcagagcggatgattaagtgtctgccscgtgaggccagcagcccggtagtagcgctacttcaacatccctttcgaacaacggtagcccgggagcaggcacgtgacgatttcggtgaaaccgtaggtgccatactcgatacggtaagcacctttccccttattcccgccccggtgcggaccattattcaggccgtgcgttcctcggtggtgtcagtggcccgcgctgtctgggatttcttcttctga

SEQ ID NO: 28901 - DNA, 1563 bp, Homo sapiens
  SIMILAR (943)..(1536): 961254mologous to Escherichia coli hexosephosphate transport protein,accession number M89479,Smith-Waterman Score=965.
  misc_feature (1)...(1563): n = a,t,c or g
atgaatattcgccgtaaaaaccgcttgtggattgcctgtgccgtgttggcagggctggcgctgactatcggtctggtgctatatgcgctgcgctcgaatatcgatctcttttatacgccgggggaaattctctacggcaagcgtgaaactcagcaaatgccggaagtcggtcagcgtctgcgcgttggcgggatggtgatgccgggtagtgtgcagcgcgatcccaattcgctgaaagtgaccttcaccatttacgatgctgaaggctcagtggatgtctcttacgaaggcattttgccggatctgttccgtgaagggcagggcgttgtggtgcagggcgaactggaaaaaggcaatcatatcctcgcgaaagaagtgctggcgaaacacgatgaaaactatacgccgccagaagttgagaaagcgatggaagctaaccaccgtcgcccggcgagacccagcatcatgatgccagaaattggtaacggactgctgtgcctggcgctgggaattgcgctgctgctgtccgtgtatccgctatggggcgtggcgcgcggagatgcgcgcatgatggcgtcttcccgcttgtttgcctggctgctgtttatgtctgtggctggcgcatttctggtgctggtcaatgctttcgtggtcaacgacttcaccgtcacctatgttgccagcaactccaatacccagcttccggtgtggtatcgcgtggcggctacctggggcgcgcatgaaggctcgctactgctgtgggtgctgctgatgagcggctggacctttgcggtggcgatttttagtcagcgtattccgctggatattgtggcccgtgtactggcgataatggggatggtcagtgtcggctttttgctgttcattctctttacctctaacccgttctctcgcacgttgcatcttgcgtacccaaatcggtgccagccaatcaactggcgcgggcgacatctggtctggtacttgctgctgtttgttatcagtctctggctccagttgggattgccggacgaactgtcgcgctttacgccattctgtctggcgctgccgattatcgcgctggcctggcactatggttggcaaggggcgctgattgcgacgttgatgaacgccatcgcgctgatcgccagtcaaacctggcgcgatcatccggtggatttattgctctcgctgctggtgcaaagtctgacagggttgttgcttggcgctggcatccagcggttgcgtgaacttaaccagtcgctgcaaaaggaactggcgcgcaatcagcatctggctgaacgggtgctggaaaccgaanaaagcgtgcgccgagatgtggcgcgtgagctgcattatgatatcggtcagaccatcactgctattcgtactcacgccggcattgttcagcggctggcggcagataacgccagcgtgaagcaaagcgggcagcttatcgaacaactatcgctgggcgtttacgacgcggtgcgccctttgttgggtcggttacgtcccgcccagttggatgatcttacccctggaacaggccattccgctcactga

SEQ ID NO: 28902 - DNA, 1755 bp, Homo sapiens
  SIMILAR (1098)..(613): 1001254mologous to Escherichia coli similar to,accession number D90868,Smith-Waterman Score=810.
tcactggtgaacgcacaatctgcgttggcagccaatgaatccgctaaagatatgacctgccaggaatttattgatctgaatccaaaagcaatgaccccggttgcatggtggatgattatcaacccattttgtattggacaggtaccattccaccgatatacgaatcccgctgtcaaacgtttcctgtggtttccatcccaacgcgcgaccaatcttctcagcctcaatagcatagcggcgatcgtgtcccggacgatcagcaacataagtgatttgctcacgataagatttctctttcggtacaatttcatccagcaaatcacaaatagtgagcactacatcgatgtttttctctttgttgtgcccaccaatgttataagtttcacccgctttacgccccacgttcattggaaacgcaaacacggcatagcccaattgttcttcggtacgcaactgattgtagaaccacggctgtacgatctgccccaacagagagctataggctgagctggtgtattcatcgtagccagtcggtacaaataccgctgccagtgcggagtcggtgctgttaccggctttttcaaagatgacggattgtttttctatcgaccacgcaatgcgtacccgatttccgcactctgcaacgctgatggtgacaacgcctttacctttgcaaggctgaataccgtggacaatggcgttctccaccaacggctggatcagcaggctgggaatgcagcaattcacctcttcatcaatatcatagataaccgtcagcttgtcaccaaagcgggcctgctcaatggcaatatagtctttaatttgatacagctcttttttgatatcgatttgctcatcgtcttttaattcaatgttatagcgcagataacgcgacagattaaagatcaactggcgagcggtatccggattcagacggattgacgatgaaatagcgttcagagcgttaaacagaaaatggggattaattttgctttgcagggcgcgaagctctgccttatttgccatttcacgtagctgctcggcgcgtgaaacctccagttgcgtggagatgatttgcgacagaccgaccgccatttccatttccggagacagattagacagcgccgctttttgtgaggaagtcgcagctgcctgcaaacggttgtagttcggcgcaccaaagcgttttgccagttggttgtagtgttcatgcgggttcttaccggtgacagcggtgatttccgccgccagcagacacatgatgatgccgtctttgtcggtggaccagggagtgctgtcgaaacgcaggaaggaagcccctgcactgttttcgcccgccaaagcagaagttgcggtcgaacagacgtattcaatgaaggtttgttccagcaggccgaagtcgttagcctcggggccgaagtagctgatatgccgcccggcgtcgcgcgctttgcggatcgccatgtccatttccgggcgggtgtaacggtgaaaactgtcgccttccacctcagctgcatgcagatttaactgcgcgaatattttacgaaacgcgaggctggtggtggtggtccccgcgccgctggatcctgaacgaatagcttcccggttggcaataacgctcagaccgttaaagttcgccaccacatccagacgtttttcatcaatctgttcggtaaagaaatcggcgggcctgaccacttcaacaatgggtttacccaaccattgccgtccgggggaactcagccccagcat

SEQ ID NO: 28903 - DNA, 1194 bp, Homo sapiens
  SIMILAR (1029)..(7): 991254mologous to Escherichia coli preprotease III (AA -23 to 939),accession number X06227,Smith-Waterman Score=1730.
tcagcgcccaactgttttgacatcgcgtgccagcgttgttgcctgggcctcggtcatgttgccgataaccataaactctggtcgagcccctgattttaaggcgtcgcgataggccagcacctctttcaacgtaatggagggcaaaattttacgccgttcatctcgcgagaagtacggcacttgcgagagcatctgcgcgggcataatcgcctgctcaaacgctttacccttttctgcggaatccatcatctggttataccaggacttcgcctgctcaagctgatcttccgtagcggtatagctaaagtacccctcgagcaatgcctggaacagctgcggcagacgctgggtgtaaccattagcattaaccataaggccgttgttagcgttggtggaaaaacttatgccaccaaccgacgcctggttgcttaactgatcaagcgccagccctgcgagataatcattgagcgcaaacatcacctgattgcgggcgctgtccatggctttcggattacgcaaaatcaggctgacatcagctttgggctcgctggcaaaataacggcttggcgcatacaccacgcgcagattcgactcatcaacaatcagctctggatggtcgtatttcttctctgacttaatcagcgagaaatcatcaggaatataagggttaagctctggcaaagagagcgcaatgtcggcggcttttttctgccagtcggcgaaagtttgtgcgctgattttatcgacctgatacggcgcatcgacaaagtaagccgttttgttgtgcggctctttcgggctgatataccagatacgcgcattctgcggcgtcatcatcgccagacgttcctttactgctttagcatcgtaccgatcggcaatattgactgcatccagcgtatgctcaacaggaacgcgaatcatggtatctgccagccattcgacgtaatccatatcacgggtgatcgacggataacggaagtcgatatccagcacattcgccagttcatcgaagtattgtttatcaattcttactccggcgagcacaagtttaggttcgcctaattcctctacagaagccacggcgaggagcacgcggaaatcccgaaaattaaagccccaaacaagcgcgaaaaacgacagccgtgaagaagccaaaagatcccggttaaaatagtcatacaatcgcaccat

SEQ ID NO: 28904 - DNA, 3090 bp, Homo sapiens
  SIMILAR (1986)..(1279): 1001254mologous to Escherichia coli SERINE/THREONINE PROTEIN KINASE AFSK (EC 2.7.1.-),accession number D90880,Smith-Waterman Score=1208.
ttatacattgggagaactggcggcacttgtcgggctggttacgccagagaatttaaaacgcgataaaggctggattggcgtgttactggagatctggctaggtgccagcgcagggagtaaacctgagcaagattttgctgctctgggcgtggacttaaaactatccctgtggatagtcttggtcgtccgctggaaacaacattcgtttgtattcaggttgagcatgcgctggcaaaagctgtgaatagtaaagactgccgcttcatccatctgccgttcggctaacaacaaccactgcgcggcttgcgctttatcgtcgatctcttccagcaggcgttcgtacagtggattgtcggtggtttcacgcagacaggcgatgcgcaactcgtggatattgctacggatacgaccgcgcaattctgccgtggcagcctcggtaaaggtgaccaccagcagttcttcaacggtcagcgggcggggaaaggcggcggaaccgctagtccaagtaacaggcgcaaatagagcgccgcaatcgtaaaggttttgctcattcttttcactcatcaggggcattgtttgctgcaacgcgctgacgttctcccacactttccagccttcagggtgtacatattcggctttcccgttctggctgccggaaatctgcgacagaatagccatgccttgcggctcgaccaccgcctgatggaagaaatcagcaagtttttgcggcgtcacgagttttatctgggccacgattttatcacgcgaatcgaagcgcatattgccgcgatcgaaatctttacttaacttcgatgcttcttcgccgagcgtttgcgggtgctgcagcatctgggtaattaccgcctgctggatttgcgcaaactcatctggcttcatcgctcgcaattttgcctggcggcgtttttctggggtcagttgttcaagtttattacgatcgacacaaatcagcgcatgagtcgggcaagccgccatacacgccgggccgtcttcacgatggttgcacaggtcgcatttattggcttcggctttgtcagcccgtacattcagacccgcgccgctgttgcggatcaccggacgtaccaccacttccatcgcaccatacgggcaagccacaacgcaggttttgcaaccaatgcaacgttcctgcatcacatgaacaaaccctttatcacggctgatagcaccattcgggcagacgttagcgcacggtgcatcttcacactgacggcaaactgtcgccgtggaaatgttcacacccggttcagtctggaaaccggaactatcaactttttgctgggcaacgaaacgaccatcttcgacgttaatccagtgcagataaccttcactgtcaccgaccaccaggttgccattatacagcaccggagaagtcagcaggcgatgcagcagatcgctttgtgtccacagcgtaacgccgccatcaatggtcaacgccatcacccggtcattttgatcgaccagatagatgcgattgccgtcgacgatgaaatcattcaccgaacccagttcgcgtttccacataatctgaccactgcgcagatcaagcgccgtcaggttaccattataggccagcgcgaaaacaacgccgttaacaacgacgggagtcgtgtcaacatcgctcagacggtcaatttcggtagaaccggtcgcctgggaaatacgctgctgccaaatcatctggccctgttccatcagcactgcgctgacgcgaccattatcgccccccacgacggccgcaccaaaagccgttgtcggcgcagactcgccacgcaaagagagcgaaggcatatcgaggttaactgtccatttgacagcgccgtcagcttcgttcagcgcttgtaactgaccgttactggtgtggattaacaccagaccgtcgctgaccaccgggcgcgaaagtgcttcacccgcgactttagtttgccatgccacagtaccatcgctggttattgccagccacgtactgtcgtttttgtagtggagctttaccgttctggtgatcagtcgcattggtgtggcttttgcacatgcgattttctggtcgattacggcgtctctggcgatccgtatggctccggccgggaagcgagcacaggcattgagtttaattgccaccggtacagcactggcgatggtcttagggttacctctcgggcgcattgtgggccagtatttcggttggcgaatgaccttcttcgcgattggtattggggcgcttatcacccttttgtgcctgattaagttacttcccttactgcggcgaacagtgaaatacacctcggggtgctgagtattttctgggggatcgcgatgatgatcatcgggcttggtatgcaggttaaagtgctggcgctggcaccagatgctaccgacgtcgcgatggcgcagcaggaatcccatcagacgggagatcgcttcaatgccacccttgcccaccagccgcataattgcgccggagctgcgtaggcttccccacaaaataaccgccaccaggaaaaagatcagcggcggcgcaaccatcagtacccaatcagcgaaggttgaactctgacgcactgtggacgccgagctaataaatgccaccatgtcgttatgctggataatttctgccgcttcattggcggtcatccttgtccactgagtttccatttttactcgtttttcgaggaaagcgttcatcccttcctggtaatcttcgctgtcatacaccgcgcggcgcatcccctgaatacgttcaaattcatcggagttcatggtgtgtgcttcgcccagtacacgcagctcttctttgataacggcaatggctaacggcgctttctcagagatgtggtgcgccatttgtaaggtgaaatcttccagttcttccacttccacaacatggttgaggatgccgacagccagcgcgcgggtaaaaatcagctctttgacaatgtggaagcccgcgtcgcgggtcaggttgtgaatgccgaccaggttatacgggacgccgaggtttacaggcgtcattgagaaggttgaggtactggcggcgatgatcagatcggaactcat

SEQ ID NO: 28905 - DNA, 2322 bp, Homo sapiens
  SIMILAR (1237)..(2319): 981254mologous to Escherichia coli secD protein,accession number X56175,Smith-Waterman Score=1730.
atgttcacatacccgcattcgaagttccgcgtcaaccgctttgtgggtcaagtactactgatcgagttttcgattttactagacgggggtcgtaccggcttgggtcattccttatctgtttggtgcatctccggcgattgttcttctttcctgcaaggaaaaccaacgtcgctgccgttgagaaaaccgagtgcgattatttgttctgatagtctttcaggatctgccgacctgctacgtaatcataatttcgtctgtaccgccgccgatacgttcacaacggacatcacgccagaagcgggagacgcgcgcctcatcggtatagcccagaccgtccgtcatctagaggatcccatgcgggcatggaagagcattcacaaaagttgtgaaatcctggacccgatccacagggctcctgtcaaggaaaacacccacccagcacgcaagattaatatatccgacccggctgctggcgctgtagcccgcattcggtacgaaggtgtgttatctgtatgtcgtgcatcagcatcagcttatgtgtcgcgctcacggacgattactgtcgcctgttggtacgttagcaacacaggggtgacgggcgctaccattggtgtaaaacgacagcatcgccacgcgcggctcttctccggtgatggcgcgccaggtttcggcactggcaagcgcgatatccgccagctgcgccgccttgtacgcatccagattcagcgaactttctttgctgctgtacttcacgtcccgacgccttggtccagggctattgatgccgccgcccttctgaccgtcatcgacgttaaagtgctgactgcctgcgcctgccaggcttgccgtacgctggctcttcgcgtagctcaggtgatcgaccggtgcagcaaccctggtgacatcatgtctagcgtcgcgcggaggtactggttcatctcgcgttggtctgctaagcgggactgcgcggtgagctacgatcaagaccctggtcaggcgcagcgttcatgtcggtcatgtctggtcgcggttgatcgggggctatggctgtccgcgtattgccggtcactcatgacgcagactctgctacctgacgatgtgccacgcatattgccgaatgcttcttcgccgagccgtttgcggtgcctgcagcatctgggtaattaccgcctgctggatttgcgcaaactcatctggcttcatcgctcgcaatttagcctctgcggttgggaaaaacgccttgttaaggatctcacgcgtattcaggacactgggcgtgcgaaagagattctgggtgcgacggcaacgctggaattccgtctggtaaacaccaacgttgaccaggccgctgcggcatccggtcgcgtaccgggcgactctgaagtgaaacagacccgcgaaggtcagccagttgtgctgtacaaacgcgtaattctgaccggtgaccatatcaccgactccacttccagccaggacgaatacaaccaaccgcaggttaacatctcgctcgatagcgctggtggtaacatcatgtctaacttcactaaggacaacatcggcaaaccgatggcaaccctgtttgtggagtacaaagacagcggtaagaaagatgcaaatggtcgtgcggttctggtgaaacaggaagaggtgattaacatcgccaacatccagtctcgtctgggtaacagcttccgtatcaccggcatcaacaacccgaacgaagcccgtcagctgtcactgctgctgcgtgccggtgcgttgatcgcgccgattcagattgttgaagaacgtaccattggcccaaccctgggtatgcagaacattgaacaggggctggaggcttgccttgccggtctgctggtttctattctgttcatgatcatcttctataagaagtttggtctgattgcgaccagtgctctgattgccaacttgatcttaatcgtcggcattatgtcgctgttgccaggcgcaacgctgagtatgccaggtatcgcgggtatcgtcttaacccttgcggtggcggtcgatgcgaacgtactgatcaacgaacgtattaaagaagagttgagcaacggacgtactgttcaacaggccattgatgaaggttatcgtggcgcattcagttctatcttcgatgcgaacatcaccacgctgattaaagtcatcatcctgtacgcagtgggtaccggggcaattaaagggttcgcgattactaccggtatcggtgtggcgacgtcgatgtttaccgcgattgtcggtacgcgtgccatcgtaaacctgctatatggcggcaagcgcgtcaagaagctgtcaatctga

SEQ ID NO: 28906 - DNA, 945 bp, Homo sapiens
  SIMILAR (945)..(547): 1001254mologous to Escherichia coli preprotease III (AA -23 to 939),accession number X06227,Smith-Waterman Score=690.
tcagcacatcttctctggcggcacaatctttacgtttcggttatgaaacatcacaaaccggactcgcaacatattgcggcgaaaaaattcaatgattttttgctgatcttcagcaaccagtttgcgctgatagttacccgcttcttgtgcagatgaaaaagctcggtccaatcgtcttttttttcgacatataaataggtctccacgagctttgctgcgggtaagaatgtcaatgttgagttcagaaaaggccatagcagcgctcagtactccggcgaaataaagggatacgattacgatacatatacctttccctgcttctggcaaatatgagctgcgagtgttgcaaacccgaaacgacgcccgtaaaaacaaaacatccacaccaaaataacgatcatcacgacataatttttctttaacatcgcaaaatacaccgttagcgaatgtaattcgctggcctagtccaagtaacaggcgcaaatagagcgccgcaatcgtaaaggttttgcctgtgccggcagaggcttcaatcaggcgctcaccgttctcccacactttccagccttcagggtgtacatattcggctttcccgttctggctgccggaaatctgcgacagaatagccatgccttgcggctcgaccaccgcctgatggaagaaatcagcaagtttttgcggcgtcagcagttttatctgggccacgattttatcacgcgaatcgaagcgcatattgccgcgatcgaaatctttacttaacttcgatgcttcttcgccgagcgtttgcggtgcctgcagcatctgggtaattaccgcctgctggatttgcgcaaactcatctggcttcatcgctcgcaattttgcctctgcggttgggaaaaacgccttgtaacgctcccacaagaatgaaggctgtttatcattgctttgcaaaaggaagcccat

SEQ ID NO: 28907 - DNA, 3384 bp, Homo sapiens
  SIMILAR (1880)..(1933): 631254mologous to Plasmid R100 transposase of Tn10,accession number AP000342,Smith-Waterman Score=51.
atgttcccggcacaggttcgcgcattaggcgttggtctgtcatatgcggtcgctaatgctatatttggtggttcggcggagtacgtagcgttgtcgctgaaatcaataggaatggaaacagccttcttctggtatgtgaccttgatggccgtgagaacatcaatccaaacatggcactgcgatcccggctttgagcctgatggtgaaggtgagcatattctggttagaatcctcaaaaacggctgcaatacccgttttgtggcggatgcactggcgaaattcctgaaaattcatgcccgtgaagtcagcttcgctgggcaaaaagacaaacatgctgttacggaacagtggttatgcgctcgcgtgccgggcaagggaatggcccgatcttggagcgccctttttcacctgggccagggcttggccaggttggctggaggtattccgcggggacaaagcaatatagaaggagccaatcagctgggcattaccagtattctggtgaaagataaaaccaccatcccggactatttcgcgaaggacaaagccaggcaccgtacccgtccactatgggcctggctaaaactactctggcaacgcattgatgaggacaacatgacaaccctggcaggtaaccttgcctatgtgtcgttgctctcattagtgccgctggttgccgttgtttttgcgcttttcgccgcttttcccatgttttccgacgtcagcattcagttacgtcactttatttttgccaactttctgcctgctactggcgatgttattcagcggtatatcgaacaatttgttgccaattccaacaagatgaccgccgttggggcgtgcgggctgatcgtcaccgcgttattgttgatgtactccatcgatagcgcgttgaataccatctggcgcagtaaacgagcgcgaccaaaaatttactcgttcgccgtgtactggatgattttaacgctggggccgctgctggcaggggccagtctggcgatcagttcctatttgctctccctgcgctgggcgagcgatctcaatactgtcatcgacaacgtgctgcgtatttttccgttgctgttgtcgtggatctccttctggttgctgtacagcattgttcctaccatccgcgtacctaaccgcgacgcgattaaagctcatgaccaatttctagccgaccttgcgagcattctaccgagtaacaccacaccgctcattgtcagtgatgctggctttaaagtgccatggtataaatccgttgagaagctgggttggtactggttaagtcgagtaagaggaaaagtacaatatgcagacctaggagcggaaaactggaaacctatcagcaacttacatgatatgtcatctagtcactcaaagactttaggctataagaggctgactaaaagcaatccaatctcatgccaaattctattgtataaatctcgctctaaaggccgaaaaaatcagcgctcgacacggactcattgtcaccacccgtcacctaaaatctactcagcgtcggcaaaggagccatggattctagcaactaacttacctgttgaaattcgaacacccaaacaacttgttaatatctattcgaagcgaatgcagattgaagaaaccttccgagacttgaaaagtcctgcctacggactaggcctacgccatagccgaacgagcagctcagagcgttttgatatcatgctgctaatcgccctgatgcttcaactaacatgttggcttgcgggcgttcatgctcagaaacaaggttgggacaagcacttccaggctaacacagtcagaaatcgaaacgtactctcaacagttcgcttaggcatggcaagtttgcggcattctggctacaccataaccacgggaagactcactcgtgggttggacccgcttatcccaatctttctcacatggcttgcacaaccgttatggcgttctcgtgccggaaggttgaacacgtcggcaaaaatctggcataaacagatcgctgttcgaaccgccgccagtaatgatcacatgcttcgcaaacgtcagcgccacgctttccagtatcgaacgatatatccatgcgtaatccatgctggaatcaaagccgatcataatcccgcgtttgtacggttcccacggattgaggtgtctatgtccgtcccggtccctgttcgcacagggtgtgatgcgggatccttgcgggtatcaacgggaagagggtggccaggcttcaaaatccgggggaaggaggggttcaccctttggggacttcttttccggggaggaaatcaacttacgggggaaaattaccaacagcgagatgagttagcacgggaacgccatcgcgctgatcgccagtcaaacctggcgcgatcatccggtggatttattgctctcgctgctggtgcaaagtctgacaggcggttgcgtgaacttaaccagtcgctgcaaaaggaactggcgcgcaatcagcatctggctgaacggttgctggaaaccgaagagagcgtgcgccgtgatgtggcgcgtgagctgcatgatgatatcggtcagaccatcactgctattcgtactcaggcgggcattgttcagcggctggcggcagataacgccagcgtgaagcagagcgggcagctcatcgaacaactatcgctgggcgtttacgacgcggtgcgccgtttgttgggtcggttacgtccgcgccagttggatgatctcaccctggagcaggccatccgctcactgatgcgggaaatggagctggaagggcgcggtattgtcagccatctcgaatggcgaatcgatgaatcagcgttaagcgaaaaccagcgcgtgacgctgtttcgtgtctgccaggaagggctgaacaacattgtgaaacatgctgatgccagcgcggtcaccctgcaaggctggcagcaggatgaacggttgatgctggttattgaagacgatggcagcggtttgccgccgggttccgggcaacaaggttttgggctcaccggaatgcgcgagcgcgttacggcgctgggtggggcatttcacatttcctgtctgcacggtacgcgtgtcagcgtttctctagctcaacgccatgtctaaggtttgatgatgttgccgtttctgaaagcgcctgccgatgcgccattaatgactgataaatatgaaattgatgcccgctatcgctactggcgtcggcatattctgctgaccatctggctgggttacgcgctgttttacttcacgcggaaaagttttaacgccgccgtaccagaaatccttgctaacggcgtgctcagccgtagcgatatcggcctgttagcgaccctgttttacattacctatggcgtgtcgaagtttgtctccggcattgtcagc

SEQ ID NO: 28908 - DNA, 1374 bp, Homo sapiens
  SIMILAR (498)..(178): 1001254mologous to Escherichia coli KatF,accession number Z14966,Smith-Waterman Score=548.
  misc_feature (1)...(1374): n = a,t,c or g
ctatattgaagatttgatgcgctggcgcaggcgggcgcggacattatcgccattgacggcaccgaccgcccgcgtccggtgcctgttgaaacgctgctgcacgtattcaccatcacggtttactggcgatgaccgactgctcaacgccgaagacggcctggcatgccaaagncgaaacgctttttcggaatcaccacccagcggggtgtctaccgaggtaatgcgctcgttaagacgaagcatacggctgacgtcatcaactggcttatccagttgctctgcgatctcttccgcacttggttcatggtccagcttatgggacaactcacgtgcggttcgcaggtaaacgttcagctcctttacgatgtgaatcggcaaacgaatagtacgggtttggttcataatcgcccgttcaatcgtctggcgaatccaccaggttgcgtatgttgagaagcggaaaccacgttccgggtcaaacttctctaccgcgcggatcagcatctggctgaacggttgctggaaaccgaagagagcgtgcgccgtgatgtggcgcgtgagctgcatgatgatatcggtcagaccatcactgctattcgtactcaggcgggcattgttcagcggctggcggcagataacgccagcgtgaagcagagcgggcagggtaccgagctgatttacccgccacgggaatattggtattaggactgttttctgcggcgtcttatcaaaagaccgttcgggacaagtatgaaggatcaggcggtcagattcgaagaaggctttatggcaatgggcgcactgggcctggcgatggtcggtatgaccgcgctggcaccggtactggctcacgttctcgggccggtaattattccggtttacgaaatgctcggcgctaacccatcgatgttcgccggaacactgctggcgtgcgatatgggcggctgtcttcctcgccaaagagctggcgggcggcgtgcggcttctggttttgattttctgatacatcagcggctgggttgcgctcggctcgtcggcttcgttgtggccgtgacggcggtagcacaccaggtcgatgaagacatcacgtttaaaggtgttacggaaatcgagcgccacttctacttccagtggtttgccgttacgcagcaggccaagcttcactttcgtgcccggctcggtggtcgcgatacgagagcgcaactcagcaaagctattcagcggttggcttccaatcaatccactagatgtcgttaaccacccaactaatttccatccaatacgtaatccaaattctcttttcaaaacccatttcactgtacagttcaacctgtagccttttaatctccgtaaattatttcttcctccaacagacat

SEQ ID NO: 28909 - DNA, 4604 bp, Homo sapiens
  SIMILAR (2625)..(3845): 991254mologous to Escherichia coli UhpC protein,accession number M17102,Smith-Waterman Score=2138.
atgctacgatttatgcccgtcattactgccggcactagatgccgtgccggctgcgggccttgcacggtgccgtacacggcattgccacgccttcgcctactgcgcgccctgccttacacccccacccccagccctaatcttgcccaaagccgcccgggattgtcctgggcccatgctgccactttgttagcttatgcctacctgtttgacaccgggtttaaactccccctggttagccctaaaaccaaagaaagtcctgctaaaacctgtcaacaaagtccaagggtccccacatatgaccacagattctacatcactataccattgttaacgcagagctgttctcaaaatgggtttagagcaacaaaaaccgccaaatttatcttacaaggaagaccagaagcccacagaatcatgaaaacaggggtacaggttttggtgtgctcacacgccccagtaagcggccccctttccgcgccctgctgcgctttttccaccaacgctaacaacggccttatggttaatgctaatggttacacccagcgtctgccgcagctgttccaggcattgctcgaggggtactttagctataccgctacggaagatcagcttgagcaggcgaagtcctggtataaccagatgatggattccgcagaaaagggtaaagcgtttgagcaggcgattatgcccgcgcagatgctctcgcaagtgccgtacttctcgcgagatgaacggcgtaaaattttgccctccattacgttgaaagaggtgctggcctatcgcgacgccttaaaatcaggggctcgaccagagtttatggttatcggcaacatgaccgaggcccaggcaacaacgctggcacgcgatgtgcaaaaacagttgggcgctgatggttcagagtggtgtcgaaacaaagatgtagtggtcgataaaaaacaatccgtcatctttgaaaaagccggtaacagcaccgactccgcactggcagcggtatttgtaccgactggctacgatgaatacaccagctcagcctatagctctctgttggggcagatcgtacagccgtggttctacaatcagttgcgtaccgaagaacaattgggctatgccgtgtttgcgtttccaatgagcgtggggcgtcagtggggcatgggcttccttttgcaaagcaatgataaacagccttcattcttgtgggagcgttacaaggcgtttttcccaaccgcagaggcaaaattgcgagcgatgaagccagatgagtttgcgcaaatccagcaggcggtaattacccagatgctgcaggcaccgcaaacgctcggcgaagaagcatcgaagttaagtaaagatttcgatcgcggcaatatgcgcttcgattcgcgtgataaaatcgtggcccagataaaactgctgacgccgcaaaaacttgctgatttcttccatcaggcggtggtcgagccgcaaggcatggctattctgtcgcagatttccggcagccagaacgggaaagccgaatatgtacaccctgaaggctggaaagtgtgggagaacggtgagcgcctgattgaagcctctgacggcacaggcaaaaacctttacgattgcggcgctctatttgcgcctgttacttggactaggcggttccgccgcctttccccgcccgctgaccgttgaagaactgctggtggtcacctttaccgaggctgccacggcagaattgcgcggtcgtatccgtagcaatatccacgagttgcgcatcgcctgtctgcgtgaaaccaccgacaatccactgtacgaacgcctgctggaagagatcgacgataaagcgcaagccgcgcagtggttgttgttagccgaacggcagatggatgaagcggcagtctttactattcacggcttttgccagcgcatgctcaacctgaatgcctttgaatccggcatgctgtttgagcagcagctgattgaagatgagtctctgctacgctaccaggcctgcgccgatttctggcgtcgccactgctacccgctgccgcgtgaaatagctcaggtcgtctttgaaacctggaaagggccgcaggcgttgctgcgcgatattaatcgttatctgcaaggcgaagcgccggttatcaaagccccgccgcccgatgatgaaacgctggcttcccgtcacgcgcaaattgtggcgcgttgatatcggtcagaccatcactgctattcgtactcaggcgggcattgttcagcggctggcggcagataacgccagcgtgaagcagagcgggcagctcatcgaacaactatcgctgggcgtttacgacgcggtgcgccgtttgttgggtcggttacgtccgcgccagttggatgatctcaccctggagcaggccatccgctcactgatgcgggaaatggagctggaagggcgcggtattgtcagccatctcgaatggcgaatcgatgaatcagcgttaagcgaaaaccagcgcgtgacgctgtttcgtgtctgccaggaagggctgaacaacattgtgaaacatgctgatgccagcgcggtcaccctgcaaggctggcagcaggatgaacggttgatgctggttattgaagacgatggcagcggtttgccgccgggtttgatgatgttgccgtttctgaaagcgcctgccgatgcgccattaatgactgataaatatgaaattgatgcccgctatcgctactggcgtcggcatattctgctgaccatctggctgggttacgcgctgttttacttcacgcggaaaagttttaacgccgccgtaccagaaatccttgctaacggcgtgctcagccgtagcgatatcggcctgttagcgaccctgttttacattacctatggcgtgtcgaagtttgtctccggcattgtcagcgatcgctcaaatgcccgttattttatggggatagggcttatcgccacgggcattatcaacattctgtttggcttctcgacgtcgctatgggcgtttgccgtgctctgggtgctgaacgcctttttccagggctggggttcaccggtgtgtgcgcgtctgttaacggcctggtattcacgtaccgagcgcggcggttggtgggcattatggaacacggcgcataacgtcggcggcgcactcattcccattgtgatggcagcggctgcgctgcattacggctggcgtgccgggatgatgattgctggttgtatggcgatagtcgtggggatttttctctgctggcggctacgcgatcgcccgcaggcgttaggtttaccggcggtcggtgaatggcgacacgacgcgctggaaattgctcaacaacaagaaggggcagggttgacgcgtaaagagatcctcaccaaatatgtgttgctgaatccgtatatctggctgctttcgttttgctatgtgctggtctatgtggtccgggcggcgatcaacgactggggcaatttgtatatgtccgagacactgggcgtcgatctggtcacggcgaatacggcagtgacgatgtttgaactgggcggatttatcggtgcgctggtagccggttggggctcggacaaattgtttaacggcaaccgagggccgatgaatttgattttcgccgccggaattttgctttcagtcggctccctgtggctgatgccatttgccagctacgtgatgcaggcaacctgcttcttcaccattggtttttttgtctttggcccacagatgttaatcggtatggcggcggcagagtgttcccacaaagaggcggcaggggcggcgacggggtttgtcggcttgtttgcttatctgggggcgtcgcttgctggttgggcgctagggaaagtactcgatagtaaaccgtcccattcccaaaaattagaaccgaagattaagtttaacctgggggcccatgaggtggcaacccataaagggcgtgcccaggagcgaatccacggaaacgcgggcacgggaaagagacggccagcgcgaaaggacaataggggcatcggatccccatacaggagagcccggggacagacacaaatcaagcggaggtatccaaacgggttggtcgtcgaccaagctggctggtgccgaccccgtgtgaggtggaaagagagaagagaggacgaagaaagaagaaaagaaggagagagaagagaggaaagaagaaggagaggcggaaacgacaagagagaggaagcagaaaagacgagaaagaagaaaaagaaggagagagaaagagagggagggggggacgacaaacggaagaagacgcaggccaactgggttggtgcagaaccccggtcagcaaacgctggccttacggtactatggttgagtcaaccggagaccagtatggctggcacaccattgaccagacacagcaatagacacaagacacagacgcaatcaggaccgagatcgcaaaccgacgacgagaacagcacacaaacagcagcaagatcgaaagagcagcagaagagcaagacgagagccgcggcgcgagggacagcagaagcgacagaagtgaaccctgacgcagatagtccatcgctgccaggtgctctttccacagggagtcaagcgtttagcgcaaatgcagcagcttag

SEQ ID NO: 28910 - DNA, 287 bp, Homo sapiens
  SIMILAR (65)..(118): 941254mologous to Escherichia coli ORF_f118,accession number U28377,Smith-Waterman Score=81.
cgcgtccggcatcacgtccggtgacgaaatttgatcaacgtggtcatcgtcttggtcacggagtatggaacttaatgttcgagagggtgaaataatggcaaagaaccgtagccgtcgtcgaacaaactggcctttgacggcagcggttatctggcctgggaaggtctgatctgcatgcaggaaatcggcaaatgcaccgaagaacatcaggcgattgtgcgtaagtggctggaagagcgcaaactggatgaggtacgcaccagcgaacttttcgacgtttggtggga

SEQ ID NO: 28911 - DNA, 171 bp, Homo sapiens
  SIMILAR (3)..(56): 611254mologous to Pseudomonas aeruginosa DNA mismatch repair protein MicA,accession number AE004476,Smith-Waterman Score=58.
cttatgcggaacatatgcttgaagtgatgtcttctattggcgattatacaaaccgcgtccggcatcacgtccggtgacgaaatttgatcaacgtggtcatcgtcttggtcacggagtatggaacttaatgttcgagagggtgaaataatggcaaagaaccgtagccgtcgt

SEQ ID NO: 28912 - DNA, 2187 bp, Homo sapiens; identical to SEQ ID NO: 15995
  SIMILAR (877)..(1653): 991254mologous to Escherichia coli MukB,accession number D31701,Smith-Waterman Score=1303.

SEQ ID NO: 28913 - DNA, 2374 bp, Homo sapiens
  SIMILAR (350)..(1066): 1001254mologous to Escherichia coli ORF_f239; alternate name yggH; orf of M59471,accession number U28377,Smith-Waterman Score= 1272.
  misc_feature (1)...(2374): n = a,t,c or g
ggtcaccgtcgggaagcgcgccataaagcgttcaaaataggggataacggtcgcaacctgagtttgttgcaacatcacttctgagagccatactttgtagggcgtcttgtcaatttgccagggcagagtttttcgcccgtatttatcgtaccagtccagaacctgggctgaaaattgcgacgcttgcatggtcaccgaattcactgttgttgggggcaagattgcagcacagcgacggcagggtgtaaaccggaactttccgcagccacggccttatcatgcttgcatccggcaactaactttggataatgcccgttttcagaacactttcacaagcgactaaacctttatgaaaaacgacgtcatttcaccggaatttgatgaaaacggccgcccactgcgccgtatccgtagttttgtgcgccgccaggggcgactgaccaaaggccaggaacatgcgctggaaaactactggccggtgatgggcgttgagttcagcgaagatatgctggatttccccgcgctttttggccgtgaagcgccggtgacgcttgagattggttttggcatgggggcgtcgctggtggcaatggctaaagatcgccctgagcaggacttcctcggcattgaagtgcattcaccgggcgttggtgcgtgcctggcttctgcgcatgaagaaggtttaagcaacctgcgcgtgatgtgtcacgatgcggttgaagtgctgcataaaatgattcctgacaattcattgcgcatggtgcagctctttttccctgacccgtggcacaaagcgcgccataataaacgccgtatcgttcaggtgccgtttgccgaactggtaaaaagcaaactgcagctggggggcgtattccatatggcgaccgactgggaaccttatgcggaacatatgcttgaagtgatgtcttctattgacggttataaaaacctgtcagagagcaatgattacgtaccgcgtccggcatcacgtccggtgacgaaatttgaacaacgtggtcatcgtcttggtcacggagtatgggacttaatgttcgagagggtgaaataatggcaaagaaccgtagccgtcgtctgcgtaaaaaaatgcacatcgacgaattccaggaattaggattttcggtggcatggcgattcccggaaggtacatcggaagaacagattgataaacccgttgatgattttattaacgaggttatcgacccgaacaaactggcctttgacggcagcggttatctggcctgggaaggtctgatctgcatgcaggaaatcggcaaatgcaccgaagaacatcaggcgattgtgcgtaagtggctggaagagcgcaaactggatgaggtacgcaccagcgaacttttcgacgtttggtgggactaagaaagcatacgggcgatgacaaatgcaaaactgcctgatgcgctacgcttatcaggcctggaaagatgcacgatcgagtaggcgggataaggtgtttacgccgcatccggcatggaaaacgcgtactttgttatcaatctggggccagcaaatgctggcctgattttttcttgagggaagactatgatgcgcaaaatgctgctggcggcagcactttcagtgacggcaatgaccgctcacgccgactaccagtgcagcgtcacgccgcgtgacgatgtgattgtcagcccgcaaaccgtgcaggtgaagggcgaaaacggcaatctggtgatcacgccagacggcaacgtgatgtataacggtaagcaatattccctgaatgccgcccagcgcgagcaggcgaaggattatcaggctgaactacgcagcacgctgccgtggattgatgaaggcgcgaaaagccgcgtcgagaaagcccgtattgctctggataaaattatcgttcaggagatgggcgaaagcagcaaaatgcgcagccgtctgaccaaacttgatgcgcaggtgaaagagcagatgaaccgcattattgaaacgcgcagcgatggcctgacgtttcactataaagccattgatcaggttcgcgccgaaggccagcaattagtgaatcaggcaatgggtggaattttacaggacagcattaatgaaatgggcgcgaaagcggtgctgaaaagcggcggtaacccattacagaatgtgctgggaagcctgggggggctgcaatcctcaatccaaaccgagtggaaaaagcaggaaaaagatttccagcagtttggcaaagatgtttgtagccgcgttgtgactctggaagatagccgcaaagccctggtcgggaatttaaaataatcctctattttaagacggcataatacttttttatgccgnttaattcttcgttttgttacctgcctctaactttgta

SEQ ID NO: 28914 - DNA, 1049 bp, Homo sapiens
  SIMILAR (489)..(755): 871254mologous to Escherichia coli small subunit of terminal dioxygenase,accession number Y11070,Smith-Waterman Score=399.
gctaggggacagatgctcggggagaggggagctgcgcgggcgagcagcaggaggcatggggcagtgtgggcggaggggagagcggaaggagtgagaggagtggaacgagggacgatggcgcagagaggaagagagggggataacacctggggggtccggggccagggggtgcggcgcggcacgtagcgaaggcgcgaggagagagatcatgctaaagagaagttttgaaaaagaaagggtgcgaagaagggcctataataccgggggctgccaccggggggagaggaaaggagtggccaagtgtcagaggagtgtcgtctccgcattaggccagttttctcgttcaggaatccagctgctggaccgactgggaaatttcgggacggggtggcccaacttcgaccgaaagaggttcggttccaccatgcgcaccacagttaacgcgcaaacacgcgaccgccgcaaaggcgtccagccaccgacagccctggatttttaatgacaccaaagaccagctggagcggcgaatcgcccgtctggaaacgggcatggcctgggcagaagagccgccgtcacgcacccgtcacttaatcagcatctgccagataagcgaacccgacatcccaaacgtattttctgtgcgggtaaattatctgctttatcgggcccacaaagagcgcgatgaaacattctatgttggaacgcgtttcgacaaagttcccccttctgaagaatacaacctggcgctgcttgaaacgggatatcgtcctggatcaagcggtaatcacttcccataacctgagtgtactgttctgatgaatcgaatttatgcgtgtcccgttgcggatgtgccggagggtgaggctctccggatcgatacctcgcccgtcatcgccctgttcaacgttggcggcgagttttatgccattaacgatcgttgcagccatggtaatgcgtcaatgtcagaagggtatctggaagatgacgccacggtggagtgcccgctacacgccgccagtttttgcctgaaaacggggaaagcgttatgc

SEQ ID NO: 28915 - DNA, 1671 bp, Homo sapiens
  SIMILAR (691)..(1473): 991254mologous to Escherichia coli K12 putative transport system permease protein,accession number AE000302,Smith-Waterman Score=1328.
atgctttttgatgtttttcagcaataccccacggcgatgcccgtcctggcaaccgtcggaggattgatcatcggcagttttttgaatgtggtgatttggcgttacccaatcatgctgcgccaacaaatggcggagtttcacggcctctccacagtgggtcacagttacccgaatccggttttgcagatgctgttatcccctgatttccaaaataagtttcgccaaagggaaaaaattagtgttcgtctttacaaaatcttggtaattgtctacggccatcagacgtcggtattcatcccacgcatagagttcggtcataccgctgatataatcctgcagccaggcgtcaacggcattttcaaccaccagcgaaaagagcgaacctttctcatgctggccccacgcttcgtgcaaatgatgataaagctgctcaacggtaaatattcttttctctaccgcatcttcaagaccaccgccggaacgcgtaccgtagtggatttcgccggtttcacggtcgtaaatacgggtgctctgaccaatgtatacgcccatggaaatgacggaaccttcttcgacaatcaccccttcaaccacttcagagcgcgcgccgatgaagcaattatcttcaatgatggttgggttagcctgcagcggttccagcacgccgccgatgcccacgccacaggaaaggtggaggtgctggaaagccacggcgtaccgacggtgaataaagtgcaactcggaacgactcctgtggtgcgcggggcgattacttccggtgaactggatatctatccggaatataccggcaatggcgctttcttctttaaagatgaaaacgatgcagcgtggaaaaacgcgcagcaaggttacgagaaagtcaaaaagctcgattcggagcacaacaagttaatctggctgacgcccgcgcctgcaaataacacctggactatcgccgtgcgtcaggatgtggcagagaaaaataaactcacttcgcttgccgacctgagtcgttatctgcaagagggcggcaccttcaaactggcagcctcggcagagtttatcgaacgcgccgatgcgttacccgcgtttgaaaaagcctatggctttaagctcggtcaggatcagttgctgtcactggctggtggcgacacggcggtgacgatcaaagccgctgcccagcaaacctctggcgttaatgctgcaatggcttacggcactgacggcccggtagcggcgctggggctgcaaaccttaagcgatccgcaaggtgtgcaacctatctacgcgcctgcaccagtggtgcgtgagtcggtgttgagggagtatccgcaaatggcacagtggctacagccagtcttcgccagcctcgatgcaaaaacattgcagcaactgaatgccagcattgctgtggaaggactggatgccaaaaaagtggctgccgactacctgaaacaaaaagggtggacgaagtaatttcccgtgacttatttccgtattaatcctgttctggcgctgctgctgttgctgacggcaatcgcagcggcgctgccgtttatcagttacgcgcctaatcgtttagtttcgggtgaggggcgtcatctctggcagctgtggccgcaaacgatctggatgctggtggtcgttggttgcccctggctgaccgccttg

SEQ ID NO: 28916 - DNA, 1434 bp, Homo sapiens
  SIMILAR (403)..(720): 991254mologous to Escherichia coli ferredoxin,accession number Y11070,Smith-Waterman Score=564.
atggcttacggcactgacggcccggtagcggcgctggggctgcaaaccttaagcgatccgcaaggtgtgcaacctatctacgcgcctgcaccagtggtgcgtgagtcggtgttgagggagtatccgcaaatggcacagtggctacagccagtcttcgccagcctcgatgcaaaaacattgcagcaactgaatgccagcattgctgtggaaggactggatgccaaaaaagtggctgccgactacctgaaacaaaaagggcaagatgtcgctttccgttctcagcaagcgcaacgtgcctgtcgtaccgggcttcaggagaataagtggcggacggccagtaatggtgctggcactgtcgacgcttccccggcggcccaacgcgttgcgggttgtactgttctgatgaatcgaatttatgcgtgtcccgttgcggatgtgccggaggctgaggctctccggatcgatacctcgcccgtcatcgccctgttcaacgttggcggcgagttttatgccattaacgatcgttgcagccatggtaatgcgtcaatgtcagaagggtatctggaagatgacgccacggtggagtgcccgctacacgccgccagtttttgcctgaaaacggggaaagcgttatgcctgcccgccaccgatccgctcaccacttatccagtacacgttgaaggtggtgacattttcatcgacttaccggaggcgcagccatgagcgatctgcataacgagtccatttttattaccggcggcggatcgggattagggctggcgctggtcgagcgatttatcgaagaaggcgcgcaggttgccacgctggaactgtcggcggcaaaagtcgccagtctgcgtcagcgatttggcgaacatattctggcggtggaagcgattcgcgcattcgccacgtagcggctgggctggatctttaaggaagcacgatgaaagaaaaaacgatcattattgtcggtggcgggcaagcggcggcaatggctgcggcctcgtacgccagcaagggttcaccggtgagctgcatctgttttccgatgagcgacatcttccttatgaacgacctccactctcgaaatccatgttgctggaagattccccgcagttacagcagtcttttacgatcgagcagcatgaagatttaaaaagtcatgagctggtgtcgctggtcaaagaaagtgagatggaatctctttccttactgtttgattttgcgaacatgatcaatgcaaatgagcatcccatcgacgctttaaaaacgatggcaccgcatattacccaggtccatatcaaagatgccttgatcgttaaagaaccgggtggcctgggtcataaagcctgtatttcaggtcagggtgatatgccgttcaaagcgttattaacgcaccttatctgcctgggtgatgatgagccgcagtga

SEQ ID NO: 28917 - DNA, 359 bp, Homo sapiens
  SIMILAR (351)..(1): 991254mologous to Escherichia coli K12 survival protein,accession number AE000358,Smith-Waterman Score=605.
ccctttattttgatccaagggtaaatccggaacgttaatattaagaatacgcccggtgcgcagcggctctttacacagtgcgcgcaaaattgaacaggttaccgccgcggcagtgtcgtaatgtttatgcccgtcaagcgagacggcaagcgccggaaaacctaaatgacggccttccatcgcggcggctaccgtaccggaataaataacatcatcccccagattcggcccggcgttaattccggacacaacaatgtccgggcgcggacgcatcagagcattcacgccaagatagacgcaatcggtcggggttcccatttgcacagcaatatcaccattttcaaaggtaaactgggcca

SEQ ID NO: 28918 - DNA, 2502 bp, Homo sapiens
  SIMILAR (1063)..(1536): 931254mologous to Escherichia coli K12 putative isomerase,accession number AE000179,Smith-Waterman Score=790.
atgcagcggcgtgatggagacatagccctcatctaccgcagcaaaatcggtccccggaccagcatcacatttaccgcccggcgggccaatccagtacagcgtattgccgcgcggatcttgctgcgggatcacctgatctgccggatgtcgtgtaccgcagcgcgtcacgcgaatacctttgatttgatccaagggtcaggggcagacaatttcgcagccatatatggtggcgcgaatgaccgaattactcgagctgacgccgcagtcgcgggtgctggaaattggcaccggttcgggatatcaaacggcaaactgtcgccgcgttctatcaccaggacatccagcccggctcgtgccatgaccaaaatgccctataatccacaggcttctggcgggagcaatctggcggtcagtaaccctgagctggataaactaatagccgcacgcgttgctgcattacgggccgctaacccggatgccagcgcgagcgttccggttgaactggtgacggcatcggcaagttacccaaggagcttgatgagatgtaacaggattctatctccaggaagtgcacgtggacaaatgattataacagcactgtttatctatgcgggtaacccgattgcctgcgtggctgcgctggaagtgttgaaggtgtttgagcaggaaaatctgctgcaaaaagccaacgatctggggcagaagttgaaagacggattgctggcgatatcattctggcgtgctaaatggctgaaaatattcgtcgtttgcggagccgagatctttgttgagtatgtgctgaaaaacaaagtgatctggctgctgtgcttcgccaacattttcctctatgtggtacgtattggtatcgaccagtggtcaaccgtatacgcgttccaggaactgaaactctctaaagcggtggcgattcagggctttacgctgtttgaagctggtgcgctggtcggtacgctgctgtggggctggctctctgacctggcgaacggtcgccgtggcctggtggcctgcatcgcgctggcgctgattatcgccacgctcgtcatcccttttcatatggtattccatccaaacgaacaatatgcgtattgcgtcaatgagttaaacagctcagtggatgtctgggaactgaaagatccgcacggtaatatcgaatgtgtccagacgctggatatgatgccggaaaacttctccgacacccgttgggcggctgatattcatatcaccccggatggtcgccatttatacgcctgcgaccgtaccgccagcctgattaccgttttcagcgtttcggaagatggcagcgtgttgagtaaagaaggcttccagccaacggaaacccagccgcgcggcttcaatgttgatcacagcggcaagtatctgattgccgccgggcaaaaatctcaccacatctcggtatacgaaattgttggcgagcaggggctactgcatgaaaaaggccgctatgcggtcgggcagggaccagatgtgggtggtttgaccatcgccgttaccgcccacgagggtgatatttttaccgagcagttcaaacagcggtttaacacgttcaaataccgcttcatcaccgccaaccataatcgacaagaggctccaccgcgcagccgcaaaaagagcggacgggtctgcgccgccgcaggaggagcaggcgccgccgccatcatgctgctgcctgtgttcaccctgaaactgcgccacaaaatcagcccccgaatggtggccatagggcgctacgacgggactcacccgtgcctggcggccgccacccaaacgggcaagtccctgatcaatcgatgcggtatacagttcgacgtccgggtgcgctttttccagcgcagcgataccttctggcgcagctaccagcaccagaactttgatgctgctgcagcccgcttttttcagcaggtcgatggtcgcgataacggaaccaccggttgccagcattgggtcaacgatcagcgccatacgctcatcgatgttagaaaccagtttctggaagatccgctgaagtttgaaaaggacaaaataaaaggggcgattcgtaccgattttatattgtctgcggaaatcgtcgccatcacgctggggattgtggatgccaaagctggaagaaaagaaattatgatgtccaccacgttatttaaagatttcaccttcgaagccgctcaccgcttaccacacgtcccggaagggcataaatgtggtcgcctgcacgggcattcctttatggtgcgactggaaattaccggggaagtcgatccgcatacgggctggattatcgatttcgctgaactaaaagcggcgtttaaaccaacctacgagcgcctcgatcaccattatctcaatgatattccaggtctggctggtgctctcgcgactgaatatgcgccagggcgcgacgccaggcgatacgccgcgccgctacgcttaagccacgcagtaccgtctggtacagcaggttccagatga

SEQ ID NO: 28919 - DNA, 1944 bp, Homo sapiens; identical to SEQ ID NO: 24343
  SIMILAR (1165)..(1941): 921254mologous to Escherichia coli K12 putative frv operon regulatory protein,accession number AE000465,Smith-Waterman Score= 1208.

SEQ ID NO: 28920 - DNA, 586 bp, Homo sapiens
  SIMILAR (6)..(449): 991254mologous to Escherichia coli cytidine deaminase,accession number M60916,Smith-Waterman Score=755.
tgggtattcttctgccgggccgcgaggcacacgcgctgcgtgactatctgccagatgcctttgggccgaaagatctggagattaaaacgctgctgatggacgaacaggatcacggctatgcgctgacgggtgatgcgctttctcaggcagcgattgcggcggcaaaccgttcgcacatgccttacagtaagtcgccaagcggtgtcgcgctggaatgtaaagacggtcgtattttcagtggcagctacgctgaaaacgccgcattcaacccgactctgccaccgttgcagggagcgttaattctgttgaatctcaagggttatgattacccggatatccagcgcgcggttctggcagaaaaagccgatgcgccgttgattcagtgggatgccacctccgcaacgctgaaagctctcggctgtcacagtatcgaccgagtgcttctcgcttaagcctggtgccggatgcggcgtgaacgccttgtccggcttgccagccctctcctggtgtcgaaattcccggcaaacagtttgccgtttcttgcgcaaaaccagcgggtaaagtagcctgatggaaattttcctta

SEQ ID NO: 28921 - DNA, 3684 bp, Homo sapiens
  SIMILAR (2995)..(3471): 961254mologous to Escherichia coli Methyl-accepting chemotaxis protein IV (MCP-IV) (Dipeptide chemoreceptor protein),accession number D90830,Smith-Waterman Score=776.
atgtgcgaactcgatattttacacgactctctttaccaattctgccccgaattacacttaaaacgactcaacagcttaacgttggcttgccacgcattacttgactgtaaaactctcactcttaccgaacttggccgtaacctgccaaccaaagcgagaacaaaacataacatcaaacgaatcgaccgattgttaggtaatcgtcacctccacaaagagcgactcgctgtataccgtaggcatgctagctttatctgttcgggcaatacgatgcccattgtacttgttgactggtctgatattcgtgagcaaaaacgacttatggtattgcgagcttcagtcgcactacacggtcgttctgttactctttatgagaaagctagttcatatggggcggagcagtatgctctggtcgtcggttccgatgtactggcgcgcacctgcgatccaaccgatcgtgggactattattatttttggcgatggcgcgggcgctgcggtgctggctgcctctgaagagccgggaatcatttccacccatctgcatgccgacggtagttatggtgaattgctgacgctgccaaactttttccgcgtgaatccagagaattcaattcatctgacgatggcgggcaacgaagtcttcaaggttgcggtaacggaactggcgcacatcgttgatgagacgctggcggcgaataatcttgaccgttctcaactggactggctggttccgcatcaggctaacctgcgtattatcagtgcaacggcgaaaaaactcggtatgtctatggataatgtcgtggtgacgctggatcgccacggtaatacctctgcggcctctgtcccgtgcgcgctggatgaagctgtacgcgacgggcgcattaagcccgggcagttgggttctcaaaccgttggaatgctggctgatatggcggcgagctatccaattgtcgaagaaacgtttgctgaagcttctgcggcgctgggctacgacctgtgggcgctgacccagcaggggccagctgaagaactgaataaaacctggcaaactcagcctgcgctgttgactgcatctgttgcgctgtatcgcgtatggcagcagcagggcggtaaagcaccggcaatgatggccggtcacagcctgggggaatactccgcgctggtttgcgctggtgtgattgatttcgctgatgcggtgcgtctggttgagatgcgcggcaagttcatgcaagaagcgtaccggaaggcacgggcgctatggcggcaatcatcggtctggatgatgcgtctattgcgaaagcgtgtgaagaagctgcagaaggtggttattgccggtcataaagaagcggttgagcgtgtggcgctgcctgtaaagcggcggcgcaaaacgcgcgctgccgttaccatgagcgtaccgtctcactgtgcgctgatgaaaccagcagccgacaaactggcagtagaattagcgaaaatcacctttaacgcaccaacagttcctgttgtgaataacgttgatgtgaaatgcgaaaccaatggtgatgccatccgtgacgcactgttcattattgaaggcgcgctggttgtcgtttcgcacgaccgtcatttgctgcgttccaccactgacgatctctacctggttcacgatcgtaaagtcgaaccgttcgacggcgatctggaagattatcaacagtggttgagcgacgtacaaaagcaggaaaaccagaccgacgaagcgccaaaagagaatgcgaacagcgcccaggctcgtaaagatcagaagcgtcgggaagctgagctgcgtgcgcaaacccagccactgcgtaaagagattgcccgtctggaaaaagagatggagaagctgaacgcgcaactggcgcaggcggaagagaaactcggcgacagcgaactgtatgaccagagccgtaaagcggagttgaccgcctgcctgcaacagcaagccagcgccaaatccggcctggaagagccaaagcaactgatggcgcagataacgacgaccgatgccaatgaattcagcagcagtgctgaattcatccccatgcgcggctttagcaattgtcatctgcaaaccatgctgccgcgtctgtttcgtcgtcaggtgaaattcaccccgtactggcagcggctggagttgcccgacgggcgatttgtcgatctgcgtggagtgaaaaccctgcacagggcgcacataaacctcgtctgcggtgacccaaaccgtatgcaccgcatttaccattcgggcgaaaccgaagacgccagttggtttttacgctggctgcaacgcgaatttggtcatgcgccaacggctgccgtcggctattcgctcggcggtaatatgctggcctgtttgctggcaaaggaaggcaatgatctcccggttgatgcggcggtgattgtctctgcgccgtttatgctggaagcctgtagctatcatatggaaaagggcttttcccgcgtttatcagcgttacttgctgaacctgttaaaagccaatgccgcgcgcaagctggcagcctaccccggaacgctgccgattaatctcgcgcagttaaaatcggtacgtcgcatccgtgaatttgacgatctcatcaccgccagaattcacggctacgccgacgctatcgactattatcgtcagtgtagcgccatgccgatgctgaaccggatcgccaaaccgacgctgattattcacgccaaagacgatccgtttatggatcatcaggtgatcccgaaaccggaaagtctccccccgcaggtggagtatcaactgactgaacatggcggtcatgaggctgtattggagtggctccaagtagcgaagcgagcaggcctggtcgtcggccaaatcggtcggacagtgctccgagaacgggtgcgcatagaaattgcatcaacgcatatagcgctagcagcacgccatagtgactggcgatgctgtcggaatggacgatatcccgcaagaggcccggcaattggcagtaacggcatgtctttttgggcatttcgcgacgatttgcaacgactgaatcaggtcgagcagagcaatcagcaacgtgcggcattagcgcaaactcgggcggtattgttacaggccagtaccgcgctgaacaaagcgggcactctgacggcacttagctatccggcggatgacattaaaacgttgatgacgacggcgcgcgccagtctgacgcaatccaccacgctgtttaaaagttttatggcgatgactgcgggcaacgagcacgtcaggggattgcaaaaagagacggagaaaagttttgcccgctggcacaacgatctcgaacatcaggcgacctggcttgaaagtaatcaactttcggatttcctcactgcgccggtgcagggatcacagaatgcgtttgacgttaactttgaggccctgcagctggagatcaaccatgtgctggaagccgccaaccaatattctggccctgaatgcggcagtggaagcgctcgcgccggagagcaggggcgtggttttgcggtagtggcaggtgaagtgcgcaatcttgccagccgtagcgcgcaggcagcaaaagagatcaaagggctgatcgaagagtcagtcaatcgtgtccagcagggttcgaaactggtgaataacgccgccgcgaccatgatcgatattgtcagttcgtga

SEQ ID NO: 28922 - DNA, 2529 bp, Homo sapiens; identical to SEQ ID NO: 24618
  SIMILAR (1698)..(853): 991254mologous to Escherichia coli DNA polymerase II,accession number X54847,Smith-Waterman Score=1508.

SEQ ID NO: 28923 - DNA, 2865 bp, Homo sapiens; identical to SEQ ID NO: 15928
  SIMILAR (199)..(918): 881254mologous to Escherichia coli yojH,accession number U00008,Smith-Waterman Score=1065.

SEQ ID NO: 28924 - DNA, 1568 bp, Homo sapiens; identical to SEQ ID NO: 15929
  SIMILAR (1110)..(1562): 881254mologous to Escherichia coli K12 putative oxidoreductase,accession number AE000303,Smith-Waterman Score=643.

SEQ ID NO: 28925 - DNA, 3209 bp, Homo sapiens
  SIMILAR (850)..(999): 621254mologous to Escherichia coli cytidine deaminase,accession number X63144,Smith-Waterman Score=132.
acatataaagccacaacgggttcgtaaactgttatcccattacatgattatgaggcaacgccatgcatccacgttttcaaaccgcttttgcccaacttgcggataacttgcaatctgcactggaacctattctggcagacaagtacttccccgctttgttgaccggggagcaagtctcatcgctgaagagcgcaacggggctggacgaagacgcgctggcattcgcactacttccgctggcggcggcctgtgcgcgtacgccattgtcgaattttaatgttggcgcaattgcgcgcggtttgagctgaacctggtatttcggtgccaatatggaatttattggtgcgacaatgcagcaaaccgttcatgccgaacaaagcgcgatcagccacgcctggttgagtggtgaaaaagcgcttgcagccatcaccgttaactacacgccttgtggtcactgccgtcagtttatgaatgaactgaacagcggtctggatctgcgtattcatctgccgggccgcgaggcacacgcgctgcgtgactatctgccagatgcctttgggccgaaagatctggagattaaaacgctgctgatggacgaacaggatcacggctatgcgctgacgggtgatgcgctttctcaggcagcgattgcggcggcaaaccgttcgcacatgccttacagtaagtcgccaagcggtgtcgcgctggaatgtaaagacggtcgtattttcagttcggagtacgctgaaaacgccgcattcaacccgactccggatatccagcgcgcggttctggcagaaaaagccgatgcgccgttgattcagtgggatgccacctccgcaacgctgaaagctctcggctgtcacagtatcgaccgagtgcttctcgcttaagcctggtgccggatgcggcgtgaacgccttgtccggcttgccagccctctcctggtgtcgaaattcccggcaaacagtttgccgtttcttgcgcaaaaccagcgggtaaagtagcctgatggaaattttccttagatcgagtctcccgaccacatgctggacggcctggaaaccggtgcttccgtggcgcataacggttgctgcctgaccgtgacggaaattaacggcaaccatgtcagttttgaccaataccaacaatgtaccaacttgcgcagcaaggcgtacagctgcatgcgaaccccgtgtaccaggttccagcatgatgcaggcaaccgagccaacaggaatatgagtgcggatccctgtcttgtcgataagtacaaacgcgccatctattacatcgatctgcccatattgcagaaagatcatggagacgcgatcttgctgtacaagatctattaacgctggcgcgtcgttgatggtgagcacaccttcaaagcaaaccgtttggatctttccacttttaccatcaccagaaaaatactgtggccgttccgatatgggatgcacatcttcaacgcgcgccgcattgcccaatttacgttgcaaccacgcgatttgttctgcttcttttattaacggaacccgacagcgtttaatattccctttactgtccaggcgcttttgattgtcgagaatagttttgatcggatttgcccgaagccgaaaatagagtggaacaccaacctgaagttgaaattcaacctgtttagttttaatgacaaaagcgatacgttggttggcatagcgggcggcatcttcaaaggcgcattcggcaatagccatgtcgctctcttcaacctccacgttgtcgagatagacttcgcaggtgctgagcatatgccagccgattttatgcagcgggttaatcttaatgccgggcttactggagtcgacccaccacagggtgaaggcttttttgggatctttcggttgcggatcgcgcgccagcaccagcatatacgggtactctttcgcaccggtaataaaggttttttgtccgttgatgtagaccttgccgtttttacgcgtgtaagtggtagtggcactgttgttatctgagccagcacctggttccgtcaacgccagggcataggcgggatcacccgtttccagggtgctctctgccgttttacgtagctgctctgcagaaccgaaacggcgcatactgtgaatacattgaccgttggtaattaaaaatgccggagcaccgcattttgacacttccatcagcgccagcatttgggtgacgtaatccgcagggataccaccaaattcttccggcacgccaagcatggaaataccgttatccgccagcgcccgcataaactcacgcggatatgtcccgttttgatcgcaggtgcggaaatactcttccggaaagttagtcgtaatcagttcgcgaatactggccagcagcagttcttgttcttcagttaaagaaaaatccatcattatactcctgttaatgagccgcagcatccaggtcaactgcacgccggtaaagtcaaagtacggtgcccaggtcggactttctgccacccagccgccagagataatggcgaaaatcaggaataccagaccgatgaccgacacttcgccaatacgccccggacgcagatagcgcaggtagatccccataaacagcgccagcggaatggtgaacgcaacggtatatgttccccacgggctatgagtcagggctttcaccacgatcatcgccagcactgcaaggataatgaccatgatcataaagcaggccaccagcgcaatcaccccggcggttggccccatctcttctttgaccagctcacccagcgagcgaccgtcacggcgcgtagaaacaaacagcaccatgaaatcctgcaccgcaccggcgagaaccaccccagcgagcagccagatcatccccggcaggtagcccatttgcgccgccagtaccggccccaccagcggacctgctccggcaatggccgcaaaatggtgaccgaacagcactttcttgtccgtcggcacatagtccagcccgtcgttatggcgcaccgctggcgtcatacgcgtcgggtcaaccgccagcacatttttggcgatatacagcccataaaaacggtaagcgatcagatagatacagaccgacgccaccacaatccacagcgcgttgatctgttccccacgatttaaagcaatgtatcccagagcaaatgctcccattatagagagcactgtccagacgaggtatttccctgatttgttcat

SEQ ID NO: 28926 - DNA, 3400 bp, Homo sapiens
  SIMILAR (1267)..(1890): 1001254mologous to Escherichia coli K12 putative oxidoreductase,accession number AE000303,Smith-Waterman Score=1064.
atgaagacaggtgtggtggtagaaaaggcgcctggtcatcagcgggggagtacacttcctccttcctttgctgcgtggtgcgtcctctaccacgtcagaagaatccagctgttactccgtcggcgtctctatctagttgtacggctcctctcatcgcatcgctgcgccccccgcaggcgggctgagtccgaaaagagagttagcaagggtggtggaattttgcgcgcactgtgtaaagagccgctgcgcaccgggcgtattcttaatattaacgttccggatttacccttggatcaaatcaaaggtattcgcgtgacgcgctgcggtacacgacatccggcagatcaggtgatcccgcagcaagatccgcgcggcaatacgctgtactggattggcccgccgggcggtaaatgtgatgctggtccggggaccgattttgctgcggtagatgagggctatgtctccatcacgccgctgcatgtggatttaactgcgcatagcgcgcaagatgtggtttcagactggttaaacagcgtgggagttggcacgcaatgcagcttaaacagcagctcgacccttgcggcgtgtttaaccccggtcgcatgtacgcggaactttgaggagcaggctatgcaaacccaattaactgaagagatgcggcagaacgcgcgcgcgctggaagccgacagcatcctgcgcgcctgtgttcactgcggattttgtaccgcaacctgcccaacctatcagcttctgggcgatgaactggacgggccgcgcgggcgcatctatctgattaaacaggagcatctcgatcgctgcctcacttgccgtaattgtgaaaccacctgtccttctggtgtgcgctatcacaatttgctggatatcgggcgtgatattgtcgagcagaaagtgaaacgcccactgccggagcgaatactgcgcgaaggattgcgccaggtagtgccgcgtccggcggtcttccgtgcgctgacgcagctgcttcggttacggcttcacttcggggtccgagctatccccagcagcccgagtgtcctagcagggtctgacaaccacggatgttccagttccacagccagcgatgatctcctctacggcaggaatccaactcgtatccacggtcgaaatcgaagctctctggaaagtgttacgagtgacgcgcacccgccaattccatggtcaacggtccccagtgatacactgagtgttcctggcatggcccagcgccccccactaaccaactctctcagagtgtgcccgacggagaaattatgccaaagcggttgtacccgtgccggtgttgatgctcccattgatatcggccgcttacagcgttttgttactgattttgaacaacaaaccggaatggaaatttatcagcccggtactaaaacgctcggcaaagtcgcgattattggcgcaggtcctgccggattgcaggccagtgtgacactgacaaaccagggttatgacgtcacgatttatgagaaagaagcgcaccccggtggctggttgcgtaacggtattccgcaattccggttaccgcaatcagtgctggatgcagagatcgcccgtattgaaaaaatgggcgtgaccattaagtgcaacaacgaagtcggtaacacactcacccttgagcagctgaaagcagaaaaccgcgcggtactggtcaccgtggggttatcaagcggttccgggctaccgctgtttgagcatagtgacgttgagattgccgtcgacttcttgcaacgtgcacgacaggcgcaaggcgatatcagcattccacaaagcgcattaattatcggcggcggtgatgtcgcgatggacgtagccagcacgctgaaagttctcggctgtcaggcggtaacttgcgacttgtattcccagcactttgggagtccgaggcgggcagatcacttaagtcgtcagtctgatgtgcatgtgaacgccgagggaacgctggtaatgagtctgcctctaattacgcctaaatcccgcactcgtccgccggtcgccgtgtgcgccgaatttcgatgtaagtgcacgtctgtgcatcgaccagggttgtccacagatctgagtcgggttgaatgcggcgttttcagcgtagctgccactgaaaatacgaccgtctttacattccagcgcgacaccgcttggcgacttactgtaaggcatgtgcgaacggtttgccgccgcaatcgctgcctgagaaagcgcatcacccgtcagcgcatagccgtgatcctgttcgtccatcagcagcgttttaatctccagatctttcggcccaaaggcatctggcagatagtcacgcagcgcgtgtgcctcgcggcccggcagatgaatacgcagatccagaccgctgttcagttcattcataaactgacggcagtgaccacaaggcgtgtagttaacggtgatggctgcaagcgctttttcaccactcaaccaggcgtggctgatcgcgctttgttcggcatgaacggtttgctgcattgtcgcaccaataaattccatattggcaccgaaataccaggttccgctcacaccgcgcgcaattgcgccaacattaaaattcgacaatggcgtacgcgcacaggccgccgccagcggaagtacggggaagtacttgtctgccagaataggttccagtgcagattgcaagtatccgcaagttggcaaaacaatgccgcgcgcaagctggcagcctaccccggaacgctgccgattaatctcgcgcagttaaaatcggtacgtcgcatccgtgaatttgacgatctcatcaccgccagaattcacggctacgccgacgctatcgactattatcgtcagtgtagcgccatgccgatgctgaaccggatcgccaaaccgacgctgattattcacgccaaagacgatccgtttatggatcatcaggtgatcccgaaaccggaaagtctccccccgcaggtggagtatcaactgactgaacatggcggtcatgttggctttattggcggtacattacttcatccgcaaatgtggctggagtcacgcattcctgactggttaacaacgtatctggaggcgaaatcatgttgattccgtggcaagacctctcccccgaaacgctggaaaatttaattgaaagctttgtgttacgtgaaggcaccgattatggtgaacatgagcgtacacttgaacagaaagtcgccgacgtcaaacgccagctacagtccggagaaccggtgctggtatggtcggagctgcaccaaacggtcaatattataccgcgcagtcagtttcgagaataacctccaaccgtcggcggacgagataataatgatagctaagtcatggagttactatgtctgccaaacatccggtcattgcggtaaca

SEQ ID NO: 28927 - DNA, 3538 bp, Homo sapiens
  SIMILAR (3310)..(2678): 991254mologous to Escherichia coli RtoA protein,accession number D90778,Smith-Waterman Score=1043.
ttacggcttcgccacaaaaccaatcgcttcgtacaccgcttttagcgtacgggaagcgtgcgcgctggctttttccgcgccatctttcatcacctgttgcaggaaggcttcatcgttgcggaaacggtgatagcgttcctgcaattcagtcagcataccggaaacggcatcagccacttcacctttcagatgaccatacatcttgccttcgaactgtttttccagttctgggatgctcaccagacactcggtgctgccttcccacagttggcgagtgaagaccgcggtgtcgttttcaagtacataggtgagggcgatcaggttggtggcgtggcagtgcatgatcacccgatctttgccgttggtggctttaatgcgctcgcagtgggaaaggaagtgagccggaagttcggaagtggggacggcttcgttggttaacccccaaagaatgtggtagcccgcgccgtcgctgtcgacttttacgatgcctaagttagccgcaggatcaagctggacgttacggaagaatttgcccgagccggtgacaataaacggtgtatttgccagtaaaggcatgggctggctgagcgggatatagcgcggttgttggtggaaattgtcgtgatatggtgcgatatcggcgtcatccaggcgtagcgtcaggttgccgccgttgcgctcatgcccagccggaatatgttcacgtatccggatgctctgctgacaatgtggccagtgcgaacgcggtagcgcaaggcttatttttgactgcgcactcgacatttcaccgtgaaactccgccatttgttggcgcagcatgattgggtaacgccaaatcaccacattcaaaaaactgccgatgatcaatcctccgacggttgccaggacgggcatcgccgtggggtattgctgattaatggtttccggtccctgttccggtttcggcagatcgagtgacgcgagcgtgttgtaagccgactggctcacaccgccctcgaagctcatctcgctcgcccccggcagctggtaagcattcgcgcccggattccatttcttaaagaactccgaaagatccgtctgggcgacccaggaggcacacagcatcagcgtgtccgctgcgttaccgttggattcagcacagtaattcttgccgccaaacttgtcattgctgacctgcaaagctatgggatgaagcatccattggaggtcaaggtggattggcgtcctcttattattaatcagagtgcttagtgaatatttgccgacgggtaattggccatcagtttcaaattgggaaaggttaacgttttcacgatcttcggcttcgattaaatctttgttgaattcaacggcataagctgacgcacaaccaatgatgataactggatttgccctatgcggatgccattcgttataatgctcgaacgcctctgcaaggttctttgctgccgttaacccgtctggtttgggcatgatactgatgtagtcacgctttatcgttttcacgaagctctctgctattccgttactctccggactccgcaccgccgtgttcttcggttcaagtcccaacatccgggcgaactggcgtgtttcattagcccggtagcatgaaccattatccgtcagccactccactggagacgacggaagatcgtggccgaagcggcgttccaccgcaaaccagcaggacggtaccactattgtgtgccccgctcgatccgggatctcaacatctttctccagctcctcacacccaaggagagttttccaactctcatctgcatgagctccgaggttcctgtggccacttcgaatcgaaagggccacgggaacgtggagctgaatttgtggggattcagggaattggacgttagggaactgcccgaaatctgactgtgtctctctctctgtcctacagctccagcggcacgccatcaaatgccccaaacgccagaatggaggagctgggtcctcatccaggtgaggcatcttctctttttcatcctgagtccccgctgctggacgaactgttccttcccgaatataaagccggtcgcacgccgaatccggatattcggtcattacgtacgtcgggccgatgtcggatggcaagagccgcctgctgcgtggtctggacagcaataaagaccagagctacttcctttatacgctcagccatgagcagattgcgcaaagcctgttcccggtcggcgaactggaaaaaccgcaggtgcgtaagattgctgaagatcttggtctggtcaccgcgaagaaaaaagactctaccggcatttgcttcattggcgaacgtaaattccgcgagttcctgggccgttatctcccggcgcaaccgggcaaaatcattaccgtcgatggcgatgaaattggtgagcaccaggggctgatgtatcacactctcggtcagcgtaaaggtctgggtatcggtggcaccaaagaaggtaccgaagaaccgtggtatgtggtggacaaagacgtcgaaaacaacattctggttgtcgctcagggccatgaacacccgcggctgatgtctgtcgggttgattgcccagcagttgcactgggtcgatcgcgaaccattcaccggcactatgcgttgcacggtaaaaacccgctatcgccagacaatatccttgggaccgcttcgtaaaccgccacataacagatgtctggaaatataggggcaaatccagggttcttgtcccatgatgttcaaaactgtcaatatcctgcattgttagcgtagcgccactgccaatttccagcaaagctttatcctgtacccgaataaccccggcaaaccccagagggaattctccgctgattgtcgtatctccattcagatataccgacgactcaccactaacgacaataacgctggtataactatatcctgtgcgcaaggaagtaacctgcgacccatctgcaagcgcgtttttctctccaatcagttcaagtccaccattcatattaacggtattgccatcgccaatcacaaccagacctgacgttttctctgcgctgccatcaaataaattactctgacgagaagtaacctcactgtctgatacaacagttaactttccatccagcgtcacgttattatcactgccgtaaacgttgatacccacggatggatcgaagaaatattccgccgcattgtctgcggttttatccttatcaaccagaacgttaccagtgatattcactgtattcgcatcgccagaaacgtttatgcccgtcgctttctgcccgaccacttttagatcttttgccgccagcgtgttggagcaacggcgcgaaaagttcatttttaccactgcgaccaccggggcctgccgctggcgctcatcagcgaagacggctatacggcttggcgcggggagtatgatgaatggggcaaccagcttaatgaggagaacccgcatcacctgcaccagccgtaccgtcagttcggttatgatatggatgctattgttgccggagctcataatggggccgccgatgcaatgagacat

SEQ ID NO: 28928 - DNA, 1526 bp, Homo sapiens
  SIMILAR (748)..(1158): 991254mologous to Escherichia coli Hypothetical protein in purB 5'region (orf-15) ,accession number D90748,Smith-Waterman Score=726.
ttatttgggcactacccgaactgcctcacgcttgttctctttgcaaatatatgtcaccacgtgcgcacgcgtattcatatggcaggtggcggtggggctgggggtggcggacaaggagcgtaaaattggaggccggggccgtaacgccaccggtgccttggtgacatcgggttttgatatagtagggggagtgggggaagcttgccacaccaccactctattacaggatttggtagtatgccgcctacgcctgccgcggatgtaacggatacccgcctgcgccaactgcacgctacgcgtactgatgtacagaatcggcagtgaaacatcgttgctacgccagcggcgaatcagtgacagaccgtcctcgtctggcaatccgagatcgacaatcgcaatatccggtatatgttcattgagataataatcggcttctttggcatcttctgcgtcatcgacctgatgaccagcatcctgaatcatcgtgatagctcgaccaatatagttagccggcgtcatcgctttcaggcgggctttctcttcttctggcaacgccagaccatcgataaactgcttcatgccttcggcgtcaacgcgcttaccgcgagtcagctctttcagcttctcgtacggtttttcgatgccatagcgacgcataactgtctggattggttcagccagcacttcccccttgtgatcccgttcatcccgcagatggtcgccggtcacttccagttggtcacgccccaccaggtgctgatgtatcacactctcggtcagcgtaaaggtctgggtatcggtggcaccaaagaaggtaccgaagaaccgtggtatgtggtggacaaagacgtcgaaaacaacattctggttgtcgctcagggccatgaacacccgcggctgatgtctgtcgggttgattgcccagcagttgcactgggtcgatcgcgaaccattcaccggcactatgcgttgcacggtaaaaacccgctatcgccagaccgatatcccttgcaccgtcaaggcgctggacgatgatcgcattgaagtgattttcgatgaaccggttgccgccgtgacgccgggccagtctgccgtcttctataacggtgaagtgtgcctcggtggcggtattattgagcagcgtctgccgctgccggtctgattattatctttacttaaaacaaggaagcagtgaacgtggcaaagaattactatgacatcaccctcgccctggccggtatttgtcagtcggcacgcctggtgcaacaactcgctcaccaggggcattgtgatgccgatgcgctacacgtctcactcaacagtattattgatatgaaccccagctcgacgctggcggtttttggcggtagcgaagccaacctgcgcgtcgggctggaaaccctgctcggcgtgctcaatgccagcagtcgccagggcttcaacgccgaattaacccgctacacactcagcttgatggtgcttgagcgcaaactctcctcagcgaaaggcgcgctggggatcctctag

SEQ ID NO: 28929 - DNA, 933 bp, Homo sapiens
  SIMILAR (352)..(918): 931254mologous to Escherichia coli Orf1 5' of phoH,accession number D90739,Smith-Waterman Score=925.
atgcagcagttagccagtttcttatccggtacctggcagtctggccggggccgtagccgtttgattcaccacgctattagcggcgaggcgttatgggaagtgaccagtgaaggtcttgatatggcggctgcccgccagtttgccattgaaaaaggtgcccccgcccttcgcgctatgacctttatcgaacgtgcggcgatgcttaaagcggtcgctaaacatctgctgagtgaaaaagagcgtttctatgctctttctgcgcaaacaggcgcaacgcggcaaacagtgcactggccctgccgggaaactgtccggtcgctcatgcacaaaaacgtcacagtgcgccgggtacgctttcaccggatgctcgcaatgagaaacagccgttgtatgggcggagcagcaccagaaacgccaaatccgcgcctgccaccactcgattccggcattcttggcggctacattgcgcccgataatctcaccatcacgttatcggtgggtcactcattgtttgatgagcgctttggccttgcgccacagatgccaaaaaagctgcagaagatgacgcgtttccccaacgactcgctggatgcggcgttatgtcatggtgatgtgttgctacagatttgcgccaacacccaggacacggttatccatgcgctgcgcgatatcatcaaacacacgccggatttgctcagtgtgcgctggaagcgggaagggtttatttccgatcacgcggcgcgtagtaaaggcaaagagacgccgattaatttgctgggtttcaaagacggcactgccaatcccgatagccagaatgataagttgatgcaaaaagtggtgtgggtcacggcagatcagcaggagcctgcgtggacaatcggtggcagctatcaggcagtacgcttgaatcagtttcgaagtgtgatgaactaa

SEQ ID NO: 28930 - DNA, 861 bp, Homo sapiens
  SIMILAR (289)..(585): 1001254mologous to Escherichia coli Orf1 5' of phoH,accession number D90739,Smith-Waterman Score=531.
atgaatgaaattatctactgtgggtggacaccactcaatcatagggattttgccgatttcggaaccaccatcaaacaggattttcgcctgctggggcaaaccagcgtggaccgcttgctgcaactctctcagggccaggcggtgaagggcaatcagctgttgcccgtctcactggtgaaaagaaaaaccaccctggcgcccaatacgcaaaccgcctctccccgcgcgttggccgattcattaatgcagctggcacgacaggtttcccgactggaaagcgggcaacgcactgccaatcccgatagccagaatgataagttgatgcaaaaagtggtgtgggtaacggcagatcagcaggagcctgcgtggacaatcggtggcagctatcaggcagtacgcttgattcagtttcgagtggaattttgggacagaacgccgctgaaagaacagcagacgatttttggccgtgataagcaaaccggtgcgccgctgggaatgcagcatgagcatgatgtgcctgattacgccagcgacccggaagggaaggtgatcgcgctggacagccatatccggctggcgaatcccgcacggcggagaggattttgccgatttcggaaccaccatcaaacaggattttcgcctgctggggcaaaccagcgtggaccgcttgctgcaactctctcagggccaggcggtgaagggcaatcagctgttgcccgtctcactggtgaaaagaaaaaccaccctggcgcccaatacgcaaaccgcctctccccgcgcgttggccgattcattaatgcagctggcacgacaggtttcccgactggaaagcgggcagtgagcgcaacgcaattaatgtga

SEQ ID NO: 28931 - DNA, 1704 bp, Homo sapiens
  SIMILAR (1655)..(1681): 1001254mologous to Escherichia coli Rhizopine catabolism protein MocA,accession number D90769,Smith-Waterman Score=45.
atgcctttcctcctttctttcccatcagagcggaaacgcttgggcattggccagtctcaggagatgaacacactcttccgcttctggtccttcttcctccgagatcacttcaacaaaaagatgtatgaggagttcaagcagctggctctggaggagcggtaccggagctcgattgatagtgtgagccactgcagcttccggagtctatctccagtatcaccatgggtaacggcagatcagcaggagcctgcgtggacaatcggtggcagctatcaggcagtacgcttgattcagtttcgagtggaattttgggacagaacgccgctgaaagaacagcagacgatttttggccgtgataagcaaaccggtgcgccgctgggaatgcagcatgagcatgatgtgcctgattacgccagcgacccggaagggaaggtgatcgcgctggacagccatatccggctggcgaatccccgcacggcggagagtgagtccagcctgatgctgcgtcgtggctacagttattcactgggcgtcaccaactccgggcaactggatatggggttgctgtttgtctgctaccaacacgatctggaaaaaggcttcctgacagtacaaaaaaggctcaatggcgaagcgctggaggaatacgttaaacctatcggcggcggttatttttttgcgccaaggaaaaaggggaagtcagaggagtccagattttcccacctgacctctctgcctcagcagctgccttcccagcagctgatgtccaaggatcaggatgagcaagaggaactggattttctgtttgacgaggagatggagcacagccacgggatgacccttaactcactggtttccggcggttgtgtgatctccggttcggtggtggtgcagtccgttctgttctcgcgcgttcgcgtgaattcattctgcaacattgattccgccgtattgttaccggaagtatgggtaggtcgctcgtgccgtctgcgccgctgcgtcatcgatcgtgcttgtgttattccggaaggcatggtgattggtgaaaacgcagaggaagatgcacgtcgtttctatcgttcagaagaaggcatcgtgctggtctttgtgaaaagtgcaatgacaagctctccgctgcgggtcgcgataataggcgcaggccaggtggcggataaggttcatgcttcgtactactgcacccgcaacgatctggaactggtggctgtctgtgacagccgcctttcccaggcgcaggcgctggcagaaaaatacgggaatgcatccgtgtgggacgatccgcaggccatgctgctggcggtgaaacctgatgtggttagcgtctgctcacctaaccgttttcattacgaacataccctgatggcactggaagcgggctgccatgtgatgtgcgaaaaaccgcccgccatgacgccagaacaggcgcgggaaatgtgcgataccgcgcgcaaactgggcaaggtgctggcctacgactttcaccatcgttttgcgctcgatacgcaacagctgcgtgaacaggtgaccaacggcgttttgggagagatttacgttaccaccgcccgcgccctgcgtcgctgcggcgttcccggctggggtgtctttaccaataaagaactgcagggtggtggcccagctgatcgacatcggcattcatatgcttcactggatctaagctgttgctaa

SEQ ID NO: 28932 - DNA, 1326 bp, Homo sapiens
  SIMILAR (772)..(1323): 1001254mologous to Escherichia coli Orf1 5' of phoH,accession number D90739,Smith-Waterman Score=970.
tttttttttttttttttagaacagaaatttattgtctcatagttcttgaggccagaaatctgaaatcaagctgtggcagagcatgactccctctgaaggagctggggaagggtctgttccacctgcttctggcttctggtagcctcaggcatcccttagctggcagacgcatcacccgaatcctgggcccccatcaggtggctgtttgcacattgccttctagttgcctggggaatacaacaggggcatgcacacccatcagcaaacccaagagcttcaagggtcgaacatacataaaagggcacctcagcaaaggcactatcaaaccattgcgtttgggcagtgggggcacacccattggaccacccaaaactacatttaccacaaccaagatgtatccataccacatccccataggttccctaaggttcctttggtcattttcagaccaatattgtacaggatgtatagcgaaaggagaaaaagatatacctcgatcaccccctttctcccaagtgaaaataaaaggttatcagtttgcaacattgaacaacattcgttgcaaatcgataacaacatgcaccttcaggatactatttattatgttcggcaatgatattttcacccgcgtaaaacgttcagaaaataaagaatatatggcggaaatcgcccaattcctgcatgaaaatgatttgagcgttgacaccacagtcgaagtatttattaccgtaacccgcgatgaaaagcttatcgcgtgcgtaccggggaaggcccgatagccagaatgataagttgatgcaaaaagtggtgtgggtaacggcagatcagcaggagcctgcgtggacaatcggtggcagctatcaggcagtacgcttgattcagtttcgagtggaattttgggacagaacgccgctgaaagaacagcagacgatttttggccgtgataagcaaaccggtgcgccgctgggaatgcagcatgagcatgatgtgcctgattacgccagcgacccggaagggaaggtgatcgcgctggacagccatatccggctggcgaatccccgcacggcggagagtgagtccagcctgatgctgcgtcgtggctacagttattcactgggcgtcaccaactccgggcaactggatatggggttgctgtttgtctgctaccaacacgatctggaaaaaggcttcctgacagtacaaaaaaggctcaatggcgaagcgctggaggaatacgttaaacctatcggcggcggttatttttttgcgctgccgggggtgaaggacgcgaacgattatttcggaagcgcgttattgcgggtttaa

SEQ ID NO: 28933 - DNA, 1319 bp, Homo sapiens; identical to SEQ ID NO: 22817
  SIMILAR (1)..(672): 1001254mologous to Escherichia coli No definition line found,accession number U00039,Smith-Waterman Score=1151.

SEQ ID NO: 28934 - DNA, 1359 bp, Homo sapiens
  SIMILAR (541)..(1119): 951254mologous to Escherichia coli K12 putative enzyme,accession number AE000280,Smith-Waterman Score=977.
atgccctcttactttacatctcgcatagccgcggtgcatgtgtcagccttgagagaagaacaggcccatcatgagtccaagcatcatgagtccttcatagcgcagcgtatgtttcggatgttttatcaagcacggaatctgctccatgcgggacaagaaaatctcttttctggtctgacggcgcttactgctgaattcactgtcggcgaagaagctacacggggcaaaacaacgggcaaaaggggaccttccccggatgggcgcattctgcgtaccaccaaaacgcgtaatccgcgtggttatatgcaaggaaggtatctggaaagccagcgtgatgtcgaagccacagataagccgtttgagttctttatgaatcgcttccgtctgctggaggccgcgccgcgcgtggagtttattgcgtataccgggctttgcgaagatgtgattcgcccacagttagacgaggcgattgcccagggttatctcaccgaatgtgcggattactggcagataacggaacatgggaagctgtttttaaattcgctgctggagctttttctggctgacggttatcacatgtggcgcatgattggcgcaggcgcgcacctcgcggtggggatcgaccctacgcaactgtttctgtgccagtttgaagcggtgcgtaaactactgggtaatgatcagcgcgcgcatttgttaccgttaggtattgaacaacttccggcactgaaagcctttgataccgtcttttcgatgggcgtgctttaccatcgccgttcaccgctggagcatctatggcagttgaaagatcaactggtcaatgaaggtgaactggtgctggaaacgctggttattgatggtgatgagaacacggtgctggtaccaggcgatcgttacgcgcaaatgcgtaatgtctatttcatcccttccgcgctggcgctgaaaaactggctgaagaagtgtggttttgtagatatccgcattgcggatgtgagcgttaccaccacagaagagcagcgacgcaccgaatggatggttaccgaatcgctggccgatttcctcgacccacatgatccgggtaaaacggtggaaggttatccggcacctaaacgcgcggtgtctgattgcgcgcaagccgtaaagatgacaaacatgatctcatatcagggacttgttcgcaccttccttagtacttcccccaataattggctggtgtttatgcaaaatggtcaagaagtggtaattgatagcggtaaaagcgttagcctcacactgacaatggctccagcttttaaggatgaaggggaactaaccgacatgacagatattacaggcaatctgacggtgcagaatttgtag

SEQ ID NO: 28935 - DNA, 2064 bp, Homo sapiens
  SIMILAR (922)..(1578): 851254mologous to Escherichia coli HisP-like nucleotide binding protein (phnL),accession number J05260,Smith-Waterman Score =939.
atgcgtcgcgctaacgatccgcaacggcgagaaaaaattatcccggcccccccggaagcgcgtgaacctttccggaatacagcttgttacgcaccgcaaatttgttacccttgccggggtcccgttgggttccatgccctcctatttttcaggaattgatgagttgttactggaggcgttcagcagttttactgagatccatgtcccgccaatatcaggcattttttagcgatgttagtgatgctccgggcgcatgccaggctatcaccgatatgatctacagctcacaggttgcaacgccggataacatggagctgattgtaccagctctacgcgctggctagccgaaamccgctattaaaaacggtaatgcaaaactggatgcagcgcagtcagcaaacgctcgaacaatggtttgaacccggaaccgcccgcgcgcttgatgcgtttatwtgaggggatgacgctgcattttgtcaccgacccgcgcgcatttgttaccgttagtattgaacaacttccggcactgaaagcctttgataccgtcttttcgatgggcgtgctttaccatcgccgttcaccgctggagcatctatggcagttgaaagatcaactggtcaatgaaggtgaactggtgctggaaacgctggttattgatggtgatgagaacacggtgctggtaccaggcgatcgttacgcgcaaatgcgtaatgtctatttcatcccttccgcgctggcgctgaaaaactggctgaagaagtgtggttttgtagatatccgcattgcggatgtgagcgttaccaccacagaagagcagcgacgcaccgaatggatggttaccgaatcgctggccgatttcctcgacccacatgatccggacgcgtcagcgtcgcatccgacacccgaaccacgaggcgaaaaatgattaacgtacaaaacgtcagtaaaaccttcatcctgcaccagcaaaacggcgtgcgcctgcccgtcctcaatcgcgcctcgctcaccgtcaacgcgggcgaatgcgtggtgctccacggccattccggcagcggcaaatcaactctgctacgctcgctgtacgccaactatctgcccgacgaaggtcaaatccagatcaaacacggtgacgagtgggtagacctggtcaccgcgccagcgcgcaaagtggtggaaatccgcaaaaccaccgtcggctgggtgagccagtttctgcgcgtcatcccgcgtatctcagcactggaagtggtgatgcagccgctgctcgataccggcgttccgcgtgaagcctgcgccgctaaagccgcgcgtcttctcacccgcctgaacgtgccggaacgcctgtggcacctggcaccatcgacattttccggtggcgaacagcagcgcgtcaacatcgcccgcggatttatcgtcgaataccccattctgctgcttgacgaacctaccagctcgctggacgccaaaaacagggaaactgcgtgccacatcaacgatctccaaaccgtcgccgatacgctgatggcgctggtgttgtctaccgctcgtcgggttgtggaggtagcagaacgggtaaaagcaggcgaatggaccgcgagcataggcccggactggtacggcactgacgttcaccataaaacactgggcattgtcgggatgggacggatcggcatggcgctggcacaacgtgcgcactttggcttcaacatgcccatcctctataacgcgcgccgccaccataaagaagcagaagaacgcttcaacgcccgctactgcgatttggatactctgttacaagagtcagatttcgtttgcctgatcctgccgttaactgatgagacgcatcatctgtttggcgcagaacaattcgccaaaatgaaatcctccgccattttcattaatgccggacgtggcccggtgggttgaccaaaatgccctgatcgcagcattgcaaaaagggcgaaatttccgctgccgggctggaagtctttgaacaagagccccttgtcccgtaaattccccggtggttttaaagggccccaacgtcgtcgcaaataccgc

SEQ ID NO: 28936 - DNA, 837 bp, Homo sapiens
  SIMILAR (1)..(303): 991254mologous to Escherichia coli succinyl-CoA synthetase beta-subunit,accession number J01619,Smith-Waterman Score=510.
tcaaaaatcggtgccggtccgtgggtagtgaaatgtcaggttcacgctggtggccgcggtaaagcgggcggtgtgaaagttgtaaacagcaaagaagacatccgtgcttttgcagaaaactggctgggcaagcgtctggtaacgtatcaaacagatgccaatggccaaccggttaaccagattctggttgaagcagcgaccgatatcgctaaagagctgtatctcggtgccgttgttgaccgtagttcccgtcgtgtggtctttatggcctccaccgaaggcggcgtggaaatcgaaaagctgcatgcgcactgctgcagtcctttgtccttctcgttctactcgtggtccctctaccgctggcgaacgcgtgttcgtgttgtgctctgctttgttgtcccagaagataaatgccattgtgccagttttccggcacccttgcgcccgcacgtagtgtggtttggcgaaatgccactcggcatggatgaaatttatatggcgttgtcgatggccgatattttcattgccattggcacatccgggcatgtttatccggcggctgggtttgttcacgaagcgaaactgcatggcgcgcacaccgtggaactgaatcttgaaccgagtcaggttggtaatgaatttgccgagaaatattacggcccggcaagccaggtggtgccttgtggggtgtccgcccgttgttggtacgttgttacaccaagcgggttgaggccctcctatgcggttgaacctggaagaacagggctccgggacaactgactgttgtgggatttgctggtggtcgtggacgttgtagttggccaataccctgcccat

SEQ ID NO: 28937 - DNA, 1122 bp, Homo sapiens
  SIMILAR (909)..(559): 471254mologous to Escherichia coli similar to E. coli yeiG,accession number U73857,Smith-Waterman Score=220.
tcaaccgcgttgaccatggaagccaaacgtctgctgacgtgctggataagcaactggggcagcataagtttgttgcgggcgatggtacaccattgcggatatggcgatttggccgtggtttggcaacgtggtgtaggtggtgtgtatgatgccgctgagtttcttgatgcgggcaggtataacatgtacaacgctgggcgaacgaagtaggcgaacgtccggcggtgaaactgggcgtattgttaaccgcaccaacggaccgctgaatgagcagttgcatagcgccatgacgccagtgatttcgagacgaatacggcagataagcgtcagggtaagggttggtgttcgtcgcatgcaagccatccaggccggataagggttcacgccggatccggcaatcgtgcacaatgcctgatgcgacgctgcccgtcttatcaggcgggcgaagtgtagcccggataaggcttcaaccccgcatccggccagtcgtgctattatcaacggcatattccagttattggcgtggtagccaatatgctcgccaataaaacgggtcgtaatccaaccaggcatctttatttcagcaagatatgcagcaaaggcttgctgtccccacggcattgcgatgggagacaatgggcgtaaacgccgagacgctgacatattcatctgggttagtaacgccagcaccagcgcgcccagcccgcccatagaatgaccagagatgactttttggccgttgccggaaaatgatgcatcactaaatccggcagctgttgcggatatagtcatacattttgtaatgttcattccacggcgcttgctcgcgttcaggtaaaacccggcaccttgcccgagatcgtaacggtcagctctgcgacatgatctggtaccagctcggttcgtatctgtctcggctttgtcgtcgttctgtggtttgtttgtgtgtgcatcggcgggtggccgctggttgttcttttcccggtggttgggggttctgggccgttcgtgtcgccgtttctggttgtccggggtcttctgttgaaggcgggtccgagtgcggtcgctggttggttgtgggcggatgcccggtgccaggcaagctcgtgcagggcgcttcat

SEQ ID NO: 28938 - DNA, 1473 bp, Homo sapiens
  SIMILAR (769)..(1311): 721254mologous to Escherichia coli 'regulatory protein sfs1 involved in maltose metabolism',accession number D26562,Smith- Waterman Score=625.
atgcctctccaccatcgccagtgtccagcgatcccttccgcaccggacctgcctgggaggggagaggacagcggccgctaccttcttcttcgccgcggccctcaatacctggagactcatgtccgggccgtcagcagcacggaagaattcttagagctgagtcctcaaatgcttaaagaagtgatttctcttgagaagttaaacgtcggcaatgaaagatatgtctttgaagcagtaatgcgatggatagcacatgatacagatataagaaagatcaggctaaatgaagatacaatccaagatgttgttcaggcagctgacctgctgctactgacggaccttaaaaccctgtgctgtgagtttttggaaggctgcattgctgctgagaactgtattggtatccgtgactttgcactacattactgcctccatcacgttcattaccttgccacagaatacctggagactcatttccgagacgtcagcagcacggaagaattcttagagctgagtcctcaaaagcttaaagaagtgatttctcttgagaagttaaacgttggcaatgaaagatatgtctttgaagcagtaattcgatggatagcacatgatacagaaataagaaagcctttaattcctctcttcaacacttccatttacggtggaactcgagcccagaagtctaagtttgcttttaacattgagaaccaaggaggagatgccggccccttgctctccaatcccccttcttgttttcgtctgtgcaaccaatgcaggttacctcaagatctgctgggacatagaagggagctgaattcattagagccagatcctgtcttggttgagctgaacaaggcccagctcggtgtgcccactggacatgaatctcttctgcttccagccgtgccagtgcccatagccttggcagcattggcgagcgaagtaaaatacggcgcagaacgcagccgtattgactttatgttgcaggcggattcgcgtccagactgctatattgaagtgaaatcggttacgttagcggagaacgaacagggatattttcccgatgcggtcactgaacgaggtcagaaactacttcgggagttgatgagcgtagcggctgaaggccagcgtgcggttatctttttcgccgtgctgcattcagccattacacggttttcacccgcgcgccacatcgatgagaaatacgcgcaactattgtcagaagctcaacagaggggggtagaaattctggcttacaaagcggaaatttctgctgaaggcatggctcttaaaaaatcactgccggttacattgtacccctgccagaagaatcggccaccgctacaggtgccagctggactcacccttggggcaggcaagatgcttcctggtgatgagtgccccaccttcggagggaaacactggagctgcagggcagaggacaagcctcaggccatcggggagagcagagcatga

SEQ ID NO: 28939 - DNA, 2323 bp, Homo sapiens
  SIMILAR (1843)..(1139): 961254mologous to Escherichia coli similar to E. coli yeiG,accession number U73857,Smith-Waterman Score=1209.
ccagtggcctcttggtgttcccgggatgtaggtccccctttagcccgtcccattcctcccccggcccctcatactccactctcttcagccggcccatctgcggcagcacctgggccagctcggcagctgcctcatccccgaggagattccaggacagcctcccagacatcccacagggaagcagctcatgttcactgagcactgacgggatggctggtcctacatgaagtcccaggaaagacctgtgcatgaagtcccagggaagaccctgacccgctcccagtttcttgacagatttaagttgcttttcttctaagccttctttagcagtctcttcaaaaagtttgatgacaccattaaggtccacaggcttcaaaacaccagttccacatggcgagggaggcttgctgcaggtgatccctgtcctcgtgggctctacaccctggcaggtcaacacagaagtagggcggctgggaggctggaactggggaacagggagcagacgttctgcaagtagggagcacttcatgagtggcaagtgtggtgtctctggtggtgttccaacggacactccctctggaatgtcatgagaattaaaaactggggcataagggaagaagatggctgagaatggagcctcggtttctatgtctgtaaaacagtaagtactggaccccatctggtcctcctcccagacttgcatctggtgcaatctacggaaacagtctatctgtctgagcagcgggagctccatacagaaacgcaggacccctccagccaggttgttttccgccaagctgatctcttccaaatggggggatccatccagggcctgggccaggctcagggccccacctgggcccagatggctgaatggtaggttctcaggttcagcatgacaacgaactatatttttgtgaccggcggggtcgtatcctctctgggtaaaggcattgccgcagcctccctcgcagccattcttgaagcccgtggcctcaatgtgaccatcatgaaactggatccgtacatcaacgtcgatccaggtactgatgtccaagcggaagagccactgcagagtggagaagcaccgaaccaaacccaacacggcatccagggacaaaccgttctcactgaggccaatcttttcagatttggagtcgcagctgtctgcgtaaaaatcatcactcaacccctgatcaaccatgatttccgcaacgcgttgaccttgtgaaataagactcaccgggtcgtaatccaaccaggcatctttattttcagcaagatatgcagcaaaggcttgctgtccccacggcacttgcgatggggagacaatgggcgaaaacgccgagacgctgacatattcatctgggttacgtaacgccagcaccagcgcgcccagcccgcccatagaatgaccagagatagactttttggccgttgccggaaaatgatgcatcactaaatccggcagctcgttgcggatatagtcatacattttgtaatgttcattccacggcgcttgcgtcgcgttcaggtaaaacccggcaccttgcccgagatcgtaacggtcagcatctgcgacatgactgcctcgcggactggtgtccggcgcaacaacaataatgttgtgctcagccgcgtaacgctgcatccccgatttagtaatgaaattctgctcgttgcaggtcaggcctgaaagccagtacagcaccggcaatttttcattcgcggcttttggtgggagatagacgccgacattcatttcacatttcagtgattgggaataatgccgatacatattttgccagccgccaaagctgacatgtttttcaatgagttccatcagtcattatctcagggttaatcccccggacggctgcccggggagagtattaagaacccccgcctgaagtggacggggtaaacctgcgggaaatcagtaacgaattacggttcgaatggatttgccttcatgcatcaggtcgaaggcgtcattaatttcatccaggctcatggtatgcgtgacaaacggttccagatcgatatcacctttcatcgcatcttcaaccatgcccggtaactgggaacgacctttcacgccgccaaacgcggaacctttccatacgcgaccagtgaccaactggaatggacgggtggagatttcctgaccggcaaccgcgaccccgatgatcaccgactgaccccagccgcggtgcgcactttccagcgccgcacgcatcacgttgacgttaccgatgcattcaaaggtatggtcgataccccatttgttgatatccaacagacggtaatagcctgaccgcat

SEQ ID NO: 28940 - DNA, 985 bp, Homo sapiens
  SIMILAR (184)..(669): 961254mologous to Escherichia coli succinyl-CoA synthetase beta-subunit,accession number J01619,Smith-Waterman Score=779.
tcagtgctccactcggcgtccgcgcgcgccctgggccagcggcgccgccggaggtcgtcgctggcgctcgcctgccggtggggcgccgcgcacgcgcggcgcctctccccgcccttcagcgcgtgcctccacgcgcacgcggcgctgcggccgcgcgtaaataaacgccattccagaatttgactgggcaagcgtctggtaacgtatcatacagatgccaatggccaaccggttaaccagattctggttgaagcagcgaccgatatcgctaaagagctgtatctcggtgccgttgttgaccgtagttcccgtcgtgtggtctttatggcctccaccgaaggcggcgtggaaatcgaaaaagtggcggaagaaactccgcacctgatccataaagttgcgcttgatccgctgactggcccgatgccgtatcagggacgcgagctggcgttcaaactgggtctggaaggtaaactggttcagcagttcaccaaaatcttcatgggcctggcgaccattttcctggagcgcgacctggcgttgatcgaaatcaacccgctggtcatcaccaaacagggcgatctgatttgcctcgacggcaaactgggcgctgacggcaacgaactgttccgcagcctgattctgcgcgaaatgcgtgaccagtcgcaggaaagatccgcgtgaagcacaggctgcacagtgggaactgaactacgttgcgctggacggtaacatcggttgtatggttaacggcgcaggtctggcgatgggtacgatggacatcgttaaactgcacggcggcgaaccggctaacttccttgacgttggcggcggcgcaaccaaagaacgtgtaaccgaagcgttcaatcctcctggatacatcggcccgtaccaaggggttccgccggccggtcctggggtaacgcgaatgggcaaaagtgtacggcgaatagtccaggttgggtgccaggtggcagcgggaagccat

SEQ ID NO: 28941 - DNA, 3189 bp, Homo sapiens
  SIMILAR (759)..(49): 991254mologous to Escherichia coli similar to,accession number D90863,Smith-Waterman Score=1213.
ctaatccgggttccactcagggggtctggttctcgtgagggacccgttaaccacctccacgcccagcgcaggaaagataagcgaacatccggctccggtaaacgccgcgcccgctaatgcgacccatgcacctggggcttgccagagcagcaacaagcccaccgtttctacaagcagagagacaatcgccactttcacgccgccaaaacggtccggcatccagccaaacatgacgcgcatcacgacaaatgcgccgccaaacgcggtaagagtaaagcccgccatcgcccatcctttgctggcaaagtagagcgaaacgaaagtcccgataacagcaaaaccaacgccttgtagtgccagacctaaccctggtttccagataagcccgacaacgctccacagcgatggacgttctcccgccagggccggtactttgcgcactgtgccgttacaggcccacgccagtacgggtaataccattgtggtgatcgccagtgcggcaaaaccgtaatggctatgaatcaacaggccaagcggagcaccaacagcgagggcaccgtaaatcgccattccgttccatgacatcactttgccagagtgttttggccctacgatgcctagtccccaggtcagagcgcctgtcagtaactggctttcaccaaagccaagaatcaaacgcccgacgaccaacagagcaaatttgaacggtgcggagacaggcaaaatcgccgccagcagcaacgcgccgccagccagaccaggggatcctgcagcatggaactggtaaacgcttgtggtataacggattgtaagtctttttgggttatataggtagacaaatgacaggtgaatgtcgaggttggttggtaacaggatgttttcggggtggcgaaggggttcttgggaaaacactttgcagatctccgtgtcctgccagaagtggaagccgggggggcaggagcagctgtagctgccagggctattctggcaccacccgttgtcacacaggaggctgttgagggcacactcatccacgtctgtgcagtccttgcctgaggcacctgcctcataacccaggttgcagacacagcggtagctgccccgaaggttctcgcacacgccattggcacaaacctcaggatccagagcacactcgttgatgtctgctgggcacaggtactctctggtaccgactgattgtatcgcgcgtttcctttctttggcttgctgggtcctctgcgatacgttgttacggctttgccgcaacaagccagttgcctgccgcgctcgcagaatgtctgcagcccggagataaggagattgttcctgccagctaaatcccttcctgtcgatacgaaccagctcgtatttttctaccagaaaattcacggcatcggctagggtgataccggcatcgatgtgttccttaatcacagcctcattgcagaatggcgtgtcgtttattgtcagaccatagtgctgttccagcagacgtgtcagtaacatttgccagacagccacgggtgacaggcagggcttcaccgcccgctgagttattgcaggtaaagttttcatgtttgctctcgtgtaggtaattaacgcggtggtcagcatcgattccatctggaggataaagtgcgggaatgtttcatccagcttccggcattcgatgtcactgaacttgccggtgatgctggcccggtcagccagataatgcagtcggttgccttcctgcaccagacgggctcccaggcgcagtggtacaacaaaatcagcctgcgttcccagcgttgccgccagccttgccgattcgccctccagtaatgcgcgaacgtcgagcagatcgtacagcgttcgcggctgcgtagttgcgctgacggtaacatcggttgtatggttaacggcgcaggtctggcgatgggtacgatggacatcgttaaactgcacggcggcgaaccggctaacttccttgacgttggcggcggcgcaaccaaagaacgtgtaaccgaagcgttcaaaatcatcctctctgacgacaaagtgaaagccgttctggttaacatcttcggcggtatcgttcgttgcgacctgatcgctgacggtatcatcggcgcggtagcagaagtgggtgttaacgtaccggtcgtggtacgtctggaaggtaacaacgccgaactcggcgcgaagaaactggctgacagcggcctgaatattattgcagcaaaaggtctgacggatgcagctcagcagggctttaccggtagccaggggactttccactcagaacaggccattgcatacggcactaaaatggttggcggcgtaaccccaggtaaaggcggcaccacccacctcggcctgccggtgttcaacaccgtgcgtgaagccgttgctgccactggcgctaccgcttctgttatctacgtaccagcaccgttctgcaaagactccattctggaagccatcgacgcaggcatcaaactgattatcaccatcactgaaggcatcccgacgctggatatgctgaccgtgaaagtgaagctggatgaagcaggcgttcgtatgatcggcccgaactgcccaggcgttatcactccgggtgaatgcaaaatcggtatccagcctggtcacattcacaaaccgggtaaagtgggtatcgtttcccgttccggtacactgacctatgaagcggttaaacagaccacggattacggtttcgatccgcagaccgaagcgatcgtgatgatcggtgagatcggcggtagcgctgaagaagaagcagctgcgtacatcaaagagcacgttaccaagccagttgtgggttacatcgctggtgtgactgcgccgaaaggcaaacgtatgggccacgcgggtgccatcattgccggtgggaaagggactgcggatgagaaagttcgctgcttcgttgggaaaggggccccacgggcccatggggggaaacaggatgttttccatggtaatgcactcaaagtacaccctcgattggcagaaattggcaagtgtgattttccaagtgttggcagtgatgcaggggaacaggaacgcagacatttttggcgtttccccttggacccttgctttaagtcctcttggcgggacaacaacacatttcttctcacgactttctgcgacggtcttcttttcaacgacatttctccggcttattaa

SEQ ID NO: 28942 - DNA, 1904 bp, Homo sapiens
  SIMILAR (486)..(1169): 831254mologous to Escherichia coli succinyl-CoA synthetase beta-subunit,accession number J01619,Smith-Waterman Score=934.
atgattgaagatgcgatgaaaggtgatatcgatctggaaccgtttgtcacgcataccatgagcctggatgaaattaatgacgccttcgacctgatgcatgaaggcaaatccattcgaaccccgcgaatgaaaaattgcccggtgctgtactggctttcaggcctgacctgcaacgagcagaatttcattactaaatcggggatgcagcgttacgcggctgagcacaacattattgttgttgcgccggacaccagtccgcgaggcagtcatgtcgcagatgctgaccgttacgatctcgggcaaggtgccgggttttacctgaacgcgacgcaagcgccgtggaatgaacattacaaaatgtatgactatatccgcaacgagctgccggcatttcagtgcatgcatcattttccggcaacggccacacaagtctatctctggtcattctcatgggcgggctgggcgcgctggtgctggcgttacgtaacccagatgaatatgtcagcgtctcggcgttttcgcccattgtctccccatcgcaagtgccgtggggacagcaagcctttgctgcatatcttgctgaaaataaagatgcctggttggattacgacccggttcacgctggtggccgcggtaaagcgggcggtgtgaaagttgtaaacagcaaagaagacatccgtgcttttgcagaaaactggctgggcaagcgtctggtaacgtatcaaacagatgccaatggccaaccggttaaccagattctggttgaagcagcgaccgatatcgctaaagagctgtatctcggtgccgttgttgaccgtagttcccgtcgtgtggtctttatggcctccaccgaaggcggcgtggaaatcgaaaaagtggcggaagaaactccgcacctgatccataaagttgcgcttgatccgctgactggcccgatgccgtatcagggacgcgagctggcgttcaaactgggtctggaaggtaaactggttcagcagttcaccaaaatcttcatgggcctggcgcccattttcctggagcgcgacctggcgttgatcgaaatcaacccgctggtcatcaccaaacagggcgatctgatttgcctcgacggcaaactgggcgctgacggcaacgcactgttccgccagcctgatctgcgcgaaatgcgtctggcgatgggtacgatggacatcgttaaactgcacggcggcgaaccggctaacttccttgacgttggcggcggcgcaaccaaagaacgtgtaaccgaagcgttcaaaatcatcctctctgacgacaaagtgaaagccgttctggttaacatcttcggcggtatcgttcgttgcgacctgatcgctgacggtatcatcggcgcggtagcagaagtgggtgttaacgtaccggtcgtggtacgtctggaaggtaacaacgccgaactcggcgcgaagaaactggctgacagcggcctgaatattattgcagcaaaaggtctgacggatgcagctcagcagggctttaccggtagccaggggactttccactcagaacaggccattgcatacggcactaaaatggttggcggcgtaaccccagactgctatattgaagtgaaatcggttacgttagcggagaacgaacagggatattttcccgatgcggtcactgaacgaggtcagaaacaccttcgggagttgatgagcgtagcggctgaaggccagcgtgcggttatctttttcgccgtgctgcattcagccattacacggttttcacccgcgcgccacatcgatgagaaatacgcgcaactattgtcagaagctcaacagaggggggtagaaattctggcttacaaagcggaaatttctgctgaaggcatggctcttaaaaaatcactgccggttacattgtag

SEQ ID NO: 28943 - DNA, 2142 bp, Homo sapiens; identical to SEQ ID NO: 25688
  SIMILAR (1516)..(2139): 901254mologous to Escherichia coli phosphomannose isomerase,accession number M15380,Smith-Waterman Score=948.

SEQ ID NO: 28944 - DNA, 1230 bp, Homo sapiens
  SIMILAR (1176)..(568): 1001254mologous to Escherichia coli transposase,accession number X60200,Smith-Waterman Score=1057.
  misc_feature (1)...(1230): n = a,t,c or g
ttaaggagataattcgttgtttatatttaaatttagagctctcagttccccttttaaaatatcctctggcaacgtgaatgtataatggcccaacatattgatatgcccgtgcatcaggggagatagccgagcgatatcttcatctataatttcttcgccattacggcgcatccagctcaacgcttcctccatatagagcgtgttccacagaaccactgcattagtaaccaggcccagcgcccccagttgatcttcctgcccttcacgataacgctttctgatctctccgcgttgtccgtaacaaatcgcacgagccacagcgtggcggccttctcctcgattaagctgcgtcaggatccgccgacgataatcttcatcatcaatataattgaggagatatagcgttttgtttacacgccctacttccataattgcctgtgccagtcctgatgggcgcgagcttttcagtaaagagcgaatgagttctgacgcatgaattgtacccaacttcagcgaaccagcggttcgcatcatctcatcccactgactctccgcttttgacagatcgggtaccacaatgccatggaacccagagtactgatcagatacgaagttataccaggtgatgcctcgtccagaaccaaaatattttctgttagatcctgagttgatggtcttcactggtgtgacaaagcgcatgccgtcagctgatgccacttctccacctccccaacgaccagcaagctccagtgtggactgaaaatcaaccaggcgggcattggcgctgaccagcgtttctgcacgaaggtaattctgtttcacccaactgagccgatggcgggtcagtgctggtatattgtgctttatcagcggttccagtccgatattacaggcttcagccatcaataccgcacataaactgatgtgcaaatcttgcgctcgagcaccagattcactgacatgcgcaaactcatgtgtaaatcctgtctgggcatctatctcaagtaacagttccgttaaatctaccggtgggagtagctgtttgatccgattatttagacgaagcaatgatggtggctcttcctgtttctccagacaactgatagtcagggatggatatttaccttcattacagatatgaacttccgcattcttttcaaatcgtgatgccacggcttntccaggtctcatccagctgaatagccagntgttgcacacctttacgtccat

SEQ ID NO: 28945 - DNA, 2616 bp, Homo sapiens
  SIMILAR (348)..(199): 921254mologous to Escherichia coli biotin sulfoxide reductase (bisC),accession number M34827,Smith-Waterman Score=228.
atgagtaaagttggaccgtccggcaccgagataaacgaatttccgggaaatgtcggttcataccgttgtgttgatatgcgccaccagggttttccagtgcttcaacaatgcgggcaacaggattttatccaccgcatcgcagcgacccggcaagctgccttgcatggaagagagcaccgcagaacgccgcgtggggttaccaccattggcaaaatgcatggtggtattttggtggaaaatagccgccagctcgcggattttcgctgcgccaacaccacaaatctctgctgcccattcggcggttttcgctattccgtcactctcgcccagcaaataagaggcgaagacgggcataacctgtggtgcaacgcgccagaaacgcttcgtcgtgccaaccattttccaccagcgtatgggcgatccccagcatcagcgcaacatcggtgcccatgtgcggtgccacccactccattttatcgccaaagaaatcgacggtttccgatcgcactggatcaatgcagatcagctttttcccgctgtcacgcagtgcagaaaagtaagaaagcccctgctcatcggatgcattccacgcaattttcagcatgcccggtatacagttgtaagatctgtttcgacagcccagttagcatgatcatcatcaacgatgattcggccgccaggtcaaagttaggcccgccggtgtctgttgtcgggtttatccagcagcaggttgctcattggcatccactccgcaagattttgctccatgttgaccatcgagcggtgtggctgacagacccagcgcgacttactcaccgccgaaggtgtcacgtttatcgcgttcgccgctttggtatcctgcgctcctgcatcagcagttgcagacaaagcagcagattgagatcaagcgtggtgatggatttcttcatgagcggcaacggggcgtccaggcgcgacgaacataatcagcaacaggctcactatgctacaggcaatcagaatcccgatcagcatattccatgcgccgataccaaccaccgctgccagccaaatccacatgacgaaccgcaaacctgcgcaatacctaaggtcgagctggtacgcccgcgcgtaatgaaaacggccctaacgcctgactcatcgccacaccaaaacctaccgagaaacgacggctttaccaaacatattggtataaacagcagccaagttaccttccaccggaacatcggcaacgccatcggcatcaatcagcaggcgtgtcccgcccatattctgggtacggtgaagtgcgccgccgtgggtagcggcatgagttatgtcgactggtgctgtaagtgtcaggtcgtgtgggtagctttccgctctccccgtactatatttaaacccgtggtcaccaagcccctgccccctttctcctaccctccctttcttgcctggtcttttcctacacccctctaccccgactctgcggtcttgtctgccggcttttcttatgtaaatgacttttcattgccggttaggcgtccccctagctacacccacaccgccggcttgaacgcggtgacgctcccgccctccaatcaacaacttgccgaggctcgaacaccgcgcagggcgtgccgggcaaagaaactttctacctgtcgcccccccccacccacccccaccaatatgtatacggcccagcgacgtggaactctttttatatggggtttctataagatttcccacttaagccaattctacttccgagatctagtaacacccttaagatttggtcggagacttatggatatgtggggacatattagacgcgcacccgtgaccacgttcccagagttagacccgggttgccatactaaaattatccgcatgggagttattcggcggagcatgggcaccatcacgggccacacgaccgggatacggcgaacctttgtgcgattgtacagtcgcgccacgggggctatcggagcaccgcgtggtgccgcgccgtcctggggcggcggcgctgcattagtggccccggtgtctctcctaggtgggtgttttatggttgttacccacattctccccggtggttgttcttcttatcactattgctggcagtggaagaaggctgtaaccgtcgtgagtcttcctgcggtccgtttcttcttatcccttctcactgttatgaaaaatcggtgctaccgctgtgagagtggagacatgcgggcgggcaccgccagcccccccgagaagccacgacgaagtgaagacagccagcagcccccgaacacgccccagcttagaggccagagaaagcatcacagtcccaccaacacacaagaagaagtggacgacggctattctgcagctacgcagccacccaatcacctgacaacactcgacaacactccccatagaagagcacacacgacgccgagcgcgtgtagatgtggcagacacgagccgccacacacccacagacacagacaggcaacaactgcacagggacagaactcgcacgccgagcgagcgaacgaccggagcgttcaccaaatcgcgctggcaaaaacagtcccccatctagagtacacggcagcagcccgcgcgtgcccacgagccccttag

SEQ ID NO: 28946 - DNA, 1524 bp, Homo sapiens
  SIMILAR (61)..(1110): 941254mologous to Escherichia coli K12 putative 2-component regulator,accession number AE000418,Smith-Waterman Score=1687.
atggtgtttttatccaccgacgccaactggcgctgcgcttcacgcacaatatcctcgttagaagactatttaattcacatcaccaccggtacccacgtcgcgcagatttgctggtttctgctggcagaagcgcgttacctgcccgcccggctgatacaatcttcacctccgcgcaaaaaagaacagccgcgcggcccaggtgaagtaacgattatcgatctcgatttaagccgttataacgccatcgccagccgctttgccgaggaacgccagcaaacgcttgattttcttaagtccggcattgccacgcgtaacccccacttcaaccgcatgattgagcagatcgaaaaagtggcgatcaaatcccgcgcgccgattctgcttaacggtccaaccggcgcgggcaagtcatttctggcgcgacgcatcttagagttaaaacaggcgcggcatcagtttagcggcgcgtttgtggaagtgaactgcgccaccctgcgcggcgataccgccatgtcgacgctgtttggtcatgtaaaaggcgcgtttaccggggcgcgggaatctcgtgaaggtttattacgcagcgccaacggcggaatgttgtttcttgatgagattggcgaactgggcgcagacgaacaggcaatgctgctgaaagccattgaagagaaaaccttttacccgtttggcagcgatcgccaggtgagcagtgattttcagcttatcgccggaacggtgcgcgatttgcgccagctggttgccgaaggcaaatttcgcgaagatctgtacgcgcggatcaatctctggaccttcaccctgacgggtctacgccagcgccaggaagatattgaaccgaacctggattatgaagtggagcgccacgcctcactcactggcgacagcgtgcgttttaacaccgaagcgcggcgcgcctggatggcttttgcgacctctccccaggcaacatggcgctgtaactatcgcgaactttctgccagcgtcacgcggatggccacctttgccactagcggacgcatcactctggacagtgttgaagatgagataaaccagcctgccagtctgcctgatgcactgggcgagcgcatcgggaacatacttgacaaaacacctgattggtacctgtatcacaggggccactcccactactataactattatgcaaagcaccttgacgaacatcagatcgacatagcggacagtgaggtggaacggctctaccgtatgatgcccgtcaacactgtcagggaagggttcggtgatcttatgtcccgggatgtgacgggcgtgctcaatacgcaagcgggcgtattccacttagtgcaggaagcattggtggaacttaaagggaaggatcgatattttgctcacgcgcatccacggttacagcaacacatgcataagacaactgaagaactggggcgagagattactcatcagatattcctgctgcacttgattgcccaaacggtgaaatatgcttgtccgccaatggcgcaagcgtga

SEQ ID NO: 28947 - DNA, 786 bp, Homo sapiens
  SIMILAR (542)..(571): 1001254mologous to Escherichia coli 5- methyltetrahydropteroyltriglutamate- homocysteine methyltransferase,accession number M87049,Smith-Waterman Score=52.
atgcccgtcatccgcttgtcactctcaggcatctcccgtctgaaggggggcgcggaggaggaaacaaccgccctggcgctattaacacccctttttggggatcggcttcttcccaagaaaaccctgctgctgtccacctattttgaaagcgtaacgccaactctcgacacgattactgcgctgcctgttcagggtttgcatgttgacctcgtacatggtaaagatgacgttgctgaactgcacaagcgcctgccttctgactggttgctgtctgcgggtctgatcaatggtcgtaacgtctggcgcgccgatcttaccgagaaatatgcgcaaattaaggacattgtcggcaaacgtgatttgtgggtggcatcttcctgctcgttgctgcacagccccatcgacctgagcgtggaaacgcgtcttgatgcagaagtgaaaagctggtttgccttcgccctacaaaaatgccatgaactggcactgctgcgcgatgcgctgaacagtggtgacacggcagctctggcagagaggagcgcccccgattcaagcacgtcggcactctacccggggcacaagggcacacccaacgtgagcgagtgttgtcgcacacctatacagaagagaaacttggtgctgataacgaggattggcggaggagatctgacgtgtgggagcttattcttatggattttaccacttcgtggaatcagcactattgtcgttcttcttgtcgcgcataaagagaagtctaataatgcgaaccatttgcgtccttgcctctga

SEQ ID NO: 28948 - DNA, 960 bp, Homo sapiens; identical to SEQ ID NO: 8845
  SIMILAR (448)..(906): 981254mologous to Escherichia coli similar to,accession number D90889,Smith-Waterman Score=804.

SEQ ID NO: 28949 - DNA, 1720 bp, Homo sapiens
  SIMILAR (1684)..(1719): 911254mologous to Escherichia coli K12 putative frv operon regulatory protein,accession number AE000465,Smith-Waterman Score= 51.
atgtggtggggcgggttgttgtactggctggctgcattagtgacgctgctatgggcggccagccagatccaggcgctgaaaaaactgacctgtgccatcagccagacactggaagaacaaccggtgctcaacagtaaatcgtggctgaccagtttgcaaaacgattacagccttcctgactcactgacggagcgcatctggctgacgctcatttctcaacggatttcccggggagagctgagggaattttgaactggcagacggaaactggttactgaacaatgcctggtatgaaagaaacatggcagggtttaacgaacagttgaaagagaccctgtcattcccacctgatgaactgaaaacgctcttccggacccgcctgaatttatcaccggaagcgaatgacgattttctcgatcgttgcctggacggcggtgactggtatcccttttcagaaggtcgccgttttgtatcattccatcacgtggatgagcttcgtatctgtgcctcctgcgggctgacagaagtacatcatgccccggaaaatcataagccggatccggaatggtactgctcctctctttgtcgcgaaacagaaacactgtgtcaggaaatttatgaacgcccttacaacagctttatttccgatgcaacggcgaatggtctgattctcatgaaactgccggaaacctggagtacaaatgagaaaatgtttgcttccggagggcagggacatggagtccgtctgaaaaacgcacggatcctcggtgataataatgccagaaatggagcagacagactggtcagcggaacagaaatccagacgaaatattgttcaactgcagcccgtagcgtcggtgcggcattcgacggacaaaacggacagtatcgttacatgggaaataatggccccatgcaactggaagtcccccgtgatcagtatgccggcgctgttgaaaccatgaggaataagatccgcgaaggtaaaggtgattatctctccagcctgattctggcgatttacgccctgcgtaatcaactgaccgatgagtggccgcaatatcccggtgacgagataaaacaaatcgttgaacatagcggtctgtttcttggtgataacgctgtaagaaccctgacgggtttgatagagaaacagcatcagcaagcgcaggtaatttcagccgataatgtgcaggggttgctgcaaagggtgccgggcatcgcgtcattgaatattattgatgcgcagctggttgagaatattaccgggcatttattacgttgccttgccgcaccagtgtggattgctgagcaccgccagagcagcatgaataacctgaaagccgcctggcctgcggcctttgatatgagtctgcactttattacgctactgcgtgaacagctcgatattccccttttcgacagcgatctgatcggtttgtattttgcctgtgcgctggagcggcatcaaaacgaacgccagccgatcattttgctctcggaccagaacgcgattgccactattaatcagctcgccattgagcgcgatgttttaaattgtcgggtaattattgcccgtagcttaagcgaacttggtgccattcgcgaagagattgagccgttattgatcattaacaacagccattatttactggatgacgcggtaaataattacatcaccgtaaaagtatcattacggctgccggtatcgaacaaataa

SEQ ID NO: 28950 - DNA, 530 bp, Homo sapiens
  SIMILAR (3)..(206): 1001254mologous to Homo sapiens Usher syndrome type IIa protein,accession number AF091889,Smith-Waterman Score=406.
ggcttaggtgtgatcattgcaattttggatttaaatttctccgaagctttaatgatgttggatgtgagccctgccagtgtaacctccatggctcagtgaacaaattctgcaatcctcactctgggcagtgtgagtgcaaaaaagaagccaaaggacttcagtgtgacacctgcagagaaaacttttatgggttagatgtcaccaatttgtttctgtttcgcgacaaagagaggagcagtaccattccggatccggcttatgattttccggggcatgatgtacttctgtcagcccgcaggaggcacagatacgaagctcatccacgtgatggaatgatacaaaacggcgaccttctgaaaagggataccagtcaccgccgtccagctaacgatcgagaaaatcgtcattcgcttccggtgataaattcaggcggttccggaagagcgttttcagttcatcagctgtctacggtcctgcacgatgagctacgagtggtggtgcagatatcggagactaagattgtgagatga

SEQ ID NO: 28951 - DNA, 1188 bp, Homo sapiens
  SIMILAR (592)..(1185): 1001254mologous to Escherichia coli transposase,accession number X60200,Smith-Waterman Score=1014.
atggtggattcgttaattgcgcgcgtaggagtaatggctcgcggtaatgccattactttgcctgtatgtggtcgggatgtgaagtttactcttgaagtgctccggggtgatagtgttgagaagacctctcgggtatggtcaggtaatgaacgtgaccaggagctgcttactgaggacgcactggatgatctcatcccttcttttctactgactggtcaacagacaccggcgttcggtcgaagagtatctggtgtcatagaaattggcgatgggagtcgccgtcgtaaagctgctgcacttaccgaaagtgattatcgtgttctggttggcgagctggatgatgagcagatggctgcattatccagattgggtaacgattatcgcccaacaagtgcttatgaacgtgaatcccgatcggaagggctggacttgctgaggatgaaggtggaggaaggtgacgtcatcttggtgaagaaacttgaccgccttgggcgcgatactgctgacatgatccagttaataaaagagtttgacgcccaaggtgtatccattcggtttattgatgacggaatcagtaccgatggggagatggtactggataagttggcccgaggatatgcagatctgtcaaaagcggagagtcagtgggatgagatgatgcgaaccgctggttcgctgaagttgggtacaattcatgcgtcagaactcattcgctctttactgaaaagctcgcgcccatcaggactggcacaggcaattatggaagtagggcgtgtaaacaaaacgctatatctcctcaattatattgatgatgaagattatcgtcggcggatcctgacgcagcttaatcgaggagaaggccgccacgctgtggctcgtgcgatttgttacggacaacgcggagagatcagaaagcgttatcgtgaagggcaggaagatcaactgggggcgctgggcctggttactaatgcagtggttctgtggaacacgctctatatggaggaagcgttgagctggatgcgccgtaatggcgaagaaattatagatgaagatatcgctcggctatctcccctgatgcacgggcatatcaatatgttgggccattatacattcacgttgccagaggatattttaaaaggggaactgagagctctaaatttaaatataaacaacgaattatctccttaa

SEQ ID NO: 28952 - DNA, 698 bp, Homo sapiens
  SIMILAR (348)..(404): 891254mologous to Escherichia coli possibly rffA or rffC,accession number M87049,Smith-Waterman Score=83.
cgcgagcatacgcccagtttagcgccgtttgcatcagctcagcacctgcaccgcgtccagccagcaggccaattcgcgcatctgtcgcattgagttcccgtaaagagacatagccgcgaatatcgccggacgccgcacgtaaaatcagacattgatgatcaaaggtgccgcgcacggcattttcaatccactgtgcataaaagcgactgctggcgtcaggcgcataccacggcgcacgaaaacggctttgcgcaaatgcggcgctggctaactgacgtaatgcgggaatatcggtctcttgtgccactacagcaccgctatcactggcattgttcacgggtgcaggccaaattgcggcatcaaatacgggtgaactggatgtcctgcaacagctgggattctcaccaatcccgaggttaattttgccgggacgttcatcggcacgaaacagatcggccaggcccagaatcgggtcggcaggagcggcggtaatgttctcaaacaatgagttgatggacgcatgaattgtacccaacttcagcgaaccagcggttcgcatcatctcatcccactgactctccgcttttgacagatctgcatatcctcgggccaacttatccagtactccgtagtttgccgatttattcacccgccagaacaccgcctcacctgcatcgtgcaagcctggtggtgaaaac

SEQ ID NO: 28953 - DNA, 4107 bp, Homo sapiens; identical to SEQ ID NO: 26162
  SIMILAR (2770)..(3492): 991254mologous to Escherichia coli yjdB,accession number U14003,Smith-Waterman Score=1293.

SEQ ID NO: 28954 - DNA, 4187 bp, Homo sapiens
  SIMILAR (2204)..(2281): 611254mologous to Escherichia coli IS5 39.3kDa protein,accession number U70214,Smith-Waterman Score=73.
atgcagtattggggaaaaatcattggcgtggccgtggccttactgatgggcggcggcttttggggcgtagtgttaggcctgttaattggccatatgtttgataaagcccgtagccgtaaaatggcgtggttcgccaaccagcgtgagcgtcaggcgctgttttttgccaccacttttgaagtgatggggcatttaaccaaatccaaaggtcgcgtcacggaggctgatattcatatcgccagccagttgatggaccgaatgaatcttcatggcgcttcccgtactgcggcgcaaaatgcgttccgggtgggaaaatcagacaattacccgctgcgcgaaaagatgcgccagtttcgcagtgtctgctttggtcgttttgacttaattcgtatgtttctggagatccagattcaggcggcgtttgctgatggttcactgcacccgaatgaacgggcggtgctgtatgtcattgcagaagaattagggatctcccgcgctcagtttgaccagtttttgcgcatgatgcagggcggtgcacagtttggcggcggttatcagcagcaaactggcggtgctgcgtggccgctctccatccttgttattgacaaattaatatatcgtcgcccttgctgtggaacactgcagccagatgtgattattacaccggttctgccggtggcctgcattagcacctggcgccatactgaggcagatcccaaagaaacagcaaagggttggcctccactactctccgatgtcctatgtgtcttggagataccgcgtctgccactggacgataacggtattctgtttatcgaaaacgttggcaacctcgtatgcccggccagcttcgatctcggtgaaaaacacaaagtggcggtgctttccgttaccgaaggtgaagacaaaccactgaaatatccgcatatgtttgccgccgcctcgctgatgctgctcaacaaagttgacctgttgccgtatctcaactttgacgttgaaaagtgcatcgcctgcgcccgcgaacggcgaagggatggaccagtggctgaactggctggagacacagcgatgtgcataggcgttcccggccagatccgcaccattgacggcaaccaggcgaaagtcgacgtctgcggcattcagcgcgatgtcgatttaacgttagtcggcagctgcgatgaaaacggtcagccgcgcgtgggccagtgggtactggtacacgttggctttgccatgagcgtaattaatgaagccgaagcacgcgacactctcgacgccttacaaaacatgtttgacgttgagccggatgtcggcgcgctgttcgccctggcgcagacccgcgagcaaggctacgccctggacagcgaagagaacgagcagggcgtgcgctgcgtggcggtgccggtgtggaaccacgagtcccgcgtcatcgacgacctgagcctgtcgacgctgacctcccgcgctggtaatggccggcgaccttatccgctggaaaccatgctacgcattcactgcatgcagcattggtacaacctgagcgatggcgcgatggaagatgctctgtacgaaatcgcctccatgcgtctgtttgcccggttatccctggatagcgccttgccggaccgcaccaccatcatgaatttccgccacctgctggagcagcatcaactggcccgccaattgttcaagaccatcaatcgctggctggccgaagcaggcgtcatgatgactcaaggcaccttggtcgatgccaccatcattgaggcacccagctcgaccaagaacaaagagcagcaacgcgatccggagatgcatcagaccaagaaaggcaatcagtggcactttggcatgaaggcccacattggtgtcgatgccaagagtggcctgacccacagcctggtcaccaccgcggccaacgagcatgacctcaatcagctgggtaatctgctgcatggagaggagcaatttgtctcagccgatgccggctaccaaggggcgccacagcgcgaggagctggccgaggtggatgtggactggctgatcgccgagcgccccggcaaggtaagaaccttgaaacagcatccacgcaagaacaaaacgggcatcaacatcgaatacatgaaagccagcatccgggcccaggtggagcacccatttcgcatcatcaagcgacagttcggcttcgtgaaagccagattcaaggggttgctgaaaaacgataaccaaatgggcgatgtttttcacgctgggcaacctgtttcgggcggaccaaatgatactatcggtaaattcgctgacgttgcgtgcgcaggcccgctgctggcagctgaactggacgcgctgggtaaagcactgaaagaacctgctcgcccgatggtggctatcgttggtggttctaaaatagtcggcgcgctgatcctgctgatcgcaggatttgccattcttcgccttttgttcagagcattaatcagcacggcttctgcgctggcagggctcatattgctgtgtctgttcggcccggccttactggctggctatatcaccgaacgcataacccggttgttccatattcgctgcgctggcagcgcgtatttcatcaaaaacattcagcagaacgggatcacaccagaagatatcagcaagcgaaatgggcgggtattcctgctggtttttatactgcctttttccttacggcgtgttgggcatgcgcaccattgatcgcgttacagtacgatatttcaccgtcactgatgtggtggggcgggttgttgtactggctggctgcattagtgacgctggtatgggcggccagccagatccaggcgttgaaaaaaatgacctgtgccatcagccagacagtggaagaacatccggtgctcaacagtaaatcgtggctgggcagttagcaaaacgatttcagccttcctgactcactaacggagcgcatatggctgacgctcatttctcaacggatttcccggggagagctgagggaatttgaactggcagacggaaactggttactgaccaatgcctggtatgaaagaaacatggcagggtttagcgaacagttgaaagagaacctgtcattcacacatgatgcccccaaaacgcttttccggagccgcttgaatatataaccggaagcgaatggcgattttctcgatcgttgcctggacggcggtgactggtatcccttttcagaaggtcgccgttttgtatcattccatcacgtggatgagcttcgtatctgtgcctcctgcgggctgacagaagtacatcatgccccggaaaatcataagccgtatccggaatggtactgctcctctctttgtcgcgaaacagaaacactgtatcaggaaatttatgacgccctacaacaaattatgtgccggatccagtgtgttgtcattcaggcggtattctggctgcaaaaaggcaccgaagcggcagatattcttatatcattgataagctaccaaaaggttctgcaatgggaattgccaattatcgcgacggcattaagcctgctcattggggcaaaatcactccccgcttccgtagtggtggaggccttctccggcacctgccagagcgccgactgcaccatcgtgctcgacgcgcggctgccgcgtaagtatgaaatgagtcaggttagcctgtcgcaacaactgaaagagggtaatctctttgcggaacagtgcccgtcgcgcgaggtgttgaaacacgtcaccagccgttggggggtgttgattctggtggcgctacgcgaaggtactcatcgctttagcgacctgcggcgcaaaatcggtggggtgagtgaaaagatgcttgcgcagtcgttacaggcgttagaacaggatggttttcttaaccgtatcgcgtatccggtggtgccgccgcatgtggaatatagcctcacgccgctgggcgagcaggtgagcgaaaaggttgctgcactggcggactggattgagttgaatttgcccgaggtgttggcggtgcgggatgaactacccccgaaacgcaccgattcggtgaaattcgccggctacaaatttgaagtggtggatatcgataactaccgcatcgaccagctgctggtgacccggatcgacagcaaggccaccgccctttcgccaaaactgcctgacgctaaagataaagaagaaagcgtcgcgtaa

SEQ ID NO: 28955 - DNA, 2812 bp, Homo sapiens
  SIMILAR (2119)..(1787): 991254mologous to Escherichia coli 5- methyltetrahydropteroyltriglutamate- homocysteine methyltransferase,accession number M87049,Smith-Waterman Score=582.
tcagttgtgttctttattcttaagcgggaccgtcaaagcatggttatccaccagtaatatggctgccataacactgatgccatttgattccatcttgtcaaaatatgctttcataactagcccgaaatcaccgcaggcagcaacgcaacgcccctcaggacggctggaaaccaacgccaaagtctggtttttgcattttttgttgaagtgcgtgagaaatttttcagctgaagagtaatcatcttgatggggtttgtaatcaacattctgataaatatcattaatatattgtgcagcaatgtgtcggcatactatacggttttggggtcgccccggaaaataacattgaccattaagtttaattcttgggaattctttttcttttctatctgattttaggtttaattcttgtttatcaagagtgtctgagcgttgaggtaaaatttccattaggtatttttcaaatattggggcaatggtttgagtaagtgtcgtgttttcgtttttattaattatcgtaatttctttcttatcagcttgtaagacggacgtggaaaatttaatgacaaaatccttgttgctaaagatatgacgaccattttgtctacagttctctgagaagctttttaatagaggcgtcgccagctccttgccagaaaatttatcctcgagttctttataaaacaattcactcagggtttggtgttcatttgtctggggggaaccgtagctctgtacccaaccgttttgcgtaaagacaaatccgtcgaggtgctcgccaaagtattccaccatgtcattacgctcggcctcgccatgtaccagcacatccagtcccaaacgttcctgctcaacaatggcctgcttgatatgttccgcaatgcccgtgcggtagttgttggcgtcgagattgccctttttgaaatccagacgcagggtacgaatttccgtggtttgcgggaaggaaccaatcgtggtggtcggccacgctggcagtttaaaacgcgcacgctgggcttcagcacgcacttcatagacattcgcacgctggctgtcctgggcggtgatcgccgccagacgcttttctaccgccggattatgtacgcgggtagagtgacgacgtgcctgaatcggggcgctccactctgccagagctgccgtgtcaccacagcttttcacttctgcatcaagacgcgtttccacgctcaggtcgatggggctgtgcagcaacgagcaggaagatgccacccacaaatcacgtttgccgacaatgtccttaatttgcgcatatttctcggtaagatcggcgcgccagacgttacgaccattgatcagacccgcagacagcaaccagtcagaaggcaggcgcttgtgcagttcagcaacgtcatctttaccatgtacgaggtcaacatgcagaccctgtccctggagcgcgtcgtaagcgggtttgtatgcgtccagccacgcctgtggtagttccagtaccagcgcgggttcatcaatctgtacccactcgatgccgcgtttcgccagttctgccagcacttgctgataaaccggcagaatgtcgttcagcaggctcaggcggtcaaattgttcacctttcactttccccagccacagccaggtaaccggccccagcagcacaggtttcaccttgtggcccagcgcccgcgcctcgtccacttcgtccagcagctgcgtccaggtcagtttgaactgttggcctttaacgaactccggccccatgttatgatagttggtgttaaaccatttgggcattttccgctgccgccgcaggttcgccagtcggcgcacgtccacgaccaatacggaacagggtgtcgatatctaccgaaccatctttgttctgatgacgcgccggaacgttacccagcagcagactggtggtcagtacatgatcgtaccaggcaaaatcgcccaccggcagcaggtcgatacccgcttgcttttgttgatcccagtgacgagcacgcaattcacgccctaccgccagcagttcttcacgcgtggagttccccgcccaataactatcttgcgcttttttcagctcgcgacgcaggccaacgcgagggaaaccgagggtgtgattcaaataatgatatggctccgctccagcaaaagccgccactttttcccgatgtaatgaccagtttgctggaacagtgggcagaccgttttcgacttcgctttcgacataaatcagggcttcgtcagccagccagccgttatcttccagtaaatttatcgtctcttctaacaagccacggcggaacggtggatcgacaaacacgatattatgcggtgtacctttttgcgccaggaatgacatcgcgttgctgttcaccacgcgtgcattgcctgcttttagtgtcgccagattcttaattaactgcctagccagacggtccagcccgtcgaccacatggacgacgcccactggcaggccatcttccagacgcgttacgctcacgttacccgcattgtaagaacctacaaagacaaactgcccctggtgatcggtggaaatatgcgtcggactacccggcagcgcagactctgcggcaaaggtcagtgcgccatcgtccggggcgatacgatacgccaggacgcgaaactcagggcgaacaccaacatagagataacgtttgtccgggctgaccaccatcggctgcacctgccccggcacatcgacaacctgtgtcagcgtcagtgcgccttcatgattcagattccagacgtgaatttgctggctctcagggctggcgatataaactgtttgcttcat

SEQ ID NO: 28956 - DNA, 1677 bp, Homo sapiens
  SIMILAR (13)..(588): 961254mologous to unidentified cloning vector 29kD protein essential for the replication of mini F plasmid,accession number AB015619,Smith-Waterman Score=983.
atggcaccctacagggaacatgacggtatctgcgagatccatgttgctaaatatgctgaaatattcggattgacctctgcggaagccagtaaggatatacggcaggcattgaagagtttcgcggggaaggaagtggttttttatcgccctgaagaggatgccggcgatgaaaaaggctatgaatcttttccttggtttatcaaacgtgcgcacagtccatccagagggctttacagtgtacatatcaacccatatctcattcccttctttatcgggttacagaaccggtttacgcagtttcggcttagtgaaacaaaagaaatcaccaatccgtatgccatgcgtttatacgaatccctgtgtcagtatcgtaagccggatggctcaggcatcgtctctctgaaaatcgactggatcatagagcgttaccagctgcctcaaagttaccagcgtatgcctgacttccgccgccgattcctgcaggtctgtgttaatgagatcaacagcagaactccaatgcgcctctcatacattgagaaaaagaaaggccgccagacgactcatatctactctgggttccatggcattgtggtacccggtacattacgggattcgatttttgtactggaaggacttcttgagcagcagacagggctgaatccagttgaaatcatgacagacactgcgggtagcagcgatattattttcggtctgttctggctactggggtatcagttttccccccggcttgccgatgcaggtgaggcggtgttctggcgggtgaataaatcggcaaactacggagtactggataagttggcccgaggatatgcagatctgtcaaaagcggagagtcagtgggatgagatgatgcgaaccgctggttcgctgaagttgggtacaattcatgcgtcagaactcattcgctctttactgaaaagctcgcgcccatcaggactggcacaggcaattatggaagtagggcgtgtaaacaaaacgctatatctcctcaattatattgatgatgaagattatcgtcggcggatcctgacgcagcttaatcgaggagaaggccgccacgctgtggctcacacacaggcaactgaataccagaaagaaatcactttaacctttctgacatcagaagggcagaaatttgccgttgaacacctggtcaatacgcgttttggtgagcagcaatattgcgcttcgatgacgcttggcgttgagattgatacctctgctgcacaaaaggcaatcgacgagctggaccagcgcattcgtgacaccgtctccttcgaacttattcgcaatggagtgtcattcatcaaggacgccgctatcgcaaatggtgctatccacgcagcggcaatcgaaacacctcagccggtgaccaatatctacaacatcagccttggtatccagcgtgatgagccagcgcagaacaaggtaaccgtcagtgccgataagttcaaagttaaacctggtgttgataccaacattgaaacgttgatcgaaaacgcgctgaaaaacgctgctgaatgtgcggcgctggatgtcacaaagcaaatggcagcagacaagaaagcgatggatgaactggcttcctatgtccgcacggccatcatgatggaatgtttccccggtggtgttatctggcagcagtgccgtcgatag

SEQ ID NO: 28957 - DNA, 3739 bp, Homo sapiens
  SIMILAR (2325)..(2372): 931254mologous to Escherichia coli transposase,accession number X60200,Smith-Waterman Score=74.
atggctgaagcctgtaatatcggactggaaccgctgataaagcacaatataccagcactgacccgccatcggctcagttgggtgaaacagaattaccttcgtgcagaaacgctggtcagcgccaatgcccgcctggttgattttcagtccacactggagcttgctggtcgttggggaggtggagaagtggcatcagctgacggcatgcgctttgtcacaccagtgaagaccatcaactcaggatctaacagaaaatattttggttctggacgaggcatcacctggtataacttcgtatctgatcagtactctgggttccatggcattgtggtacccggtacattacgggattcgaattttgtactggaaggacttcttgaacagcagacagggctgaatccagttgaaatcatgacagacacttgcggttgtctggagaaacaggaagagccaccatcattgcttcgtctaaataatcggatcaaacagctactcccaccggtagatttaacggaactgttacttgagatagatgcccagacaggatttacacatgagtttgcgcatgtcagtgaatctggtgctcgagcgcaagatttgcacatcagtttatgtgcggtattgatggctgaagcctgtaatatcggactggaaccgctgataaagcacaatataccagcactgacccgccatcggctcagttgggtgaaacagaattaccttcgtgcagaaacgctggtcagcgccaatgcccgcctggttgattttcagtccacactggagcttgctggtcgttggggaggtggagaagtggcatcagctgacggcatgcgctttgtcacaccagtgaagaccatcaactcaggatctaacagaaaatattttggttctggacgaggcatcacctggtataacttcgtatctgatcagtactctgggttccatggcattgtggtacccggtacattacgggattcgatttttgtactggaaggacttcttgagcagcagacagggctgaatccagttgaaatcatgacagacactgcggaacctaatgacgtgcaactggcgcgctattttcatcttgatgaacgggatctggcctatcattaaccaacgacggggcacacataataggctgggcattgcgcttcagctcaccacagcccgttttctgggaacatttctgacggatttaactcaggttctgcctggtgttcaacattttgtcgcggtacagcttaatatccaccgtccagaagttctctcccgctatgctgaacgggacactacccttagagaacatactgcattaattaaggaatattacggctatcatgaatttggtgattttccatggtctttccgcctgaagcgtctgctatatacccgggcgtggctcagtaatgagcgaccgggtctgatgtttgattttgccactgcatggttgcttcaaaataaggtattactgcccggagcaaccacactagtacgtctcatcagtgaaattcgtgaaagggcaaatcagcggctgtggaaaaagctggccgcactgccgaacaaatggcaggcagctcaagtgatggagcttctggtcattccggaaggtcagcgtgtatcagcactggaacagttgaaaaaaggccctgttacagtcagtggacctgcgtttaatgaagcgctggaacgatatatccgattacgaagtcttgagttttcccgactgaacttttccggtctgcctgccattcaactgcgtaatctggctcgttatgctggcatggcgtcggtaaaatatatcgctcgaatgccacagcagagaaagcttgctgtacttactgcattcgttaaagcacaggaaataacggcattagacgatgccgttgatgtgcttgatatgctaattctggacattatccgcgaagcaaagaaaaccgggcaaaaaaaaagactcaggacactgaaagatcttgatcaggccgcattgttactggcgcgggcatgtgcattgttgctggatgataatacagatgtcccagatctcaggcaggttatcttcaagtgcgtacccaaaaacagactggcagaatctgtaagcaaggttaatgaacttgctcgtccacagaacaataatttccatgacgaaatggttgagcagtacggtcgggttaaacgttttcttccggcggtgttgcgggacctgcatttccgtgcggcaccggcaggtgaacatgtactggctgcgattcattatctggcagaactgaatggttcgaaaaagcgcatccttgatgatgcgcctgaacatattatcaccggtccctgggaaacgcctcgtatacgatgcggagggacggatacagcgtgcagtgatcgctggggagatcctcgcgagaagttgttgcaaggtgaagagtggcagactcagcgtattcctgtctgtcgggcactgggacatcctgtcgatggacgtaaaggtgtgcaacaactggctattcagctggatgagacctggaaagccgtggcatcacgatttgaaaagaatgcggaagttcatatctgtaatgaaggtaaatatccatccctgactatcagttgtctggagaaacaggaagagccaccatcattgcttcgtctaaataatcggatcaaacagctactcccaccggtagatttaacggaactgttacttgagatagatgcccagacaggatttacacatgagtttgcgcatgtcagtgaatctggtgctcgagcgcaagatttgcacatcagtttatgtgcggtattgatggctgaagcctgtaatatcggactggaaccgctgataaagcacaatataccagcactgacccgccatcggctcagttgggtgaaacagaattaccttcgtgcagaaacgctggtcagcgccaatgcccgcctggttgattttcagtccacactggagcttgctggtcgttggggaggtggagaagtggcatcagctgacggcatgcgctttgtcacaccagtgaagaccatcaactcaggatctaacagaaaatattttggttctggacgaggcatcacctggtataacttcgtatctgatcagtactctgggttccatggcattgtggtacccggtacattacgggattcgatttttgtactggaaggacttcttgagcagcagacagggctgtatccagttgatatcatgacagacactgcgggtagcagcgatattattttcggtctgttttgtctactggggtatcagttttccccccggcttgccgatgcaggactggcacaggcaattatggaagtagggcgtgtaaacaaaacgctatatctcctcaattatattgatgatgaagattatcgtcggcggatcctgacgcagcttaatcgaggagaaggccgccacgctgtggctcgtgcgatttgttacggacaacgcggagagatcagaaagcgttatcgtgaagggcaggaagatcaactgggggcgctgggcctggttactaatgcagtggttctgtggaacacgctctatatggaggaagcgttgagctggatgcgccgtaatggcgaagaaattatagatgaagatatcgctcggctatctcccctgatgcacgggcatatcaatatgttgggccattatacattcacgttgccagaggatattttaaaaggggaactgagagctctaaatttaaatataaacaacgaattatctccttaa

SEQ ID NO: 28958 - DNA, 3181 bp, Homo sapiens
  SIMILAR (2146)..(2907): 971254mologous to Escherichia coli K12 putative 2-component regulator,accession number AE000418,Smith-Waterman Score=1259.
atgcgggcaacagggattttatccaccgcatcgcaaccacccggcaagctgccctgcatggaagagagcaccgcagaacgccgcgtggggttaccaccattggcaaaatggtcacttcttgagcagcagacagggctgaatccagttgaaatcatgacagacactgcgggtcacacgatattattttcggtctgttctggctactggggtgaggcggtgttctggcgggtgaataaatcggcaaactacggagtactggataagttggcccgaggatatgcagatctgtcaaaagcggagagtcagtgggatgagatgatgcgaaccgctggttcgtgcaagttgggtacaattcatgcgtcagaactcattcgctctttactgaaaagctcgcgcccatcaggactggcacaggcaattatggaagtagggcgtgtaaacaaaacgctatatctcctcaattatattgatgatgaagattatcgtcggcggatcctgacgcagcttaatcgaggagaaggccgccacgctgtgcgtcgtcgccactggttaggactggatgtccatgacgtgggtgtttatggtcaggatcgctgtgtcattctggaaccgggcatggtactgaccgtagagccagggctgtatattgcgccggatgcagaagtgccagaacaatatcgcggtatcggcattcgtattgaagacgacattgtgattaccgaaaccggtaacgaaaacctcaccgccagcgtggtgaaaaagccggaagaaatcgaagcgttgatgcaactggcgcgcatcggcgtctggcaatctctggcggattgcgcaactgccatcaccaccgtgcatgtcagcgatcgtggtcacgctggatttgtcaccctcgccgcagaagattaccaactggcggcgctgggacaggttgtcgaattgcacaatgtcgggcaacggctgtttgcattgctgcgtaaagcacctggcgtaacgctgcattgccctgatcgcgtggctaacgttgcccgtactcagagtcacgttgaagtgacgctggagagtggcgagacgctgacgggccgcgtgctgaactctcaaccacaaactgacggagcgcatctcgtgacgctcatttctcaacggatttcccggggagagctgagggaatttgaactggcagacggaaactggttactgaacaatgcctggtatgaaagaaacatggcagggtttaacgaacagttgaaagagaacctgtcattcacacctgatgaactgaaaacgctcttccggaaccgcctgaatttatcaccggaagcgaatgacgattttctcgatcgttgcctggacggcggtgactgcgcatcgaggcaggtgccagttcatggcatttttgtatggcgaagcaaaccagcttttcacttctgcatcaagacgcgtttccacgctcaggtcgatggggctgtgcagcaacgagcaggaagatgccacccacaaatcacgtttgccgacaatgtccttaatttgcgcatatttctcggtaagatcggcgcgccagacgttacgaccattgatcagacccgcagacagcaaccagtcagaaggcaggcgcttgtgcagttcagcaacgtcatctttagcatgtacgaggtcaacatgcagaccctgaacaggcagcgcttccagtaccagcgcgggttcatcaatctgtacccactcgatgccgcgtttcgccagttctgccagcacttgctgataaaccggcagaatgtcgttcagcaggctcaggcggtcaaattgttcacctttcactttccccagccacagccaggtaaccggccccagcagcacaggtttcaccttgtggcccacggccagcgcctcgtccacttcgtccagcagctgcgtccaggtcagtttgaactgttggcctttaacgaactccggcaccatgtagtgatagttggtgttaaaccatttggtcatttccgtgccgccgcaggttgccagtcggcgcacgtccacgaccaatacggaacagggtgtcgatatctaccgaaccatctttgttctgatgacgcgccggaacgttacccagcagcagactggtggtcagtacatgatcgtaccaggcaaaatcgccaccggcagcaggccaacggcggaatgttgtttcttgatgagattggcgaactgggcgcagacgaacaggcaatgctgctgaaagccattgaagagaaaaccttttacccgtttggcagcgatcgccaggtgagcagtgattttcagcttatcgccggaacggctcgcgatttgcgccagctggattccgaaggcaaatttcgcgaagatctgtacgcgcggatcaatctctggacctatacactgccgggtctacgccagcgccaggaagatattgaaccgaacctggattatgaagtggagcgccacgcctcactcactggcgacagcgtgcgttttaacaccgaagcgcggcgcgcctggttggcttttgcgacctctccccaggcaacatggcgcggtaactttcgcgaactttctgccagcgtcacgcggatggccacctttgccactagcggacgcatcactctggacgtggttgaagatgagataaaccgtctgcgctataactggcaggagagccgcccctccgcgcttacggcgttgctgggcgcagaggcagaaaacatcgatctcttcgaccgtatgcaactggaacacgttatcgctatctgccgccaggcaaagtcgctttccgcagccggacgccagctttttgacgtttcgcgccagggcaaagccagcgtcaatgacgcggatcggctacgcaaatacctggcgcgttttggtctgacgtgggaagccgtgcaggatcagcacagcttcagttgaatatggtggcccgtcagcacctgcattacgcttactggcggcggggcgtcggtgtacacggtatctaacatgccggatgctgcccatattggccatcggggtacgcgccaaatttccagtgatcgaccaacccagcctatggtggcgctcaggttttcctaatgggggcggttgtggccgaacttcctggtagcgcaacttcccacatccggactctcccttaagatgcccctttatccccagaaaggcccgaaaaagagccgggcgcggc

SEQ ID NO: 28959 - DNA, 1887 bp, Homo sapiens
  SIMILAR (1426)..(1385): 851254mologous to Escherichia coli ribonuclease I,accession number M55687,Smith-Waterman Score=74.
gcccattttgatgctctgttccggatgctggtcgacatactgcatatagctttccgggctattggcaaaggtcaccaccgggtcgattaaatcttcgcaattgagataaccgttcatcagcagttcccaacaggtttcttcaatacgcttgcggctccagcgcggataatccgggttcggttcgaccagatccagcggtttattgctggtgattttggtttccagtagtgacgtgcgcggcgtggcgaagcgcagagtcatttcgacttgcacatcttttgctgtcagtttttgcaccagcgcaccgggaatactgtatgcctccagcgtaaagtcgactttcttgccgtcctgccagacggtcaggcggtcgaaattgctggccataaagttgatgtactcttccgtcagcagcgcaacgcccggaaagccgcccatggtgttagggccgtctggcaacagatgaccatgccaggctccgagatcgaaaaacggattaaaacgctggtgatcgtcgtaatcgtaatccttcatgtactgcggcgcgccagtacggttaatcacgtttttataattgtcggcgttagcggcatgggcggaaaaacagtagaaatattgcatcaggaagatttggtcgctgggatcgtgagaggcatttttcatgtagaagcggctatcaaaagccgtggcgaaacgtccgccgccgtattcgtaccagataccaaactgcatgaaagaggtggtttcatcgtcagcgtggtcagggcgatgtttggcgtaggtgtaagcggtggagagataaacgtggggatcctcataggagtcgaccatgcatggcatggcaagacggaatccccgatattctggtggtggacaaccgcaccaaagtttgtgaacctggtggatctgaatatcgaagactatatggataaggaagacttcctgatccagattatggctggcgaagagttcggcgatgtcgaagcgattttccacgaaggcgcgtgctcttccaccaccgagtgggacggcaagtatatgatggataacaactatcaatactccaaggagctgctgcactactgcctggagcgtgaaatcccgttcctgtacgcttcttccgcagaccacgaagctgtttgaaggtagcgagaacttcaaacaggattcgtctatgtgggcgacgtggctgatgtgaatctgtggttcctggaaaatggcgtttccggcatcttcaatctcggtactggtcgtgcggaatccttccaggcggtagctgcctgtacgctggcttatcacaagaaaggccagatcgaatccattccgttcccggataaactgaaaggcggctatcaggcgttcagtcaggcagatctgacaaatcgaagtatgcgtccggatcaaaccaaaagcaggcaccgtgttggcatattcgtagcgttccaggcaggaacgtccgccagctcctggcatgacttcacttagtttagcggccgtttccagtgataatccggtttccggcgatgaacacattcggctggcgcgcgcttctggtagattcgggattgggcgagtagcgcaaccgaagcgcatccagcggcgttcatcaacaccacgggcagcaaccgatttaggcaatcctggccacagaccatgtacggtcagaaaatcagctttgttggtcgtttcggtttgcaggcgacattcatctcgttcgttacgatttcgatcgtgttgactctggcaaaatccggtttgccaggagagggccaggacatagcgatcaaaatcgccatactgttttgcctgcaacgctaaggcgttggcagaagagaagggaagcagagaaaccgcgagcaacgcggcgttacgccagaatgctttcat

SEQ ID NO: 28960 - DNA, 1413 bp, Homo sapiens
  SIMILAR (586)..(1329): 931254mologous to Escherichia coli K12 putative isomerase,accession number AE000390,Smith-Waterman Score=1181.
atgattttggtgacggggggcgcacggagcgggaagagtcgccacgcagaggcgcttattggggactcttcacaggttctgtatatcgctacctcgcaaatccttgatgatgagatggctgcacggatagaacatcatcggcaaggccgcccggagcactggcgcacagtggagcgctggcaacatcttgatgaattaattcatgcagacattaacccgaatgaggttgtgttgcttgaatgcgttaccacaatggtgactaatctgttgtttgattatggcggcgataaagaccctgatgaatgggattatcaggcgatggaacaggcgattaatgctgagattcagtcgttgattgctgcctgccaacgttgccccgcaaaggttgtattagtgactaacgaagtgggaatggggattgtgccggagagtcgtctggcacgacattttcgtgatattgccgggcgggcggaacttcgatgtgttgcaaatgcagttgatattgaatcatttttttctgcggctaccgctgaagataaacaacaagttgaacaagctatcaacagtagcgtgaatcttgtccccttcggtttatctgcatcgaactggaaagtgcatcgtggcgatttagtggtagaagacggccctaaccccatgggcggctttccgggcgttgcgctgctgacggaagagtacatcaactttatggccagcaatttcgaccgcctgaccgtctggcaggacggcaagaaagtcgactttacgctggaggcatacagtattcccggtgcgctggtgcaaaaactgacagcaaaagatgtgcaagtcgaaatgactctgcgcttcgccacgccgcgcacgtcactactggaaaccaaaatcaccagcaataaaccgctggatctggtgtgggacggcgaactgctggaaaaactggaagcgaaagaagggaaaccgctttccgataaaaccattgctggcgaataccctgactatcagcgcaaaatcagcgccacccgtgatggcctgaaagtcacctttggcaaagtgcgcgccacctgggatctgctgacctccggcgaatcggaatatcaggtgcataaatccctgccggtgcagactgaaatcaacggtaatcgctttaccagtaaggcgcatatcaacggttcgaccacgctctacaccacctattcccatctgctgaccgctcaggaagttagcaaagagcaaatgcagatccgcgatattctggcgcgtccggcgttttatctcaccgcctcgcagcaacgctgggaagaatacctgaagaaagggttaaccaatccgaatggggaagcgagatgcaaatgtcaccaagggggcggggcatgcctcctcacaagagaaaaccagagaccactcaggtgtctgtag

SEQ ID NO: 28961 - DNA, 1769 bp, Homo sapiens
  SIMILAR (103)..(849): 891254mologous to Escherichia coli alternate gene name yibD,accession number U00039,Smith-Waterman Score=1216.
atgcccatacacctggcaagaaccttgactctgcgggaaataatagagcctcttcgaatatgcgatgcaaataaaaatcacaaaaagcagagatcatcgacggctggtgctcattcccgaacactcacgcattcttctcaaactcagaggggtaccgagctagaagttttcacaaagtattacgcagaaaactatccgcacgttcgtttgttgcatcaggcgaatgctggcgcatcggtggcgcgtaatcgtgggattgaagtggcaacgggcaaatatgtcgcttttgtcgatgctgacgatgaagtctatcccaccatgtacgaaacgctgatgaccatggcgttagaggacgacctcgacgtggcgcagtgcaacgctgactggtgttttcgtgaaacgggagaaacctggcaatccatccccaccgatcgccttcgctcaaccggcgtattaaccggcccggactggctgcggatggggctttcttcgcgccgttggactcacgttgtctggatgggggtttatcgccgtgatgttattgttaaaaataacattaaatttattgccggattacatcatcaggatattgtctggacaacagaattcatgtttaacgcgctgcgtgcgcgatataccgagcaatcattatataaatattatctgcataatacgtcagtgagtcggttgcatagacaagggaataaaaaccttaattatcaacgtcactatattaagattacccgcctgctggagaaattaaatcgaaattatgccgacaaaattatgatttatccggaatttcatcagcaaataacttacgaggcattgcgtgtttgccatgcggtaagccatggaagttatgcagagaatgagggagagggcaaaggggaggtccaacatgaaaacagatcaaaattaaagcttttcaaactgaaatgggttctaaagcctgaagccctgtctcctcgttttcccaaacagcacccacgaagcttcacagaggccttggaggtccataaagatccaggtggtaacgccgagaaacgcccagttgaagttcgggatcatcgcgtcaacggtgatggcgtcagcaggttgtacgccgccaaccagcgcctaacttgcgctctgctgataagtttttccgcccatgccgctacggccgacaattataaaaacgtgattaaccgtactggcgcgccgcagtacatgaaggattacgattacgacgatcaccagcgttttaatccgtttttcgatctcggagcctggcatggtcatctgttgccagacggccctaacaccatgggcggctttccgggcgttagcgctagctcgacggaagagtacatcaactttatggcccagcaatttcgaccgcctgaccgtctggcaggacggcaagaaatgtcgacttatacgctcggaggcatacagtattcccggtgcgctggctgcaaaaactgacagcaatagatgtgcaactcgaaatgactctgcgcttcgccacgccgcgcacgtcactactggaaaccaaaatcaccagcaataaaccgctggatctggtgtgggacggcgaactgctggaaaaactggaagcgaaagaagggaaaccgctttccgataaaaccattgctggcgaataccctgactatcagcgcaaaatcagcgccacccgtgatggcctgaaagtcacctttggcaaagtgcgcgccacctgggatctgctgacctccggcgaatcggaatatcaggtgcataaataa

SEQ ID NO: 28962 - DNA, 389 bp, Homo sapiens
gcattattaatctcaggagcctgtgtagcgtttataggaagtagtgttctgtcatgatgcctgcaagcggtaacgaaaacgatttgaatatgccttcaggaacaatagaaatcttcgtgcggtgttacgttgaagtggagcggattatgtcagcaatggccagaacaacctaatgaacacagaaccatgatgtggtctgtccttttacagccagtagtgctcgccgcattcgagcgacagggcgaagccctcgagtgagcgaggaatcaccagggaacagcacttatatattctgcttacacacgatgcctgaaaaaacttgccttggggttatccacttattcacggagatatttttataaatattttttttatacggcctagatctt

SEQ ID NO: 28963 - DNA, 852 bp, Homo sapiens
  SIMILAR (97)..(486): 371254mologous to Homo sapiens NAG13,accession number AF194537,Smith-Waterman Score=163.
atgcctgcaagcggtaacgaaaacgatttgaatatgccttcaggaacaatagaaatcttcgtgcggtgttacgttgaagtggagcggattataataaaagccaaaaaccacgtaataatttcaatagatgcagaaacagcatttactaaaattcaatattctttcatgataaaatcactcgacaagttaggcaaagaaggaaagtacctcaacacaataaaggctatctgtggtaaacccacagaggttactactcagaacacaaaaaccttcctcgactcaagaattggcaagcagaaagctagagaagcaaatgtttttaaggccatgcttttttctacaatctatcagaatattcaatgtaagggccaaccaaaagaaaataaaaacccattttctgggaaaaaatttaagctggctgcaaaaatttgcataagtaccaagcagcctaatgttcatcctcaagactatggggaaaatatctccaggccatgtcagaaagcttcacggccattcctcacaccacaggcccagaggcccaggaggaaaaagtggtttcatgggccaggcccagggtctctgtgttgtgtgcagccaagggacttggtgctctgtgtcccagccactccaggtgtggctgaaaaggccaatgtacagctcaagctgtggcttcagagggtggaagccccaagccttggcagtgtccacgtggtcttgagcctgaaggtacacagaagtcaagaattgaggtttgggaacctttgcctagatttcagaagatatatggaaactcttggatgcacaggcaaaagtttgctgcagggacagggacctcacgagaatctcttctag

SEQ ID NO: 28964 - DNA, 567 bp, Homo sapiens
  SIMILAR (301)..(561): 1001254mologous to Escherichia coli K12 putative ferredoxin,accession number AE000114,Smith-Waterman Score=467.
atggatctgccgattgccgccggggagcccgcagcaaaatccgtgcttccagcgatgaaaagcgacgatttcagtaagcaaaacctggcgaatatcgtcagcatcttgagagtggtccgctgcgcgatatgcgtatgtaccagaaactaccggcgttccttgataacccacgcatgtttagcggctacccggagctggcggtggcgcgccggaactgatgcgcaagaaaatcctccgccacggcaagaaagtgggcttcatcaatctaatcaaggatggcatgaaaggagtgaccgttttatgacttctcccgtcaatgtggacgtcaaactgggcgtcaataaattcaatgtcgatgaagagcatccgcacattgttgtgaaggccgatgctgataaacaggcgctggagctgctggtgaaagcgtgccccgcaggtctgtacaagaagcaggatgacggcagtgtgcgcttcgattacgccggatgtctggagtgcggcacctgtcgcattctggggctggggtcggcgctggaacagtgggaatacccgcgcggcacctcttag

SEQ ID NO: 28965 - DNA, 1596 bp, Homo sapiens
  SIMILAR (571)..(1161): 891254mologous to Escherichia coli No definition line found,accession number U00039,Smith-Waterman Score=902.
atgccgatgcaaccgcagattggcggcagttactgctatgtgcgctcgccagtgaatcatatctacctgctgctgggagagctaaatacggtcgccgaacttgccatcgtgaccaacgccccggaaaatatgcagcgtcgcggggcaatgtatttgcaacgcgaattgaaagataaagtcgcgatgatgaatcgactacagcaggcgctggaacacaaccatttttccctgatggcccagccgattaccggtatgcgtggtgatgtttaccatgaaattcttctgcgcatgaaaggtgagaatgatgaactgatcagccccgatagcttcttgccggtcgcgcacgaatttggtttatcgtcgagtatcgacatgtgggtcattgacatacgctgcaatttatggctgaaaacagagcgaagatgcccgctcaccgttttgctactaatctgtctccaaccctcatgcacaagtaagcacagccgatctggagattttcttgactcccttaggcaagccgctgccgttcagcgaagttactggatcgaaagtaaagcggataaagaaaaggtgggcgattacgtttttggcctgaaggcgcagggacgatataacggtgaaccgctcacgggtacgggaaaaataggcggctatctggcgctgcgtggcgaagggacgccgtttccggtacaggctgatttccgctctggtaacacccgtgttgcttttgatggcgtcgtgaatgacccaatgaagatgggcggtgtcgatttacggcttaaattttctggcgattcactgggtgatctctatgaactgacgggcgttctgctgcccgataccccgccgtttgaaacggatggtcggctggtagcgaaaatcgacactgaaaaatcgtcggtctttgattatcgcggttttaatgggcgaattggtgatagcgatatccacggttctctggtctacaccaccggaaagccacgaccaaaactggaaggtgatgtcgagtcgcggcaattgcggctggcggacctgggaccgtcatctggcgttgattccgggaaaggggcagaaaagtcgaaacggtctgaacagaagaagacctgcaggcagcacgagcgaaacaccgtcccaggcggcagcaagtgcgattgcgagcgggaccgtatttttcccattgttatgggctcctgtaacgttctcgacttcgatgatctgattttattgccgacgttgctgctgcaacgcaatgaagaagtccgcaagcgctggcagaacaaaattcgctatctgctggtggatgagtatcaggacaccaacaccagccagtatgagctggtgaaactgctggtgggcagccgcgcgcgctttaccgtggtgggtgacgatgaccagtcgatctactcctggcgcggtgcacgtccgcaaaacctggtgctgctgagtcaggattttccggcgctgaaggtgattaagcttgagcagaactatcgctcttccgggcgtattctgaaagcggcgaacatcctgatcgccaataacccgcacgtctttgaaaagcgtctgtctccgaactgggttatggcgcggagctaa

SEQ ID NO: 28966 - DNA, 1638 bp, Homo sapiens; identical to SEQ ID NO: 13181
  SIMILAR (1164)..(1220): 841254mologous to Escherichia coli Nodulation protein NolK,accession number D90843,Smith-Waterman Score=80.

SEQ ID NO: 28967 - DNA, 1116 bp, Homo sapiens
  SIMILAR (330)..(55): 971254mologous to Escherichia coli transcription termination factor,accession number J01673,Smith-Waterman Score=456.
gatcgatccgatctgatcgaaacgttcgatcacgtatgcacagtgattttcatcagagatggtatcaccagtgcggaggttgaaacggcggatacggctaggggaaacgtagatgtcatcaggaccggcgaggtaggagctgtctgcggaacggaggaaaccaaatccatcctgcaatatctccagtacgccatcaccaaagatatcttcgccactctttgcgtgctgcttcaggatggcaaaaataatgtcctgcttacgcatacgagccaggttttccagccccatattttcgccgagagtgatcagctcagaaaccggcgtattttcggcgacagattcgattcgcctgtaagcatcagaatgatgttcggcatatagcgcaagtccttccagtttgggcaaagcatcagccagatgtaggctatgtggatctaccaggtccacaaccattttgccatcctgttcggcaaagaacaggaaatcgggacgaacaatcttgtactgttcagcttcaacataagcgattcccagtgacgactgccctgtgtactgtggattacgataccagaaagcaaatccttcacgtttggtttcgatctcaaaaaccttggtttcccaatggttcaacagagccggatagttcccgctttcgtcacacaacaaatggtgtttccagactggaaggtcagcttccttttcaccttcacgcaccctggtcatttcaaacttgttcgccggcctgaccagatccacatcctgcggttcggtactcatttcgacgatttgacgataggcctctttacgctcatctttcaacgacttgatttgcggtgtgtactcggggcagcacgctttcggcagtctatcgggcttcgcatcgaagtaatcctgcaccgtttcggtgggtgggcagccaaaatattccgacggcttttggccgaaacgggagacatcatccacgttccctttaacgatctccatgcagtgaaagcggtgatggatgatcacacctgttcggtggtggttgagccgatccacggcgaaggcggtgtgacggccaccaatccatactttttgcagggcttgcgcgaactgtgcgatcacatcacgcat

SEQ ID NO: 28968 - DNA, 2967 bp, Homo sapiens
  SIMILAR (2488)..(2769): 651254mologous to Salmonella typhimurium LT2 92 1040187392dentity with E. coli lipopolysaccharide biosynthesis protein (WECE) (SP:P27833); contains similarity to Pfam family PF01041, accession number AF233324,Smith-Waterman Score=293.
atgaggtatatagttgccttaacgggaggcattggcagtggcaagagtaccgttgccaatgcgtttgctgatctcggaattaacgtcattgatgccgatattattgcgcgtcaggtggttgaaccaggtgcacctgcgctacatgccattgctgatcactttggcgctaacatgattgctgctgatggaacattgcagcgccgggccttgcgcgagcggatcttcgccaacccggaagagaaaaactggcttaacgccctgctgcatccgctgatttcagcagagacgcaacaccagatcccagcagctacttccccctatgtactgtggggtgtgccattgctggagaaaaatcactgttctcgttttgcaaacccagccgcttcacggtttccgggccaagtcctgacccgtcaaatccggaaacttgtacaggatcaccggcaggtcgacgctacgggcgatctgctggccgtaggcctcgcgatgctgcgccagtttgaccgcttcgtcagtggaaggggaaccgacgccaatcaataccggcactcgcccgtcgacaatggttacagcttcttcggcgagtgccatgcgctgggctgtattcatttggctaaattcaccaccggtacccagataaaacagcccgtcgacccctttattaatcaggaagtcggcaacttcgcgcattgcctttttatcaagggttccgtcacgatgaaacgtgctggataccggtggaataatgccgctgaattttttcattacctcagtttccttttcgagctgcaactctccagcaaactggcagttcatgatgtgctgaccaatatttataatcggcgctactttttcaacagcgtagagtcattattgtcgcgacctgttgttaaggacttctgtgtcatgctggttgatattaatcagttcaaacgcatcaatgcccaatggggacatcgtgtgggtgataaagtgctggtttcaattgtcgatattatccagcaaagcatccgccccgatgatattttagcgcgactggagggtgaggtgtttggcttgctatttaccgaactcaatagtgcccaggcaaaaatcattgcggaacgtatgcgtaaaaatgtcgaactcctgaccggctttagtaacagatatgatgttcctgaacaaatgaccatcagtattggcacggttttttcaacgggtgacacgcgtaatatctcgcttgtcatgacggaagcagataaagccttagcgaagcgaaaagcgaggggggcaacaaaaatgctccggcattttatcgccgcaagtgtcattgtgctgacatcttccttccttatttttgaacttgtcgccagcgacagagcaatgagtgcctatctgcgctatatcgtgcagaaagcagactcctcctttctttatgataagtatcagaatgttttcgcgtttgcaggcagaaactcgccgcgactgttctcgacaataaagtcgagagagacaagcggagtggagcgactaccgtggcaaagtcttcctgacgtaaaaacatcattacccccgaaagcggtcttgattctcaaggaaccactgcagtttgcgcggcgtgccatccggtttgctggcatcaaaaaccacccggcctttgtaacccaccactttggcgatggtttgcgccagctcgcggatagtgcagtcaacgcccgtgccgacgttaatgtgcgacaacatcggctgggtgttctccagccagacttcatgcgccagctccatgacatgaactctcgccgccgccatatcatcgacgtgcagaaattcgcgcatcgtgtaccgctctcgcgatacgcttcaaccagtttctccagtgaaacgcgacttaaaccgctgggatttggcagcacccaaatctgcgtcgaaccaatgcactttcagctgtttgtcgtagccatcaccaccgtaagccagacccagcttcaggccagtagcttccgccagcggttctgcgtcggcatggatctgcacggcaagttcacgcgtcgagaggtgcggtccgtgcaaaatatggacctgcagcatgcagcttgccccaaacccgtgttttcgcgtttgcaggtcttcccacaagagcaggcagaacgctatctggagttcctgaaaggttatctgatccttatatatgccgagtttatcggcaaagagatccagacggcctaccttgaatcctattccgaatatgggcaaaacattttcgaccgttatgttacctacgcggcgggcggtgaaggcggcgcgacgctgattaacgataaagcgttaatcgaacgagccgagatcatccgtgaaaagggcactaaccgcagccagttcttccgtggtcagctgcatacctgtgggcgcaactggaagcagcggatcgtatcaaccagcaacgtctggcgctgtggcaaaactactacgatgcgttacgcctgctggcaaaagcgggacgtaatcgagctgccgtcgattcccgatggctgcgtgcagaacgcgcatatgttctacattaaactgcgggatattgatgaccggagcgcgttgattaactttctgaaagaagcggaaatcatggcggtgtttcattacattccgctgcacggtgtgccctgcgggggaacaactttggtgagttccaggttgaagatccgctacaccaccaaaagcagagcgcacggcctgctgcgcctgccgctgttctacaacctgtcgcccgtcaatcagccgtccttgtggacggcggccagtacactggtcaagattggtgccgggttactggtcggtaagttgctggcggtgtcatttggtccggcggggcttgggctggcggcaaatttccgccagttgattaccgtgctcggcgtgcttgccggggctggcatctttaacggtgtaaccaaatacgttgcccagtaccatgataactcgcaacagtag

SEQ ID NO: 28969 - DNA, 2214 bp, Homo sapiens
  SIMILAR (571)..(1212): 991254mologous to Escherichia coli outer membrane adherence protein-associated protein,accession number U50906,Smith-Waterman Score=1091.
atgaaaataataacctgctttaagctggtgcctgaagaacaggacattgttgtcactccagaatacaccctgaatttcgacaatgccgacgccaaaatcagccagttcgatctcaatgccattgaagctgcaagccagctcgcaacagatgacgatgagatagccgcgctgaccgttggcggctcattgttgcagaactcgaaagtgcgcaaagacgtgctatcccgcgggccgcacagcctgtatttggtgcaggatgcgcaacttgaacatgcaaatctttcatgcctgcaggtccagctcatcgcacgtccacactttcccgatgacagaagggccatacaccaccgtctgagaatcgatggcggtgtaatgctgggtggaaaaccagtgggcaatagccgcgagaaactcatcgtttttccagcggctgtagccaaatacgccgtgcatcaggcgctgattcatatggagatcgcgaagatcgcgtgctcctgggattgcttatctgatcttgtgaacgcgttgcgagctaaatgcggagggggctttccgactggaccgcggctggcgatggcggcgaaagagcatcaaagattactctcaattgcaaacacggtgccgtattttcaattatcagtcagggatacaggtattgatacctacgtgttgattgtgggggagtctgtacgtgtcgacaatatgtctttgtatggatatacacgctctacgacaccgcaagttgaagcacaaagaaaacagatcaaactgtttaatcaagcaataagcggcgcaccttacactgcgctgtcggttcccctttctttaactgctgattctgttttgagtcatgacattcataattaccccgacaacattattaatatggctaatcaagcaggatttcagactttctggctaagctcgcaatccgcttttcggcagaatggtacagcagttaccagtatcgccatgcgcgccatggaaacagtttatgtcagaggatttgatgaattgttgttgccgcatttatcgcaagcattacagcaaaatacgcagcaaaagaaactgattgttcttcatttaaatggaagccatgaaccggcttgtagcgcctatccgcaatccagcgccgtgtttcaaccgcaggacgatcaggatgcctgctatgacaactccattcattacacagatagtttgctaggtcaggtcaatgtggacgtcaaactgggcgtcaataaattcaatgtcgatgaagagcatccgcacattgttgtgaaggccgatgctgataaacaggcgctggagctgctggtgaaagcgtgccccgcaggtctgtacaagaagcaggatgacggcagtgtgcgcttcgattacgccggatgtctggagtgcggcacctgtcgcattctggggctggggtcggcgctggaacagtgggaatacccgcgcggcacctttggaataaccatgcaaccgtccagaaactttgacgatctcaaattctcctctattcaccgccgcattttgctgtggggaagcggtggtccgtttctggatggttatgtactggtaatgattggcgtggcgctggagcaactgacgccggcgctgaaactggacgctgactggattggcttgctgggcgcgggaacgctcgccgggctgttcgttggcacatcgctgtttggttatatttccgataaagtcggacggcgcaaaatgttcctcattgatatcatcgccatcggcgtgatatcggtggcgacgatgtttgtttcatcccccgtcgaactgttggtgatgcgggtacttatcggcattgtcatcggtgcagattatcccatcgcacctcatgatcacgagttctcagtaccgtcagcgggcgttttcattcagcttatgccccgatgtgtaatcgtcacctccacaaagagcgactcgctgtataccgttggcatgctagctttatctgttcgggcaatacgatgcccattgtacttgttgactggtctgatattcgtgagcaaaaacgacttatggtattgcgagcttcagtcgcactacacggtcgttctgttactctttatgagaaagcgttcccgctttcagagcaatgttcaaagaaagctcatgaccaatttctggccgaccttgcgagcattctaccgggtaacaccacaccgctcctttgtcagtgatgctggcttttaa

SEQ ID NO: 28970 - DNA, 748 bp, Homo sapiens
  SIMILAR (748)..(254): 1001254mologous to Escherichia coli betT protein homolog(PIR:S10898),accession number D10483,Smith-Waterman Score= 911.
cccagccaacagtttttccattggagtcacatcatttgctttgacacctttggtctgcataaagggatgttctgcgtgattaaggtagaacatatctatccacggcgcgatgagttgttgaaactcatcttcagtgagcggattcattatgcgatgtcgaaattcaacgtcatcttttgccggggcgataatttgcccaatgcaaaccagcagtgcccgtttagtataagcatgatagactcgagctggtacctttgcggacaaagaagaagtaagcgaaggcgactgaaaggaagctgtaagtggcccacggcagaggtccccagtggaacaagctgtaagccagccccaactctttcgcccctgtcgagttcggttctaagccaaacggcggggtggagatgtagtagtagatctcaatcgatccccagaacagtacggcagcagacgtacaggaggcgaacatcataaagatccaactggcggtgctaaattctggcggttcgttacctaaacgctttttggcatacgggccaaacaccagccagaaccaaccgaaaagcatcaccaccatataccattcaaatgcccatccccatacattggtgacgtaactgaatacagcattaataacgacattcgctgcatccagatctctgactgtaagccaacaaagtatgccgacgattattaacggcggaaagaaaaccttcggttctattcccgtttttctcttttcattcttcat

SEQ ID NO: 28971 - DNA, 1776 bp, Homo sapiens
  SIMILAR (1122)..(298): 991254mologous to Escherichia coli rep helicase,accession number M87049,Smith-Waterman Score=1410.
ttaccgatcccgcattagcgggacgtaaaccgggcggcgaatattgcatgcctgcaggtggtttagcgcaacccccacaccgacacgggtctggttgaagttatagtcgatgagcgattcgccatagccgctgtaaacctgagtataaaggcgcacatgtttggtgatcgggtaacttaagcctaactccgcgccgccgtagccggtgttccagttgtactgtcctttcgcactgagcaccgcatcaccgaggtgatagccgattttaagctggtagtaacccatatatttggtgatatccgggttagtcagcacgcgcagataagccagcaagtccttgatttcaggacgagagaaaaacgacgtaccaccagatattttgtacgggatgcggttttgcatcaggaatttttcaaacacccgcgactgatggttaccgcgataaagaatggcgtaatctttgtactgcgttttattgacgaagtgatgggcgatcagctcgccagtaacgcgctcagcctcatgttcttcgttattcgcgcttaatacttttagctccgcgccataacccagttcggagaacagacgcttttcaaagacgtgcgggttattggcgatcaggatgttcgccgctttcagaatacgcccggaagagcgatagttctgctcaagcttaatcaccttcagcgccggaaaatcctgactcagcagcaccaggttttgcggacgtgcaccgcgccaggagtagatcgactggtcatcgtcacccaccacggtaaagcgcgcgcggctgcccaccagcagtttcaccagctcatactggctggtgttggtgtcctgatactcatccaccagcagatagcgaattttgttctgccagcgcttgcggacttcttcattgcgttgcagcagcaacgtcggcaataaaatcagatcatcgaagtcgagaacgttacaggctttcaggtgtgcatcatacagcccataacaatgggcaaaaatacggtcccgctcgccaatcgcacttgctgccgcctgggacggtgttttgagatcattcttccagttagagatggtcgaaatcagttgttgcaggagaactttgtcatcttcaatcagccctggaccaaacagaacttctgtgcatctggggttatacacacgcaccatcatccagacaaagatgacgccaagaaccatcgtcactatcagccacagcgtacgcaatgccggtgacagctttttcagcattgccagcaaccagccgatgccgcctacggcaaaaaagatcgaaccgctggcgatttcgttactgagtgctgaagcccctacccggttgagcgagttaaaagcgcgcattggtgaaccaagatggagcatagaggcgataaagccaatgcccatcagcacccataaaccaaacatgcaggcgataacacgctgctgggcttctgctcgcaggtcgcctttgagcagcgccaaagccagaacgataaaaccactgtggctgaatgccggattccgtacccgtgcctttgcatctttcggctgctccatcgggttgccaggaccacgcgggatcagtttcgaaacaaacggcagtgccattgggttggcaatcgccacttcacgatttggatcaacggaaatcccgccccattcgaacatccccaggttacccgggaagaccagcgtaccctgttcagatggcggggtgaaaatgccttcatagcgcatctggtggaacatcacgcggcacaccagttggtcaaacat

SEQ ID NO: 28972 - DNA, 2410 bp, Homo sapiens
  SIMILAR (1604)..(2173): 971254mologous to Escherichia coli Nodulation protein NolK,accession number D90843,Smith-Waterman Score=986.
tggcgattgccgccggggaattcgtctcaaaaaccgtgctttcagcgaggaagggcgacgatttcagtaagcaaaaactggcggaatatcgtcagcatcttgagagtggtccgctgcgcgatatgcgtatgtaccagaaactaccggcgttccttgataacccacgcatgtttagcggctacccggagctggcggtgggtgtggcgcgtgacctgttcaccattgatggcagcgcgccggaactgatgcgcaagaaaatcctccgccacggcaagaaagtgggcttcatcaatctaatcaaggatggcatgaaaggagtgaccgttttatgacttctcccgtcaatgtggacgtcaaactgggcgtcaataaattcaatgtcgatgaagagcatccgcacattgttgtgaaggccgatgctgataaacaggcgctggagctgctggtgaaagcgtgccccgcaggtctgtacaagaagcaggatgacggcagtgtgcgcttcgattacgccggatgtctggagtgcggcacctgtcgcattctggggctggggtcggcgctggaacagtgggaatacccgcgcggcacctttggtgtggagttccgttacggctgatgttggtttgatacctccgccgccataacccagttcggagaacagacgcttttcaaagacgtgcgggttattggcgatcaggatgttccccgctttcagaatacgcccggaagagcgatagttctgctcaagtttaatcaccttcagcgccggaaaatcctgactcagcagcaccaggttttgcggacgtgcaccgcgccaggagtagatcgactggtcatcgtcacccaccacgcagtttcaccagctcatactggctggtgttggtgtcctgatactcatccaccagcagatagcgaattttgttctgccagcgcttgcggacttcttcattgcgttgcagcagcaacgtcggcaataaaatcagatcatcgaagtcgagaacgttacaggctttcaggcatggatgatcctgccataccattcacaacattaagttcgagatttaccccaagtttaagaactcacaccactatgaatcttaccgaattaaagaatacgccggtttctgagctgatcactctcggcgaaaatatggggctggaaaacctggctcgtatgcgtaagcaggacattatttttgccatcctgaagcagcacgcaaagagtggcgaagatatctttggtgatggcgtactggagatattgcaggatggatttggtttcctccgttccgcagacagctcctacctcgccggtcctgatgacatctacgtttcccctagccaaatccgccgtttcaacctccgcactggtgataccatctctggtaagattcgcccgccgaaagaaggtgaacgctattttgcgctgctgaaagttaacgaagttaacttcgacaaacctgaaaacgcccgcaacaaaatcctctttgagaacttaaccccgctgcacgcaaactctcgtctgcgtatggaacgtggtaacggttctactgaagatttaactgctcgcgtactggatctggcatcacctatcggtcgtggggaaagcgagttgttgcagggcacgctggagccgactaacgagccttatgctattgccaaaatcgccgggatcaaactgtgcgaatcatacaaccgccagtacggacgcgattaccgctcagtcatgccgaccaacctgtacgggccacacgacaacttccacccgagtaattcgcatgtgatcccagcattgctgcgtcgcttccacgaggcgacggcacagaatgcgccggacgtggtggtatggggcagcggtacaccgatgcgcgaatttctgcacgtcgatgatatggcggcggcgagcattcatgtcatggagctggcgcatgaagtctggctggagaacacccagccgatgttgtcgcacattaacgtcggcacgggcgttgactgcactatccgcgagctggcgcaaaccatcgccaaagtggtgggttacaaaggccgggtggtttttgatgccagcaaaccggatggcacgccgcgcaaactgctggatgtgacgcgcctgcatcagcttggctggtatcacgaaatctcagtggaagcggagcgtgccatcacttaccaggtcagagatctggatgcagcgaatgtcgttattaatgctgtattcagttacgtcaccaatgtatggggatgggcatttgaatggtatatggtggtgatgcttttcggttggttctggctggtgtttggcccgtatgccaaaaagcgtttaggtaacgaaccgccagaatgtagctccgcaaggtggatcaatatgatggggtaccgagcaagagttcgtctaaatggtctgcactag

SEQ ID NO: 28973 - DNA, 490 bp, Homo sapiens
  SIMILAR (5)..(352): 981254mologous to Escherichia coli IS5 39.3kDa protein,accession number U70214,Smith-Waterman Score=593.
gtcgttatccctggatagcgccttgccggaccgcaccaccatcatgaatttccgccacctgctggagcagcatcaactggcccgccaattgttcaagaccatcaatcgctggctggccgaagcaggcgtcatgatgactcaaggcaccttggtcgatgccaccatcattgaggcacccagctcgaccaagaacaaagagcagcaacgggatccggagatgcatcagaccaagaaaggcaatcagtggcactttggcatgaaggcccacattggtgtcgatgccaagagtggcctgacccacagcctggtcaccaccgcggccaacgagcatgacctcaatcagctggcatccacgcaagaacaaaacggcatcaacatcgaatacatgaaagccagcatccgggccagggtggagcacccatttcgcatcatcaagcgacagttcggcttcgtgaaagccagatacaaggggttgctgaaaaaacgataa

SEQ ID NO: 28974 - DNA, 1086 bp, Homo sapiens
  SIMILAR (445)..(1080): 951254mologous to Escherichia coli K12 putative transport system permease protein,accession number AE000305,Smith-Waterman Score=1000.
atggaaaccttctcacttaaagcagcgattaaggtcaagcgataccgctcttacagaggagaggtagggcaaaccgcccctaatgttctccaaagagatttcaaggctacgcggccaaacgagaagtgggttaccgatgttactgaatttgcagtcaatgggcgcaagctgtatttgtctccagtaatagatctcttcaacaacgaagttatttcttacagcctttcggaaagaccagtgatgaacatggttgagaatatgctcgatcaggcattcaaaaagcttaatcctcacgagcatcctgttctgcactctgaccagggatggcagtatcgtatgagaagatatcaaaatatccttaaagaacatggtattaaacaaagcatgtccagaaaaggcaattgtctggataatgctgtggtggagtgtttctttggaaccttaaacattttccagaaagccctcaacatcagcaaaatcgaatcttttgttgcggttactactattttcctcgggcaaaatgagatcccggcgatcgttaaaccgtttatcgatcgcatgaatcgcaacgagttgtttaccgcaatttgtagcgggatggcgtccattgctggttcgatgatgattggttatgccggaatgggcgtaccaattgactacctgttagcggcatcgctgatggcgatccctggcgggattttgtttgcacgtattcttagcccggcaaccgagccttcgcaggtcacatttgaaaatctgtcgttcagcgaaacgccgccaaaaagctttatcgaagcggcggcgagcggtgcgatgaccgggctaaaaatcgccgctggtgtggcgacggtggtaatggcgtttgtcgcaattattgcgctgatcaacggcattatcggcggaattggcggctggtttggtttcgccaatgcctctctgcaaagtatttttggctatgtgctggcaccgctggcgtggatcatgggtgtggactggagtgatgccaatcttgcgggtagcctgattgggcagaaactggcgattaacgacatgcaggcatccaagataagcgcctccccaacctag

SEQ ID NO: 28975 - DNA, 5094 bp, Homo sapiens
  SIMILAR (3670)..(4521): 981254mologous to Escherichia coli K12 putative periplasmic binding transport protein,accession number AE000342,Smith-Waterman Score=1447.
  misc_feature (1)...(5094): n = a,t,c or g
atggcgatccatcaggttagcccctttcgtgaagagccagtggattgcgttctgtgggttaaaaacagccaacttatgcctaatgattacaacccaaacaacgtggcaccacccgaaaaaaaactgctgcaaaaatccattgaaatagatggttttacccaacccattgtggtcacacatacggataaaaatgccatggaaatcgtggatggttttcaccgccatgaaattggtaaaggctcatcatcattaaaattacgcttaaaaggttatttgccggtgacctgtctggaaggtacgcgtaatcaacgcatcgccgcgactattcgtcataatcgcgctcgtggacgccatcaaatcaccgccatgtcggaaatcgtccgtgaacttagccagttgggatgggacgataataaaattggcaaagagctgggaatggacagcgacgaagtgctgcgcctgaagcaaattaacggcctgcaagagttgtttgccgaccgtcaatattcccgcgcctggacgctaaagctggcgcagcgttcagctgctgccagcaacgtcgattccttcttggcaaacagagacgaatcagtttatgggaagggatcggccaacaccgacagcggaatcgccgtacgccgtgctcctgcgtcagccactggcaaaactcaacatcatccaggaccagtgatgaacatggttgagaatatgctcgatcaggcattcaaaaagcttaatcctcacgagcatcctgttctgcactctgaccagggatggcagtatcgtatgagaagatatcaaaatatccttaaagaacatggctgcggcgtcacgccgattatgtcgatgcgtcgctggcttgcgaagaaccgtccacaggccgatgtgcgggtgatctacaacgtgcgtacgccgcaggatgttattttcgccgatgagtggcgtaactatccggtaacgctggtggcagaaaataacgttaccgaaggctttatcgctggtcgtctcactcgcgaactgctggcaggtgtacctgacttagcttcacgtaccgtgatgacctgcggcccggctccgtatatggattgggtagagcaggaagtgaaagcgctcggcgtgacgcgtttctttaaagagaaattcttcaccccagtagcagaagcggcgaccagcggtctgaaattcaccaaactgcaaccggcacgagaattttacgccccggttggcaccacgctactggaggcgctggaaagcaataacgttccggttgtcgctgcctgccgtgcgggtgtttgcggctgctgtaagacaaaagtggtttccggtgaatatacggtgagcagcacaatgacgctgaccgacgccgaaatcgctgaaggttacgcagtggtcgccctgataaagccaggcgcgcagattggtcgatccccagtcaattgcgatgtagcgagctgtcatgtgatttcctttaaccttcgtgtcgagctggcgatcatgcgccgcctgctctgccgcatcgccgtcctgatgtcgtatcgcatcgaacagcgccttatgttcctggagcgtttgcggcatgttggcctcatcgcccatccagccaaaaaagcgatcaaaaaaacaaggaagcctgggatgaaagtgacatttgagcagttaaaagcagcctttaatcgggtcttaatttcacgcggcgttgacagcgaaacggctgacgcctgtgcagagatgttcgcccgcaccaccgaatccggcgtttattctcacggcgttaatcgtttccctcgtttcattcaacaactggaaaacggcgatatcattcctgatgcccaacccaaacgtataaccagcctcggcgcaattgaacagtgggacgcccagcgttcgatcggtaacctgacagcgaaaaagatgatggatcgcgccattgaactggctgccgatcacggtattggtctgctacggctggcaggcggcggaaaaaggctatattggcatttgctggaccaactccatcgccgtaacgacaacatctctctggatctgggcaacaacgctgaagccgtgatcctgcgcgaagatatgctgccgcgtgaaaacttccgccctggcgaccgcgttcgtggcgtgctctattccgttcgcccggaagcgcgtggcgcgcaactgttcgtcactcgttccaagccggaaatgctgatcgaactgttccgtattgaagtgccagaaatcggcgaagaagtgattgaaattaaagcagcggctcgcgatccgggttctcgtgcgaaaatcgcggtgaaaaccaacgataaacgtatcgatccgcctactcaacatgaagatgaagaggatgaaggcctttatgatgatccatttccacttaatgaatgttccgttggtcctggccaccggcaccggtttgcaccccccgaggcccagttccgaaggcccgaaaccctaaaaggagcccccacttcccgaatcccggagacttcggtaggagtatcggctggatccgacttcgagcctcatctgatgcgggaacttacttgtcgcctaactgctctgacatggtgttacccgggttcggcgtacgcggttcatcaaccggacgaggagcctttggactaccattgtcgccagaattcccgctggcggacgtacatcgcgacgtgccatcaggtcatcaatctgcggtgcgtcgatagtctcatatttcatgagagcatctttcatcgcatgcagaatatccatattgtcggtcagaagctgacgcgcacgattatagttacgctcaatcagtgctttcacttcctggtcgatgatacgtgcagtttcatcggacatatgtttcgctttcgctacgctacggccgaggaacacttcaccttcttcttccgcgtacagcagtggacccaatttctcagagaagccccactgagtcaccatgttacgtgccaggttggtcgcaactttaatatcgttggacgcaccggtagatacatgttccggcccgtagatgatctcttctgccagacgaccaccgtacagcgtagaaatctggctttccagtttctgacggctggcgctgattgcgtcgccctcaggcaagaagaaagtcacacccagcgcacgaccgcgtgggataatcgtcactttgtgcaccggatcgtgttccggcaccaggcgaccgataatcgcatgacccgcttcngtgccgtcgattctttctgcgcttccgtcatcacccatggagcgacgttccgcacccatcatgattttgtctttcgctttctcgaactcaaccatcgacacaacgcgtttgttgccacgagcagcgaacagtgccgcttcgttcaccattttgtggacccgccgaaaatatttgtgccgaaaaaagttttaaaggtccccctcacagaggaccacagtgaagggaaaaaggggcaaaaacatacgccagaggaactcaccaagacaggaggcatccacctgggaaccgggagaataagggagaaaaatgccacgagagtggaacttctgaaaattaattatctgttcatcggcattctggcactgctgctcgcggtcgctctctggccatccattccctggtttggtaaagccgacaaccgtatcgccgccattcaagcgcggggagagttgcgtgtgagcaccattcatactcccctgacttataacgaaatcaacgggaaaccttttggcctggattacgaactggcgaaacagtttgccgattacctcggcgtaaaactgaaagtgaccgtgcggcagaatatcagccagctgtttgacgaccttgataatggtaacgccgacctgctggcggcaggacttgtctataacagtgagcgggtaaaaaattatcagcctggccctacctattattccgtgtcacaacaactggtttataaagtgggtcagtatcgcccacgtacgctgggcaacctgacggcggagcaactcaccgttgcaccgggtcatgtggtggttaacgatctccagaccctgaaagaaacaaaattcccggaattaagctggaaggtagacgacaaaaaaggctctgcggaattaatggaagatgtcatcgaaggaaaactcgattacaccattgctgattctgtcgccatcagcctgtttcagcgcgttcacccggagctcgccgtagcgctcgatatcaccgatgaacaaccggtgacttggtttagcccgttagatggcgataataccctttccgccgccctgctcgacttcttcaacgaaatgaatgaagacggtacgctggcacgcattgaagagaaatacctggggcatggcgatgattttgattacgtcgatacgcgcacatttttacgcgccgtcgatgcggtactgccgcagttaaagcccctgtttgagaaatacgccgaagaaattgactggcgtttgctggccgctattgcttatcaggaatcgcactgggatgcacaggccacttcaccgacggtgtatgatggtgtttttgaggtgctccagtggcttctgtttctatcagctgtccctcctgttcagctactgacggggtggtgcgtaacggcaaaagcaccgccggacatcagcgctatctctgctctcactgccgtaaaacatggcaactgcagttcacttacaccgcttctcaacccgccgggcagtgacgtcatcgtctgcgcggaaatggacgaacagtggggctatgtcggggctaaatcgcgccagcgctggctgttttacgcgtatgacagtctccggaagacggttgttgcgcacgtattcggtgaacgcactatggcgacgctggggcgtcttatgagcctgctgtcaccctttgacgtggtgatatggatgacggatggctggccgctgtatgaatcccgcctgaagggaaagctgcacgtaatcagcaagcgatatacgcagcgaattgagcggcataacctgaatctgaggcagcacctggcacggctgggacggaagtcgctgtcgttctcaaaatcggtggagctgcatgacaaagtcatcgggcattatctgaacataaaacactatcaataa

SEQ ID NO: 28976 - DNA, 812 bp, Homo sapiens
  SIMILAR (1)..(651): 961254mologous to Escherichia coli IS5 39.3kDa protein,accession number U70214,Smith-Waterman Score=1086.
atgagtcatcaacttaccttcgccgacagtgaattcagcagtaagcgccgtcagaccagaaaagagattttcttgtcccgcatggagcagattctgccatggcaaaacatggtggaagtcatcgagccgttttaccccaaggcgggcaatggccgacggccctatccgctggagaccatgctacgcattcactgcatgcagcattggtacaacctgagcgatggcgcgatggaagatgccctgtacgaaatcgcctccatgcgtctgtttgcccgattatccctggatagcgccttgccggaccgcaccaccatcatgaatttccgccacctgctcgagcagcatcaactggcccgccaattgttcaagaccatcaatcgctggctggccgaagcaggcgtcatgatgacccaaggcaccttggtggatgccaccatcattgaggcacccagctctaccaagaacaaagagcagcaacgcgatccggagatgcatcagaccaagaaaggcaatcagtggcactttggcatgaaggcccacattggtgtcgatgccaagagtggcctgacccacagcctggtcaccaccgcggccaacgagcatgacctcaatcagctggtgcagaatgaattggagacagcagaacgtttcagaagacaagaagacactcaatcaaaatgtctactctcatctataatgttgtatatcaaaaacttaagcggccctgatgtatcagagctcatttcaccactctcagagggctttaatttatgctcgtcagtggtagtggctgttatcgctgctgtgttaag

SEQ ID NO: 28977 - DNA, 1833 bp, Homo sapiens
  SIMILAR (198)..(803): 381254mologous to Homo sapiens glioma tumor suppressor candidate region protein 1,accession number AF182077,Smith-Waterman Score=251.
atgctactcaggaggctgagctcgtgcaaagcaggcgccgtcagcgcttacttgtcttcgccgctggccccctcggagcccgtgacgctggcgtcggccggtgtctcgccacagggggctggcctggtcatccagaagaacctctcggccgctgtggccaccacgctcaatgggaactctgtgttcggaggcgcgggggccgcctcggctcccaccgggacgccctcgggacagccgctggcggtggccccaggcctcggctcgtcgccactggtcccggcgcccaacgtgatcctgcatcgcacacccacgcccatccagcccaagcccgcgggggtgctgccgcccaagctctaccagctgacgcccaagccgtttgcgcccgcgggcgccacgctcaccatccagggcgagccgggggcgctcccgcagcagcccaaggccccgcagaacctgacgttcatggcggcggggaaggcgggccagaacgtggtgctgtcgggcttccccgcgcctgcgctgcaagcgaacgtcttcaagcagccaccggccaccaccaccggagcggccccgccgcagccccccggggccctgagcaaacccatgagcgtccacctcctgaaccaaggcagcagcatcgtcatcccgcccagcacatgctgccgggccagaaccagttcctactgcctggcgccccggcggtccagctcccgcagcagctctcagccctgccggccaacgtgggcgggcagatcctggcggccgctgccccccacacaggtgggccagcctgcgctcttccagatgcccgtgtcgctggcggcgggcagcctgcccacgcagagccagcagcgcccgccgggccggccgccaccactgtcctccagggggagggtgagcccctcagcggagatggtaatgatcgaccgaatgttcattcaggaggagaagaccacccttgccttggataaacagctggccaaggagaagccgggtgagaggggggatttcgtgtgtgcccagttccctattcaggtcgtggagagcgtcagtatcatcgacacgccgggtatcctgttgggtgccaggctcagagtgaaccgtgtgcccccctccgtactacgcggtagttcttgcgcagtgtcagtgctctcggcagtgcggggcggtgcccagggcttgcgctcgggggcggcaggcggttcgtggtccaccgtgccgttcatctggcccgtgggcggcggtggtggtggcggccgtggcgggggctcggccaccttgagggtctttgatgggcggacggttgcgggagggcatggggcacgtcctcgtcggcgtccaaggaggagtgcggcagaggaggaggaggaagaggaggacagggaggaggacgcccgggcccagttgcccattcactgtaaccacagcctggtcaccaccgcggccaacgagcatgacctcaatcagctgggtaatctgctgcatggagaggagcaatttgtctcagccgatgccggctaccaaggggcgccacagcgcgaggagctgaccgaggtggatgtggactggctgatcgccgagcgccccggcaaggtaagaacctggaaacagcatccacgcaagaacaaaacggccatcaacatcgaatacatgaaagccagcatccgggccagggtggagcacccatttcgcatcatcaagcgacagttcggcttcgtgaaagccagatacaaggggttgctgaaaaacgataaccaactggcgatgttattcacgctggccaacctgtttcgggcggaccaaatgatacgtcagtgggagagatctcactaa

SEQ ID NO: 28978 - DNA, 1308 bp, Homo sapiens; identical to SEQ ID NO: 7180
  SIMILAR (670)..(1293): 991254mologous to Escherichia coli 100 pct identical to sp:YI5B_ECOLI,accession number AP002527,Smith-Waterman Score=1079.

SEQ ID NO: 28979 - DNA, 836 bp, Homo sapiens
  SIMILAR (1)..(618): 1001254mologous to Escherichia coli IS5 39.3kDa protein,accession number U70214,Smith-Waterman Score=1081.
atgagtcatcaacttaccttcgccgacagtgaattcagcagtaagcgccgtcagaccagaaaagagattttcttgtcccgcatggagcagattctgccatggcaaaacatggtggaagtcatcgagccgttttaccccaaggctggtaatggccggcgaccttatccgctggaaaccatgctacgcattcactgcatgcagcattggtacaacctgagcgatggcgcgatggaagatgctctgtacgaaatcgcctccatgcgtctgtttgcccggttatccctggatagcgccttgccggaccgcaccaccatcatgaatttccgccacctgctggagcagcatcaactggcccgccaattgttcaagaccatcaatcgctggctggccgaagcaggcgtcatgatgactcaaggcaccttggtcgatgccaccatcattgaggcacccagctcgaccaagaacaaagagcagcaacgcgatccggagatgcatcagaccaagaaaggcaatcagtggcactttggcatgaaggcccacattggtgtcgatgccaagagtggcctgacccacagcctggtcaccaccgcggccaacgagcatgacctcaatcagctggtggagtactggatcctgctgcccgccatgattcttctgatgattgaatcggtcgccagtttcgcctggtttattcgctggtttggtcgcgttgtgcctggcaaaccgagcgaggccgtcgccaatgccgcaccgctgccaggatcaatgcgcctggtgttgattgtactgattgtgatgtcgctgatttccagcgtaatcgccgcgacctggttgca

SEQ ID NO: 28980 - DNA, 1569 bp, Homo sapiens
  SIMILAR (718)..(1566): 991254mologous to Escherichia coli 100 pct identical to sp:YI5B_ECOLI,accession number AP002527,Smith-Waterman Score=1478.
atgcctaacttctggctggcgtttttactggtgatggcgttttcggtgtatctgcaatggctacccgcgatgggttacggcggctggcagcacatcattttgcctgcggtttccattgcctttatgtcgctggcgattaacgcgcgtttactgcgcgccagtatgctggacgtcgccggtcagcgtcacgtcacctgggcgcgtctgcgcggcctgaacgacaaacagaccgaacgtcgccacatcctgcgcaatgcctcgctgccgatgatcaccgccgtggggatgcatatcggcgaactgattggcgggacgatgattatcgaaaacatctttgcctggccgggcgtcgggcgctatgcggtgtcggcgatttttaaccgtgactatccggtgatccagtgctttacgctgatgatggtggtggtttttgtggtctgtaatttgattgtcgatttgctcaacgccgcgctggacccgcgcattcgtcgtcatgaaggagcgcacgcgcgattgatttgccgtcgcgcctgctttcgccggatgcgcagcactgccctgggcaccgatcacttagtcgcacatttcggtacccaaatcgatgcgtatcacgtcaccgtgagcctcagctggttccttgctaagatgtactcggtatccggctctgtttggttccatagtacgctaactgaaagccttagctcatcccacgaaaaagtgaaagtactcaacgagctaaggcagttttatcctcttgatgagcttctcagggctgcggagataccgcgcagtacgttttattatcatctaaaggctctcagcaagcctgacaagtatgcggacgttaaaaagcgtattagtgagatttatcacgagaatagaggccgatacggataccgtagggtaacgctgtctcttcatcgagaagggaaacagattaaccataaagctgttcagcgcctgatgggaaccctctcacttaaagcagcgattaaggtcaagcgataccgctcttacagaggagaggtagggcaaaccgcccctaatgttctccaaagagatttcaaggctacgcggccaaacgagaagtgggttaccgatgttactgaatttgcagtcaatgggcgcaagctgtatttgtctccagtaatagatctcttcaacaacgaagttatttcttacagcctttcggaaagaccagtgatgaacatggttgagaatatgctcgatcaggcattcaaaaagcttaatcctcacgagcatcctgttctgcactctgaccagggatggcagtatcgtatgagaagatatcaaaatatccttaaagaacatggtattaaacaaagcatgtccagaaaaggcaattgtctggataatgctgtggtggagtgtttctttggaaccttaaagtcggagtgtttttatcttgatgagttcagtaatataagcgaactgaaggatgctgttacggaatatattgaatactacaacagcagaagaattagcctgaaattaaaaggtctgactccaattgaatatcggaatcagacctatatgcctcgtgtttaa

SEQ ID NO: 28981 - DNA, 1822 bp, Homo sapiens
  SIMILAR (691)..(47): 901254mologous to Escherichia coli D-lactate dehydrogenase,accession number M10038,Smith-Waterman Score=1014.
cttcgccgacagtgaattcagcagtaagcgccgtcagaccagaaaagagattttcttgtcccgcatggagccgattctggcatggttccggctggttggtgccgatataaaacacctgctgatttttttccgcttcgaaggtatcaagacgtactgcaaagaccgccagcttcccggcgcaaccagaagattcaaataaccgatcaggatcggcgttataacgtgcgggcgtgtcggcttcaatatcacgaacgcggtggacatagtcataatcgtgggcgtgacgaccatcgtgacgcacatcgtcatctttgatgcgatcatcatccagcttgctaaggatctgctccggcgtttcgcccagatcaatccccagatggttcaccagcgtcagtttgccgtcttcatttatacgcgcgaataacgacatttcggtatacgccgggccacgttgcaccagcgagccgccggagttgttacaaataccgccgatgaccgatgcgcctatacacgatgatccaatcactgagtgcggttcgcgtcccagcggtttgagggctttttccagcgactgttcgcccttgccaagaacgtgcagcttgtcgagacgcagggtgctgatgataacgacatcgcgatcataatcgttaacgtatggcgtcgatccttccgtcaggcctgtattggcggctgcatcagaatacttcagtcggcggtgacgcaggcttccagaacccgcacaatctactagtgagcgggtagtaccaaggtaattaccgccacttcggaattcttcgtggttaccccggccattaaaaaattccaacttccaactcacccggtcagccaggatttcactttccagccggtcgagcatctgcaccagcaccggcgggaacaccacactgccaccgtcttcgccgccggactgctgaagcgcatccgccaggctgcggcgctgcgttttcgccagctcaccggtggcggtttcaactctgatgagtggcgtgaagctccccggctgataaatcgtctggatgcgggttctgtcgttctgtattgtggtcagccggtcgccgtcccagccgtaccaggtcacttgcggtttccgtgacagcgacatccagcccgtcaggtcccgttcacgccgccacacccgttttgccaccctgcggcccagcgggtcgtaaagatagcgactttcgaccagcggctcttcatattgtgtccgcgtgtagtgcaccagccggtgctgacttcgtctaaggatccctgacgtactgatcgtctcgtttaaggagaagtaatatgaaatgtccggttgccaccaggtagaaatggtttctggcattaaagatattccatacaccttccgtggacgaaaaacagtattgaaaggtatccacggtttatattgtgtccattgcgaagagagcatcatgaataaagaagagtcagatgctttcatggcgcaagtaaaggcatttcgggcttcggtgaatgccgaaacagtggcacctgaatttatagtgaaggttcgaaaaaagctctctcggtcgccccgcaacaagtctttcgttacaacaatcatagcgacccaggtacgctcgatccgcaaaaggtgaggagaatactggcgagcagatgtgctggatctgggtgaaggctggttggatggacgggaaggcaggtgaacacactcctggaggaactctttaacttcgatctctacgcgacgatccggagccaggcagtcgatcagtgcagcacgctgtttcacgttgtcacaggtgttgccagtaaccgggttggattcgcccat

SEQ ID NO: 28982 - DNA, 861 bp, Homo sapiens
  SIMILAR (283)..(861): 971254mologous to Escherichia coli Ferredoxin I,accession number D90724,Smith-Waterman Score=984.
ctaaagctggcgcagcgttcagctgctgccagcaacgtcgattccttcttggcaaacagagacgaatcagtttatgggaagggatcggccaacaccgacagcggaatcgccgtacgccgtgctcctgcgtcagccactggcaaaactcaacatcatccaggaccagtgatgaacatggttgagaatatgctcgatcaggcattcaaaaagcttaatcctcacgagcatcctgttctgcactctgaccagggatggcagtatcgtatgagaagatatcaaaatatccttaaagaacatggctgcggcgtcacgccgattatgtcgatgcgtcgctggcttgcgaagaaccgtccacaggccgatgtgcgggtgatctacaacgtgcgtacgccgcaggatgttattttcgccgatgagtggcgtaactatccggtaacgctggtggcagaaaataacgttaccgaaggctttatcgctggtcgtctcactcgcgaactgctggcaggtgtacctgacttagcttcacgtaccgtgatgacctgcggcccggctccgtatatggattgggtagagcaggaagtgaaagcgctcggcgtgacgcgtttctttaaagagaaattcttcaccccagtagcagaagcggcgaccagcggtctgaaattcaccaaactgcaaccggcacgagaattttacgccccggttggcaccacgctactggaggcgctggaaagcaataacgttccggttgtcgctgcctgccgtgcgggtgtttgcggctgctgtaagacaaaagtggtttccggtgaatatacggtgagcagcacaatgacgctgaccgacgccgaaatcgctgaaggttac

SEQ ID NO: 28983 - DNA, 2574 bp, Homo sapiens
  SIMILAR (991)..(1635): 951254mologous to Escherichia coli Adhesin AIDA-I precursor,accession number D90839,Smith-Waterman Score=1025.
atggagaaaaaatccccggcctacttctgctgtcgggatatgcaggtaattcactctgacgctgctttacaacggttattgacacgtttcaacgatcctgaagggtggagtaatctggcgaaaaatcagtatctgagcacgtcgatgaaacaaaaaatttggcaacgtgctttatcgcatcggaaaaataatccgaaagcagattcagatgcatatgaaaccagcgctgatatgattttgtctgagctgattagccacggcgaagttgatgaccagatgctattaaatgccaccgccctgatacgttcggacgactgggactttttagagagtgcattaattagttgggataatttacccgctgttgttctcaaggaattacagcaaaacacgccacgcaatgatatttgggcgaagttttttctgaggcaggaaaacagttcccgtgcgcaggttgacgaagcgttacgtgtttattatgcactagaccccgatgcgttagcacaactggatgtactggctaaacgcccttacaaaacagcggcctttcggggtgagaaaacgcatcgcgtgccacggcgtagtgtgcggcagaacatcatcgaccaggccgaccgactgcatggtgcgcagcgcctcgtcatcaataccaatcgcacgcgggtagtcgatcaacttatcgagtttctccaccaccagcacgtcaatgcccatctggccgagatagttcgccatcatcagcccaaccgggccggcaccagcgatcgccacctgaacgctatggttaacagcaggctggatgtcaggaacaatgagcagacggaatacaaaaccgtgcgcggcttaacccgcggtctaatgttattaaatatgttaaataaacttgatagcacatccccatgtcgcatgctcgtatgttgtgtcccgagagcccccccaaaccccggggggttaaacccgcgcgcccacagcctgaacaggtcacccacggaaacaccgctgaatggggaataccagtatgtgcacaacggcggtacagcgtctgacactgttgtgaacagtgacggctgccagattgtcaaaaacgggggtgtggccgggaataccaccgttaatcagaaggccagactgcaggtggacgccggtggtacagccacgaatgtcaccctgaagcagggcggcgcactggttaccagtacggctgcaaccgttaccggcataaaccgcctgggagcattctctgttgtggagggtaaagctgataatgtcgtactggaaaatggcggacgcctggatgtgctgaccggacacacagccactaatacccgcgtggatgatggcggaacgctggatgtccgcaacggtggcaccgccaccaccgtatccatgggaaatggcggtgtactgctggccgattccggtgccgctgtcagtggtacccggagcgacggaaaggcattcagtatcggaggcggtcaggcggatgccctgatgctggaaaaaggcagttcattcacgctgaacgccggtgatacggccacggataccacggtaaatggcggactgttcaccgccagtggcggcacactggcgggcaccaccacgctgaataaaggcgccataattaacccttcccgggaacacggccaggtgctggctgtcggtgaagatattcaccagcttgcgcaggttgaagtatgtggtatcaagcgcgatgtgaatatcgccctgatttgtgaaggtaaccctgccgatctactgggccagtgggtgctggtacacgtcggatttgccatgagcatcatcgacgaagatgaagcccaagccacattagacgcactgcgccaaatggattacgacattaccagcgctgaattcagcagtaagcgccgtcagaccagaaaagagattttcttgtcccgcatggagcagattctgccatggcaaaacatggtggaagtcatcgagccgttttaccccaaggctggtaatggccggcgaccttatccgctggaaaccatgctacgcattcactgcatgcagcattggtacaacctgagcgatggcgcgatggaagatgctctgtacgaaatcgcctccatgcgtctgtttgcccggttatccctggatagcgccttgccggaccgcaccaccatcatgaatttccgccacctgctggagcagcatcaactggcccgccaattgttcaagaccatcaatcgctggctggccgaagcaggcgtcatgatgactcaaggcaccttggtcgatgccaccatcattgaggcacccagctcgaaccggaggattttggccctggccaaaacccaggttgcccaatggcccaaactttttaccaacaggttcatccccaacccaaattggggcccccattctggcccctggccgtgcccaatgcccccccaaaaatgggtccccaggggtcgcatgccctcaaatggcccagtgggggaaagaagcttgagaggatttcaagggctttcgggtaccacatgcgcccaatttttgggaaaggccaatgggaaccaacctaacactcccctggccagctga

SEQ ID NO: 28984 - DNA, 845 bp, Homo sapiens
  SIMILAR (845)..(237): 961254mologous to Homo sapiens Eag-related gene member 2,accession number AF311913,Smith-Waterman Score=1039.
acggccttgaaggggctgtagtgcaggatggtccagcggtggatgcgcggcgcctgcagcttgtactccggcagcacatccgcgcccagggacaggacagcctttcggaaagaccagtgatgaacatggttgagaatatgctcgatcaggcattcaaaaagcttaatcctcacgagcatcctgttctgcactctgaccagggatggcagtatcgtatgagaagatatcaaaatatccttatggggcgcgatgatctcaatctccgtggtggagctggagcggtgcttctccaagttgaactccacgaagttgagcgtgaactgtgggatctggctgatggtcctgtacttgcccctgcctgtgcctggccctggtccgcctggcctgccatgagagccctcggagcccaggaagctctgggacaacaggcgctgggacaagctgcggctgctgcacttggccaggagctgggccaggtcctcgaagttgagaatgaacatgatgacagccccgtcctcgttcttcacgggcaccacatcatccttgcggtagtagaggatgtccaccttgcactcctcagcccccagcagggcctgcgctaggcgggacacggcgctgcttggtgtgttggggcctgtgaggaagtcgcaggtgcagggttgctgcatcacctccactcgggagtagccgaagagttcgcagaagccgtcgttgcagtaaatgatggcgcagttctccatctgagcattggcaatcaggaacttccgactttggccctcgaacttgcggatgatggtgtccaggtaagtgttttggggagcgacgtggcccctgcggaccggcat

SEQ ID NO: 28985 - DNA, 609 bp, Homo sapiens
  SIMILAR (609)..(394): 1001254mologous to Escherichia coli Transcriptional activator protein copR,accession number D90699,Smith-Waterman Score=372.
cgatttcggctcgatcagttcagtcgggctgtaggtcgcgccgcagacttcgcagttatcgccgtattgatccggggatttacatttcgggcaggtgcctttcacaaaacggtccggcaggaacatgcctttttccggatcgtacagctgagagatggtgcggtttttaataaaaccgttttctttcaggcgcttctctagagaatttccattaaagtggcttagctgcctttggtcatctagagcctccggcaaggcgctatccagggataaccgggcaaacagacgcatggaggcgatttcgtacagagcatcttccatcgcgccatcgctcaggttgtaccaatgtcttagaacaaaattgctcttcagcttctcatcctcagttgatgtccctttattggcggagcgtaacatgcgcacgatatcccagccgttcacgtccggcagcataatatcgaggattatcagatcataatcaccggtcatcgccagatggtagccattcagcccgttgtcggccaaatcgaccacaaaaccggcttcggttaaccctttggtcaagtattctccggttttcttttcatcttcgacaatcaacagtttcat

SEQ ID NO: 28986 - DNA, 501 bp, Homo sapiens
  SIMILAR (77)..(415): 631254mologous to Escherichia coli IS5 39.3kDa protein,accession number U70214,Smith-Waterman Score=325.
ccgtctggtcaacgcagtgtacgctcaagtattcgttaatagactggttactcagcagccgctgggtggtaaggcacagttcggtggtcagcgtttcggggagatggaagtgtgggcgctggaagcatacggcgcagcatacaccctgcaggaaatgctcaccgttaagtctgatgacgtgaacggtcgtaccaagatcctgatcacctggaaatttgttagaaataacaaaacggccatcaacatcgaatacatgaaagccagcatccgggccagggtggagcacccatttcgcatcatcaagcgacagttcggcttcgtgaaagccagatacaaggggttgctgaaaaacgataaccaactggcgatgttattcacgctggccaacctgtttcgggcggaccaaatgatacagtcaaagttcagccaggaatctgcagctgtcctgatgagggtgatgatgttggtgaagggtttggaggaggctggcttctcagaaag

SEQ ID NO: 28987 - DNA, 1350 bp, Homo sapiens
  SIMILAR (499)..(1347): 991254mologous to Escherichia coli 100 pct identical to sp:YI5B_ECOLI,accession number AP002527,Smith-Waterman Score=1478.
atgaaggcccacgggctttcctctggcagttgtggattggccagtttaaataaaacaagtgtgtatgcgggtgggggtgggggggtggcttatttgcctgactccggtgttgaccttaggtttcctcatggtcagcagctgtggagtgagttgggctttgggttggactggggcctgctcatgggagaaggggacctatttgatggctttgcagatggactaggagttgctgaagctatttcatatgtggatcctcagttccttacctacatggcactagaagaacgcttagcccaggctatggaggtcaggacatgggttgccctctatgaaaaacatggagaaaaaggtttaattcccaaacctaaaggcgttagtgctgatccagagttgcgtattaaggtcgtgaaagctgtgatcgagcagcacatgtcccttaatcaggctgctgctcactttatgcttgctgctgaaagccttagctcatcccacgaaaaagtgaaagtactcaacgagctaaggcagttttatcctcttgatgagcttctcagggctgcggagataccgcgcagtacgttttattatcatctaaaggctctcagcaagcctgacaagtatgcggacgttaaaaagcgtattagtgagatttatcacgagaatagaggccgatacggataccgtagggtaacgctgtctcttcatcgagaagggaaacagattaaccataaagctgttcagcgcctgatgggaaccctctcacttaaagcagcgattaaggtcaagcgataccgctcttacagaggagaggtagggcaaaccgcccctaatgttctccaaagagatttcaaggctacgcggccaaacgagaagtgggttaccgatgttactgaatttgcagtcaatgggcgcaagctgtatttgtctccagtaatagatctcttcaacaacgaagttatttcttacagcctttcggaaagaccagtgatgaacatggttgagaatatgctcgatcaggcattcaaaaagcttaatcctcacgagcatcctgttctgcactctgaccagggatggcagtatcgtatgagaagatatcaaaatatccttaaagaacatggtattaaacaaagcatgtccagaaaaggcaattgtctggataatgctgtggtggagtgtttctttggaaccttaaagtcggagtgtttttatcttgatgagttcagtaatataagcgaactgaaggatgctgttacggaatatattgaatactacaacagcagaagaattagcctgaaattaaaaggtctgactccaattgaatatcggaatcagacctatatgcctcgtgtttaa

SEQ ID NO: 28988 - DNA, 2462 bp, Homo sapiens
  SIMILAR (240)..(884): 1001254mologous to Escherichia coli K12 putative transport protein,accession number AE000261,Smith-Waterman Score=1052.
aggtaatccggctgggagcacagcaggttgtcgatatcgacgcccagtttacgtgcgtagattgggtccagcgcgtgttcagcatcgataaacgcacaggttttaccttcacgctgcgctgcggcgatcacctgcagcgtcagcgtggttttaccggaagattccggtccgtagatttcgacgatacggcccatcggcagaccacctgccccaagcgcgatatccacgcgagtcgtcgagtcatgttccttgccatggtttcttacattaaacgcgcccgctccatgcgcgatattcgtaacgaaaaaggcaccgcaaaacccgatcctgcggttatgaaacgactgattcaactcggtttgccgattgcgctggcactgttctttgaagtgacactgtttgccgtcgtggctctgttagtgtctccgctcggtattgttgatgtcgcaggacaccagattgccctgaactttagttcactaatgttcgtgcttccaatgtcgctggcggcagcggtaactatccgcgtaggttatcgtctgggtcagggctcaacgctggatgcgcaaaccgctgcgcggaccgggcttatggtgggtgtctgtatggcaaccctgacggccattttcacggtttcactgcgggagcaaatcgccctgttgtacaacgacaatcccgaggttgtaacgctggctgcgcatttgatgttgctggcggcggtatatcagatttctgactcaatccaggtgattggcagtgggattttgcgtggttataaagatacgcgttccattttctatattacctttacggcttactgggtgctgggcttgccaagcggctatattctggcactgaccgatctggtcgttgaacctatgggccagcaggcttctgatagcttattattgcctacaacactgcactggattaagatgaaaacgattgaagttgatgatgaactctacagctatattgccagccacactaagcatatcggcgagagcgcatccgacattttacggcgtatgttgaaattttccgccgcatcacagcctgctgctccggtgacgaaagaggttcgcgttgcgtcacctgctatcgtcgaagcgaagccggtcaaaacgattaaagacaaggttcgcgcaatgcgtgtctatgaagagcgcggagaagctggtttacgcgcgctcaagattggcaccaaaagaaacattgcaatatcagttgatccagaaaaagcggcatcagcattggagctgtcaaaagaccgacgcattgaggatcttgaaaggcaagttcgatttcttgaaacgcggcttatgtatctaaaaaagctgaaagccttagctcatcccacgaaaaaggctgcggagataccgcgcagtacgttttattatcatctaaaggctctcagcaagcctgacaagtatgcggacgttaaaaagcgtattagtgagatttatcacgagaatagaggccgatacggataccgtagggtaacgctgtctcttcatcgagaagggaaacagattaaccataaagctgttcagcgcctgatgggaaccctctcacttaaagcagcgattaaggtcaagcgataccgctcttacagaggagaggtagggcaaaccgcccctaatgttctccaaagagatttcaaggctacgcggccaaacgagaagtgggttaccgatgttactgaatttgcagtcaatgggcgcaagctgtatttgtctccagtaatagatctcttcaacaacgaagttatttcttacagcctttcggaaagaccaaatacggtgattcgtattaaaggcgatctggtttctaaaccttatatcgacatcacactcaatctgatgaagacgtttggtgttgaaattgaaaatcagcactatcaacaatttgtcgtaaaaggcgggcagtcttatcagtctccgggtacttatttggtcgaaggcgatgcatcttcggcttcttactttctggcagcagcagcaatcaaaggcggcactgtaaaagtgaccggtattggacgtaacagtatgccagggaagcaacagttaaaaaccatgaaacaggcaacaagaaaaccgacgacacccggagatattcttctctatgaatatctggaaccgctcgatttgaaaatcaatgagttagcagagttgctgcatgttcatcgtaatagcgtcagtgcactgatcaataacaatcgtaaactcactactgagatggcatttcgtctggcgaaagtttttgataccacagtcgatttttggctaaacctccaggcggcggttgatctttgggaagttgaaaacaacatgcgcacccaggaagaattgggacggattgaaacagtggctgaatatttggcacgccgtgaagagcgtgcaaaaaggtcgcgccggataaggcgttcacgccgcatccggcatccgagcaccattgcctaa

SEQ ID NO: 28989 - DNA, 2352 bp, Homo sapiens
  SIMILAR (853)..(1425): 1001254mologous to Escherichia coli hydrogenase isoenzyme hypD,accession number X54543,Smith-Waterman Score=976.
atgacacgtttcctgcatgttcagttaccgctggcgttaccggtatttctgcgcagcctgcgggtggtgatggtgcaaactgtaggtatggcggtgattgcggcgttaatcggcgcaggcggttttggtgcgctggttttccaggggctgctaagcagcgccattgatttagtgttgctgggggtgatcccggtaattgttctggcggtgcttaccgacgcgctgttcgatttgcttatcgcactgctgaagggtatatttccttccagctacgttcacttgaaaaatgcctgtgtaaagaacaaaggcatgaggccctcacctgatgtggccactccgatgggcctggctcacacctttatggccgctcaggcgctggaagaagcggcggtagaagccggttatgaagtgaaaattgaaacccagggcgcggacggtatccagaatcgcctgacggcgcaggatatcgccgaagcgaccatcatcatccactccgtggcagttaccccggaagataacgaactccttcggcggcgtgttgtttggttttgccattccgatgtttgctgcttttgtggcgaactctatcggtggcaaactggcgttcccggctggttttatcggcgggttgatgtctacccagccgacgcaactgctgaacttcgatcccagcactatgcaatgggcgacctcttcgccggtgccgtccaccttcattggtgcgctgattatttctatcgttgccggttaccttgtgaagtggatgaaccagaaaatccagttaccggatttcctgttagcgttcaaaaccacatttttgctcccgattctttccgccatttttgtcatgctcgcgtgccggggaaacagggatcgctgttgcaggcaaaagcacgcggtgccgatgtgcgcatcgtttactcgccgatggatgcgttgaaactggcgcaggagaatccaacccgcaaagtggtgttcttcggcttaggttttgaaaccactatgccgaccaccgctatcactctgcaacaggcgaaagcgcgtgatgtgcagaatttttacttcttctgccagcacattacgcttatcccgacgttgcgcagtttgctggaacagccggataacggtatcgatgcgttcctcgcgccgggtcacgtcagtatggttatcggcaccgacgcctataattttatcgccagcgattttcatcgtccgctggtggttgctggattcgaaccccttgatctactacaaggcgtggtcatgctggtgcagcagaaaatagcggcccacagcaaggtagagaatcagtatcgtcgagtggtaccggatgccggtaacctgctggcgcaacaggcgattgccgatgtgttctgtgtcaacggcgacagcgaatggcgcggcttaggcgtgattgaatcttctgtgcttctctcagtcttggtttgtatgctggaatcgaggccagaattctcactaaaggctacacgagaaagtgaattcagcagtaagcgccgtcagaccagaaaagagattttcttgtcccgcatggagcagattctgccatggcaaaacatggtggaagtcatcgagccgttttaccccaaggctgcgacccccacatggaaagcctcatctaatggcgcattctgctcgctgacaagttgctcagcaatcgagcgcggttattctgttgcaaaaacaggggaactgacacctgttgctattacagcggtcaccttcccgttactgattgatgctgcggtaaatgacaatactattcttggttctgatgaaacgatcaaactggatgctgtccctcctgttcagctactgacggggtggtgcgtaacggcaaaagcaccgccggacatcagcgctatctctgctctcactgccgtaaaacatggcaactgcagttcacttacaccgcttctcaacccgccgggcagtgacgtcatcgtctgcgcggaaatggacgaacagtggggctatgtcggggctaaatcgcgccagcgctggctgttttacgcgtatgacagtctccggaagacggttgttgcgcacgtattcggtgaacgcactatggcgacgctggggcgtcttatgagcctgctgtcaccctttgacgtggtgatatggatgacggatggctggccgctgtatgaatcccgcctgaagggaaagctgcacgtaatcagcaagcgatatacgcagcgaattgagcggcataacctgaatctgaggcagcacctggcacggctgggacggaagtcgctgtcgttctcaaaatcggtggagctgcatgacaaagtcatcgggcattatctgaacataaaacactatcaataa

SEQ ID NO: 28990 - DNA, 2100 bp, Homo sapiens
  SIMILAR (2096)..(1872): 311254mologous to Homo sapiens endothelial nitric oxide synthase,accession number X76303,Smith-Waterman Score=45.
ttacccccggatgaagcagggcacagggtctccgggcttgagctggcttagccacgtggagcagactccatagtgcagggggcccagcccatcctgagtcctgtatgccagcacagctacagtgaggtggatctctcctgggtgggtgctgggtgccgagctgactgagtagtaccggggctggagcagaggcagctgggtgaggagcagtggggcaggcagcgccaccgacgggaactgctccagcacctccagcagcgtggggcagcggaaccacttccactcctcgtagcgtcggggatcctggctgagggcctccagctcctgctgttccctgggctcttctgccaaggtgctgagcagccgcaagagctgagggctgggtggggaggtgatgtccaggaagaaggtgagagcctggcgcagcgtgcacgggggcagccgggggtcccgcacccagccggggggagggccaccagggctgcccttctccagctgctctactgccacgggctcagtgggcgccggcgggtcctccacgcggctcagcagcgcctccacaaggccgggccggttgggcgggcagacacctatgtggtcccccggctggtactgcagcccctcctggcctccggtgtccaggcgcaccaggatggtggccctcgtggacttgctgctttgcaggttttccactgagcggattgtagcctggaacatcttccgcctgtgcacgtggatcagacctggcagcaactgcaggccctcggcctgggcgctcagccggtacctctggcgcttccagctccgtttggggctgaagatgtctcgggcggcggccttggcatcctctcccacacagaaggtctcacaggcggcctggaaggcagcctgggcccagcctcggaaggcctcctcctggccgcacagctcgtcgccctggcccagctgcagcagccgctccccgcccagttcctccagccgtgtgtccacggcacgagcaaaggcgcagaagtgggggtatgcccgggagccgagcccgaacacacagaacctgagggtgcccagggcccctgcactgtctgtgttactggactccttcctcttccgccgccaagaggacaccagtgggtctgagcaggagatgctgttgaagcggatcttataactcttgtgctgttccggccgaggggagctgttgtaggggccggacatctccatcagggcagctgcaaagctctctccattctccgggggatccccattcccaaatgtgctggttaccaccagcaccagcgtctcgtgttcgagggacaccacgtcatactcatccatacacaggacccggggatcaaaagccttccggaagagtctccccagctgctgtgcgtagctctgggcccggccggtctcggagccatacaggattgtcgccttcactcgcttcgccatcaccgtgcccatgagcgaggcggagatcttcacggcgctaaaggcgttagtgctgatccagagttgcgtattaaggtcgtgaaagctgtgatcgagcagcacatgtcccttaatcaggctgctgctcactttatgcttgctggtagtggttctgtagccaggtggctgaaggtcgatgttactgaatttgcagtcaatgggcgcaagctgtatttgtctccagtaatagatctcttcaacaacgaagttatttcttacagcctttcggaaagaccagtgatgaacatggttgagaatatgctcgatcaggcattcaaaaagcttaatcctcacgagcatcctgttctgcactttggccacttctttaaaggtcttcttcctggtgatgccggtgcccttggcggcactccccttccaggggtctggctggtagcggaaggccggggacaggaaatagttgaccatctcctgatggaaaacaggagtgaggctgcccgagatggggggcacgatccaggcccagtctgcagggcagccccccctggccttctgctcattctccaggtgcttcatgaaagaggccgtggcggcgtggtggtccacgatggtgactttggctagctttcctgtcctgatcttggaaacagccat

SEQ ID NO: 28991 - DNA, 1389 bp, Homo sapiens; identical to SEQ ID NO: 24402
  SIMILAR (963)..(358): 661254mologous to Escherichia coli IS5 39.3kDa protein,accession number U70214,Smith-Waterman Score=663.

SEQ ID NO: 28992 - DNA, 2019 bp, Homo sapiens
  SIMILAR (1959)..(1318): 971254mologous to Escherichia coli enzyme I,accession number M21994,Smith-Waterman Score=1045.
ctaacttcctgagcggtcacagatgggaataggtggtgtagagcgtggtcgaaccgttgatatgcgccttactggtaaagcgattaccgttgatttcagtctgcaccggcaggagtttatgcacctgatattccgattcgccggagtcagcagatcccaggtggcgcgcactttgccaaaggtgactttcaggccatcacgggtggcgctgattttgcgctgatagtcagggtattcgccagcaatggttttatcggaaagcggtttcccttctttcgcttccagtttttccagcagttcgccgtcccacaccagatccagcggtttattgctggtgattttggtttccagtagtgacgtgcgcggcgtggcgaagcgcagagtcatttcgacttgcacatcttttgctgtcagtttttgcaccagcgcaccgggaatactgtatgcctccagcgtaaagtcgactttcttgccgtcctgccagacggtcaggcggtcgaaattgctggccataaagttgatgtactcttccgtcagcagcgcaacgcccggaaagccgcccatggtgttagggccgtctggcaacagatgaccatgccaggctccgagatcgaaaaacggattaaaacgctggtgatcgtcgtaatcgtaatccttcatgtactgcggcgcgccagtacggttaatcacgtttttataattgtcggcgttagcggcatgggcggaaaaacttatcagcagagcgcaacgggcttccagaatatcgaaactgtaatccggatcatcggccatcagtgtttttagcggctggacgatgttttgctccgaccatgtgtcatgacgccagcgaataaacgtcccgccgccgcgtcgactgagcagcacgccttcactcaccagttttgccagcgcgaggaagatcagcaccggtgcaccaataaacgcactgaccacagaaacgcgcagttcgccgggcacaatcacccgcccgatgatatcggcaaacagcagcagggcaggggtagcaattgttagtaaacggagaagcgaacataagtggacgtcaaggtagaaatggcgctcatagagaattcgtccagacccatccccagcaacagacgctgtagcacgttcatcgccagcaagctcaccacagtggccagtccatttgccttcagcatgagaagcatcaataacttgcttgatcaagttcagcacggacggtgacattggctggtaaaggtgtgaaatcatatcattaccacggtcaactgccagagtgtactgcgttaaatcattggtgccgatactaaagaaatcaacttctttggcttcgtcgcgcagttcctgtttgtagatttcgatctctttgcgcagtgcacgcacttcttcaacagagatgatcatcgggaacataatgcgcaatttaccgaaagccgaggcacgcaggatagcgcggagctgatcgcgcaggatctctctacgatccatcgcgatacggatagcgcgccagccgaggaacgggttctcttctttcgggaagttcatgtatggcagctctttgtcgccgccgatgtccatggtacgaacgataaccgcttgcgagccacacgcttcagccactgctttgtaagcagcaaactgttcttcttcagtgggcagtgcgtcgcggtccatgaacaggaactcagtacgatacagaccaacgccttcagcgccgttacgctctgcaccttcaacgtcacgaaccgtaccaatgttagcgcatacttctacctggtgaccgtccagcgtaatagctggcagatctttcagtttagcaagctctgctttttcagaagccacttgctcctgaacagcgcgcattttatcaataacttcgttggttggattgacgtaaacctgattatttacggcatccagaatcagatagtcgtcatttttagaatgaggtgttacgtgcagcggagaaaaagatctgaagagagtccagaaactcccaaaagaggttgacaccat

SEQ ID NO: 28993 - DNA, 1596 bp, Homo sapiens
  SIMILAR (1)..(618): 981254mologous to Escherichia coli IS5 39.3kDa protein,accession number U70214,Smith-Waterman Score=1062.
atgagtcatcaacttagcttcgccgacagtgaattcagcaataagcgccgtcagaccagaaaagagattttcttgtcccgcatggagcagattctgccatggcaaaacatggtggaagtcatcgagccgttttaccccaaggctggtaatggccggcgaccttatccgctgggaaacatgctacgcattcactgcatgcagcattggtacaacctgagcgatggcgcgatggaagatgctctgtacgaaatcgcctccatgcgtctgtttgcccggttatccctggatagcgccttgccggaccgcaccaccatcatgaatttccgccacctgctggagcagcatcaactggcccgccaattgttcaagaccatcaatcgctggctggccgaagcaggcgtcatgatgactcaaggcaccttggtcgatgccaccatcattgaggcacccagctcgaccaagaacaaagagcagcaacgcgatccggagatgcatcagaccaagaaaggcaatcagtggcactttggcatgaaggcccacattggtgtcgatgccaagagtggcctgacccacagcctggtcaccaccgcggccaacgagcatgacctcaatcagctggcgcgaggagctggccgaggtggatgtggactggctgatcccgagcgccccggcaaggtaagaaccttgaaacagcatccacgcaagaacaaaacggccatcaacatcgaatacatgaaagccagcatccgggccagggtggagcacccatttcgcatcatcaagcgacagttcggcttcgtgaaagccagatacaaggggttgctgaaaaacgataaccaactggcgatgttattcacgctggccaacctgtttcgggcggaccaaatgatacggaaatcacgggacaatttccgtattggcatccggagagtcgacctgaaaagccggccgggttgccatgggaaattcaattcgcttgtagcaacaaaactgctgcagggcatgggtttccaaaaagttgcttggcggcccggttaccgacgttcagcgcccatcatcacccagagcgtggaggtcgatctgccagacgctactgaatcacaggcggtgagcagtaacgataatccgccagtgattgttgaagtgtctggtattggtcagtacaccgtggtggttgagaaagatcgcctggagcgtttaccaccagagcaggtggtggcggaagtgtccagccgtttcaaggccaacccgaaaacggtctttctgatcggtggcgcaaaagatgtgccttacgatgaaataattaaagcactgaacttgttacatagtgcggcagtgctgcatgtcatcttatttgcggcgctgatctggagttcgttcgatgagaatatagaagcttcagccggaggcggcggtggttcgtccatcgacgctgtcatggttgattcaggtgcggtagttgagcagtacaaacgcatgcaaagccaggaatcaagcgcgaagcgtttttatgaacggcgcttcctgaggattcttcatgttgcggataagtggcgttgccaaagacccccgatgtctgcaagcttaggggcgtga

SEQ ID NO: 28994 - DNA, 3789 bp, Homo sapiens
  SIMILAR (1855)..(2790): 991254mologous to Escherichia coli IS5 39.3kDa protein,accession number U70214,Smith-Waterman Score=1616.
  misc_feature (1)...(3789): n = a,t,c or g
atgaaagtgacatttgagcagttaaaagcagcctttaatcgggtcttaatttcacgcggcgttgacagcgaaacggctgacgcctgtgcagagatgttcgcccgcaccaccgaatccggcgtttattctcacggcgttaatcgtttccctcgtttcattcaacaactggaaaacggcgatatcattcctgatgcccaacccaaacgtataaccagcctcggcgcaattgaacagtgggacgcccagcgttcgatcggtaacctgacagcgaaaaagatgatggatcgcgccattgaactggctgccgatcacggtattggtctggtggcactacgtaatgccaaccactggatgcgcggcggcagtaacggctggcaggcggcggaaaaaggctatattggcatttgctggaccaactccatcgccgtaatgccgccgtgggtgccaaaagagtgtcgcataggcactaacccgctgatcgtcgccattcgttccacgccgatcaccatggtcgatatgtcgatgattaagcatacattaccacaacgagccgctggcacagatagaaaactcgctatgtcgcgagaggcacaactgcttgagcgtcatggttatgccttcaatgagttggatcttggcaaacgcgagccggttaccgaggaagagaaactcttcgtagcagtatgccgtggcgaacgtgagccagtgacagaagcagaacgcgtgtggtccaagtatatgacgcgtattaagcgtccaaaacgttttcacaccctttccggcggtaaaccgcagccgggcaagaagattgtgattcgcccgctgccaggtttaccggtgatccgcgatttggtggtagacatgggacaattctatgcgcaatatgagaaaattaagccttacctgttgaataatggacaaaatccgccagctcgcgagcatttacagatgccagagcagcgcgaaaaactcgacgggctgtatgaatgtattctctgcgcatgttgttcaacctcttgtccgtctttctggtggaatcccgataagtttatcggcccggcaggcttgttagcggcatatcgtttcctgattgatagccgtgataccgagactgacagccgcctcgacggtttgagtgatgcattcagcgtattccgctgtcacagcatcatgaactgcgtcagtgtatgtccgaaggggctgaacccgacgcgcgccatcggccatatcaagtcgatgttgttgcaacatgaaaacgccggagtgaaaattctccggcgttttggccgtgaattactgctgcggaattgccggtacagccggaacttttttcgcttgatcttcctgataaccttccagcttcgctacctgagtcataaactcagttgccatatccaccggaatggtcagtttcgcatccagagatttaaccgaacgatctacttcctgcgccagcgtttgcggcgcttctttagtcgttgccggatctttcaggaacagcgacagattcagggcactttcaccctgatgtttttccatttaangggtctgaaatatgacgctaacaacatttacctggccactacctattctgaaacccagaatatgactgtatttgctgatcacttcgttgctaataaagcccaaaacttcgaagctgttgcacaatatcagttcgatttcggtctgcgtccgtccgttgcttacctgcaatctaaaggtaaggatcttggagtatggggcgatcaggacttagtcaaatatgttgatgtaggtgcaacctattacttcaacaaaaatatgtctactttcgttgattacaaaatcaacctgcttgacaaaaatgacttcactaaggaagggttcatcatgagtcatcaacttaccttcgccgacagtgaattcagcagtaagcgccgtcagaccagaaaagagattttcttgtcccgcatggagcagattctgccatggcaaaacatggtggaagtcatcgagccgttttatcccaaggcgggcaatggccgacggccctatccgctggagaccatgctgcgtattcactgcatgcagcattggtacaacctgagcgacggtgccatggaagatgccctgtacgaaatcgcctccatgcgtctgtttgcccggttatccctggatagcgccttgccggaccgcaccaccatcatgaatttccgccacctgctggagcagcatcaactggcccgccaattgttcaagaccatcaatcgctggctggccgaagcaggcgtcatgatgacccaaggcaccttggtggatgccaccatcattgaggcacccagctctaccaagaacaaagagcagcaacgcgatccggagatgcatcagaccaagaaaggcaatcagtggcactttggcatgaaggcccacattggtgtcgatgccaagagtggcctgacccacagcctggtcaccaccgcggccaacgagcatgacctcaatcagctgggtaatctgctgcatggagagaagcaatttgtctcagccgatgccggctaccaaggggcgccacagcgcgaggagctggccgaggtggatgtggactggctgatcgccgagcgccccggcaaggtaagaaccttgaaacagcatccacgcaagaacaaaacggccatcaacatcgaatacatgaaagccagcatccgggccagggtggagcacccatttcgcatcatcaagcgacagttcggcttcgtgaaagccagatacaaggggttgctgaaaaacgataaccaactggcgatgttattcaaatcaaagcagccatttgggccagggcacggatttgcggtaacggtgatcgagcacgcagaaccagcgccgtttgtcgctgatagccaaccggacgtgcggatctcggcgatcagcgcggcttcggtatcattgcttaaagggttaggggtctgggatgcagtacaggctatgcgttgccatccttaccgcagactggaaacgtgggagtgggaaacggcgcatgtggtgtttgacgccgctgaacttaagctaccgctgcttggctatatggtggaaaacactgtcctgcaacaggcgttgtggcaggcgctggacagctcgctgattgcgctgcatcgccatgatgatcttcaggagctggagctgaaaggcggtgaagtgattcgcgcgaacgtggtgattggtgccgacgggcaaattcgcaggtgcgagcttccatgcctgcaggtcttttgtttggtccatgacctgcctgtgctgtttgtgacgctggctgcgctggcccacccgattctgattaatcgcccgattgtggtgacgccgctgggaactcgcctgtgccgcccttcagaagtggtgctggaaattctgccagatgcgcaaaaaggcgcattctccaaggaagatggcgagaaagtggttgatgaagcggctgcgggcgttgaccagaacatcaatcagggcatcgacatcacgataaccaagattcactccctgccccgccagcggatggatggtatgcgcggcatcgcccaccagcgcaagccctggctgcacgtactgcaacgcatggcgacgcgtcagcggaaacgcaccagcggcaagcggtgtaacgtaacccagacgcgacgggaaatgcttcgcgatttccgcctggagctgtgccatattcatattctgcaactggcgaatacgcgccggagagttattcggggatcctctagagtcctgggcatggtggtgtgcacctatagtcccagctacttggaaggctga

SEQ ID NO: 28995 - DNA, 2460 bp, Homo sapiens
  SIMILAR (2460)..(1894): 1001254mologous to Escherichia coli glutamate--cysteine ligase (EC 6.3.2.2),accession number D90892,Smith-Waterman Score= 1012.
tcaccactggtaccgttgaccgatgcactggcgaatacgtggcaaaagcagttcccgcttgattacggcaaagtgcgactgtggggctcggtggagttgtcgggatcctctagagtcacctaagcaggcgctgctgccttgttgttgttgtcgtgctcggcgtgtggtggtcactttcttgtttgtgttgccgcttggtttgtaggtttccggtgtttgggcgtagtgctcttgggtgttgttgggcgggtcgctgctgtcggtggcgtgtttgcttcgtcggtgtgcctctgtgttttgtgtcgcgtgtttggttcgtggtgtattcctggtgtggcgtgttttcctgttggttttgcctttgtgttttggtgatttgtttcggttcgacggttcgtcttgtgtgctgtctgtttctttttggtgtagctgctgtattgtggtgtgtgtgttctcgttggcctcccgtgtcccccggcgcggtggtttccacgacagtgctttatgctgtgtgtccatcatccctatagcgcggcccaacatgccatacagaatgtagtaaaaagtatcgccattgatatataagttaattggcagccattcaaaaccgtcaattttctgcggcactgtgtttgggttagcgataatgccaatcaccgccattagcaccagcaacatttttccgccgacgttcttcacctgaatcagcggtgaaaccagataaatcaccgcaatcgcgaagaaaaaccacaagtggtaaaacactggcttttgcagcaggtttttcagcgctaactccatattgatggaggtaaacagcgcaatgtagagcagtgcgattgcgctataaaaaatcagacataagccgatacgcaagaaatggcgcggctgggcgctgcgttcgccaaaaaagagatagccggaaatcatgaaaaatagcggcacgctgacacgagaggcagaattcagaacattggcgatatcccatgtgacggggctaacactatgagcattggtcacataccaggtagtggtgtgaatcatcaccatcaggctacgcggccaaacgagaagtgggttaccgatgttactgaatttgcagtcaatgggcgcaagctgtatttgtctccagtaatagatctcttcaacaacgaagttatttcttacagcctttcggaaagaccagtgatgaacatggttgagaatatgctcgatcaggcattcaaaaagcttaatcctcacgagcatcctgttctgcactctgaccagggatggcagtatcgtatgagaagatatcaaaatatcccctttctcgcccagcagacgtaaaaatagcgaagactgtagcaggatgacaaaggtgccgccccaggccagcagcagagcaatcaccagatgccccatctgattcgggtactgatgagacaacaacatcagcgtggcgagaatagtcggcccggcgactaacggaattgccaaccccgccaagcccgggtgcggtgtcccgccggagaagagacgacaggtaaagggggcacgagtgaccggagggacgtgcaacaacactacatcatcccgccggcgagccgatgggcacacgccacggcgccagcacggctggaatgccccactcctgagttttgcaaacagcctgttggcagcttgccctttcaaatcaataagcggtatccagtgacgccactgcgtgacgggatgaacctggtagcaaaagagtatgttgctgctcaggacccagccaatccgggcgttcttgttctttcgcatattgcgcacatggtccagtaaacattcagtttgccgtctttcagcgcacggtcttgtgccaccgcgtgcagaccagatttttggcgcgtggtctgtttgttggcattcgtctttctcgataccgatcttcgcgtactcttccgatggcgttttgattgcctgtttaaggcccgctacgtactcgtaaagatcgttgaaggtaataccaagattgctttgcgatttattggtatagccgagatcgctcaaacgaagagaggtcgcatacggcaggtaatacataccgcactcggttttctcaaacggcagcgacgttggttttccttgcaggaaagaagaacaaatcgccggagatgcaccaaacagataaggaatgacccaaccgaaacgatagtaattgcggataacgcggaaatagcccgcagaaattttctctttggcatcagcgcccgagatatcaccgcacttcgcttgccagaatgccattggcaaagagaaattgtagtgcacgccggaaatggtttgcatcagcgcgccgtagcgatttttcagcccttcacgatacagcgttttaaagcgtccggtgttagaagtgccgtactgtgccagttcgatgtcctgaccttctgcgatgtagcatggcatacttaacggccacatccgctcatcgcccat

SEQ ID NO: 28996 - DNA, 1380 bp, Homo sapiens
  SIMILAR (757)..(1080): 991254mologous to Escherichia coli IS5 39.3kDa protein,accession number U70214,Smith-Waterman Score=547.
atgcgtcgcctgacgctgcaggataatcctgctatcgcccgcgtcattcgtcaggtatccgccgaatacggtcttaccgctgataaaggctacaccgtcgccgatccgaatcttgacgagctgtatcaagtatatagtcagcctggccatgcatattgggtcgtcgatcagctcagggaggaaattattggtccagccaatgcccaggtctatagcaaggtggtcagtgggagtcagaatactatgcttggcccatttgggtcaagtgatcatctgacatcagtgaactacagagcagggtcagaaaaccgtaccgggagagaggcaatggccctgattgtggaatttatttgtgagctacctaacggcgtacatgcgcgtccggcaagccacgttgaaacgctgtgtaatactttttcatcacaaattgagtggcataacctgcgcactgaccgcaagggcaacgccaaaagcgcccttgcgctgattggcaccgatacgctggcgggcgataactgccagttactgatttccggggccgacgaacaggaagcgcaccagcgtttaagccaatggctgcgcgatgaattcccccactgcgatgcgccgctggcggaagttaaatctgacgaactggaaccactgccggtttcactgaccaatctgaatccgcaaattatccgcgcccgcaccgtgtgcagcggtagtgcaggcggcattctgacgccgatctcttctttagatctcgatgcgctggaggagcaatttgtctcagccgatgccggctaccaaggggcgccacagcgcgaggagctggccgaggtggatgtggactggctgatcgccgagcgccccggcaaggtaagaaccttgaaacagcatccacgcaagaacaaaacggccatcaacatcgaatacatgaaagccagcatccgggccagggtggagcacccatttcgcatcatcaagcgacagttcggcttcgtgaaagccagatacaaggggttgctgaaaaacgataaccaactggcgatgttattcacgctggccaacctgtttcgggcggaccaaatgatacaatattcgcttagccaatataccagtcctgtctctgatcttgatggcgtggactatccgaaaccttatcgcggtaaacataaaattctggtgatcgccgcggacgaacgttatttgccgaccgataacggaaaactgttctcgaccggtaaccatccgattgaaacgttgctgccgttgtatcatctccatgctgcaggtttcgaattcgaagtcggcgaccacttctccggtctgatgaccaagtttgaatactgggctataccgcacacagatgaaaacagtaactgccatctctcttga

SEQ ID NO: 28997 - DNA, 2550 bp, Homo sapiens
  SIMILAR (2050)..(2535): 1001254mologous to Escherichia coli O157:H7 DNA gyrase, subunit A, type II topoisomerase,accession number AE005455,Smith- Waterman Score=809.
atgagaaagtacaacagccttgttgttgatatgaggaaggtttcagtggtttggatagaccaagctagccacaacattcccttaagccaaagccaaatccagatcaggcccttcaattctgtgaaggctgagagaggtgaggaagctacagaagaagagttggaagctaacacagctagcggctgtgcctctcgacttcacagctatcttctggctctccactgcttcactgtgcgcctttgtggtgtgccctctccccacctgtttgcctccagcactgcttctttgccagagtcacctggttgctgcatgcactcactggtcactaaatccccatgcggggatcctctagagcccgacgatgccaccttgtttaaacaaaatctcttctacttggagactctcaacaccaagcagaagctgtaccacaagaagatcttccggactgccatgctgttccagtttgtgaacgtgctgctccaggtcctggtccacaagtcccatgatcttctgcaggaggagattggcatcgccatctacaacatggcctcagtcgactttgatggcttctttgccgccttcctcccagagttcctgaccagctgtgatggtgtggatgccaaccagaaaagtgtgctggggcggaatttcaagatggatcgggtgtgcgagggaatcagttctctaagtcgactgcagaatgagctcagctatatcgagaagtttactgactttcttcggctctttgtgagtgttcacctaagaagaatcgagtcttactcccagttccctgtggtggagtttttgacacttttgttcaagtacacatttcatcaggatttagacatacaaccttcacaagcagtctttggcggcattgagtttacttacattctagtgaccctagtcattctaggcacgcagcgggtccccaagccgggctgcggccagggcgggcgcgccaactgccccaactcgggcgccaacgccacggccaacggcaccgccgcccccgccgccgccgccgccgccgccaccgcctacggggaacggcccacctggcggcgcgctgatacagctgggagaccggcgacgaacgcttccgcttcaggatttccacaccgtatcgaattaaaagcgggcaaaacaatcacgctggaagatggaaggcagattaacggcgcagattacttagctgctccagtgccaggtaaagcgctcgctattttcggcgataccggcccctgcgatgccgcacttgacctggctaaaggtgtcgatgtcatggtgcacgaagcgacgctggatataaccatggaagccaaagccaatagtcgcggccatagctctacacgccaggctgcgacactagcccgtgaggctggagtcggcaagctaatcattacccacgtcagctcgcgctatgatgacaaaggttgtcagcacctgttacgtgaatgcagagatttcaaggctacgcggccaaacgagaagtgggttaccgatgttactgaatttgcagtcaatgggcgcaagctgtatttgtctccagtaatagatctcttcaacaacgaagttatttcttacagcctttcggaaagaccagtgatgaacatggttgagaatatgctcgatcaggcattcaaaaagcttaatcctcacgagcatcctgttctgcactctgaccagggatggcagtatcgtatgagaagatatcaaaatatccttaaagaacatggtattaaacaaagcatgtccagaaaaggcaattgtctggataatgctgtggtggagtgtttctttggaaccttaaagtcggagtgtttttatcttgatgagttcagtaatataagcgaactgaaggatgctgttacggaatatattgaatactacaacagcagaagaattagcctgaaattaaaagcattagccgtggcgctggcgaacatcgacccgatcatcgaactgacgtcatgcgccgacgcctgcaagcgaactgcgctggttgctaatccgtggcagctgggcaacgtccgcgatgctcgaacttacaaagagctgctggatcagatcgcggaactgttgcgtattcttggtagcgccgatcgtctgatggaagtgatccgtgaagagctggagctggttcgtgaacagttcggtgacaaacgtcgtactgaaatcaccgccaacagcgcagacatcaacctggaagatctgatcacccaggaagatgtggtcgtgacgctctctcaccagggctacgttaagtatcagccgctttctgaatacgaagcgcagcgtcgtggcgggaaaggtaaatctgccgcacgtattaaagaagaagactttatcgaccgactgctggtggcgaacactcacgaccatattctgtgcttctccagccgtggtcgcgtctattcgatgaaagtttatcagttgccggaagccactcgtggcgcgcgcggtcgtccgatcgtcaacctgctgccgctggagcaggacgaacgtatcactgcgatcctgccagtgaccgagttggggatcctctag

SEQ ID NO: 28998 - DNA, 2112 bp, Homo sapiens
  SIMILAR (735)..(25): 951254mologous to Escherichia coli f470,accession number L10328,Smith-Waterman Score=1143.
tcagacgaggtgccgataaacgcacccgccaccgaacgtgacgctatcaacatacagcgccttattcatattggggaatttaccgttaccatctattaagcccgctttatcagttacaccaattaatgttcctgatgaatcaaataggttgatcagcataaaggagaaaatgataccggcgagttcaagtgttaacgcgccgctcaaatctacttcaccaatgacgccgctaatatcaggcggaatggaatagacgccgctaaaatgaacatcaccgaaaaataatccacagcaagacgtcaccacaatagaaaccagcaccgcggcatgaaaatgacgtgatgacaacacggttataataaaaaaccctaaaatacctaacaacacgccgtgagaacttaaatcgccaatcatcaccagcgtgtctttattggcgacaataacgccagtattttttaatcccattaaggcgataaataatccaattccgctggtgataccaatacgtaaacttaagggaatgttggagatcatccagtaccggatacgaaacagcgtgagcaaaaatagtccaactgcgccccagaatattgcgcccatcccggtctgccaggagatgcccatcggccccacgatcacgaaggcaaagaaggcgttcaggcccattgccggagccagcgccacgggtaagttagcaaatattcccatcgcaatactggcgataccggcaatcaactgaaaatcaaaagcaaaggcttgatccgcggggacaaattgtgaacgtcccggcgcgtcgaataatccggcaaaaacggaagtgctgcaaagtagcaggatcagcgtaaagatgcgttgagccatgagaggtaatctgtgtctccgtgtgtaacaggtaaaaccagaagttccggggtttgatatggatgatgagacttcaggcattccagcagtgccttcccagtaatagagagaggtagcgccggggatcaaggtcgcgcaggccgccagtttttccgccagcactttggcggctaaatcctgggctgtcgcttcatctggtgccgtacatagcaccacgacagacgcggtattcgaacttttttcatcaagcataaacacccgggatgaagaacggatggttgaagacgaatttaccgatacgggtagtacccgtgtcatccatctgtaccgcagcaaccagcgtcgggtaggtcggcagaatgaacagaacagacaacgcagagaaagaagcaaagcgggcagcggggaaacgtcagtgccgggtacgatgcgaatggcccgatggcaaaggggttcccgaatctgtccgcgacaccagagttgcagacgtgaatgttcacgcacagcctgctggagcagcatcaactggcccgccaattgttcaagaccatcaatcgctggctggccgaagcaggcgtcatgatgactcaaggcaccttggtcgatgccaccatcattgaggcagcactcgagttcagtaccatcccagctgtcggcattaaagtaggccgtgacattctgtccttgctgaagagaagtcgcttcatttaccggcactgtggcgcacagtgtttgcccgtcgggtagcgccattaatacttcgcactgctctgcgccgcgctcaatatgactaataatacccggtaattggttgtcagcgttttgcgcgaccgcctcgtcctgagtaatacctacccacggcgcttttagcaatatcaacacttctttgccttcatccagccccagacgcgcgccgctttgtgcggtaattgcgactttcaggcgtgtttttccgtcagccagtaagacatcaacatgctgttgaacgtcatcatgatcgcgggcggtgatggtaccgaaccactggttacgggcgctggtttgcagtgaaaaacgtgagatcgcggccagcaggctgttcagcggcagggcgtcatcgtcacttaacacatcaaaggctttttgctggatttgcgccagtaagtcatagagctgaatcagtcgctgaccatagcgggtcagtactgcgccgacgacacctttaccgcctgttgcgcgctcgaccagaatatgctcacttaactgattcat

SEQ ID NO: 28999 - DNA, 1287 bp, Homo sapiens
  SIMILAR (256)..(1110): 981254mologous to Escherichia coli IS5 39.3kDa protein,accession number U70214,Smith-Waterman Score=1469.
atgggcaaatttgatgaaggtaaactgcccaccgatccacacctgatgctccgactggccattgaaactgttgctcatgactatgatgtcatagttattgacagcgcgcctaacctgggtatcggcacgattaatgtcgtatgtgctgctgatgtgctgattgttcccacgcctgctgagttgtttgactacacctccgcactgcagtttttcgatatgcttcgtgatctgctcaagaacgttgatcttaaaggtgaattcagcagtaagcgccgtcagaccagaaaagagattttcttgtcccgcatggagcagattctgccatggcaaaacatggtggaagtcatcgagccgttttaccccaaggctgctcacagagaacgaccttatccgctggaaaccatgctacgcattcactgcatgcagcattggtacaacctgagcgatggcgcgatggaagatgctctgtacgaaatcgcctccatgcgtctgtttgcccggttatccctggatagcgccttgccggaccgcaccaccatcatgaatttccgccacctgctggagcagcatcaactggcccgccaattgttcaagaccatcaatcgctggctggccgaagcaggcgtcatgatgactcaaggcaccttggtcgatgccaccatcattgaggcacccagctcgaccaagaacaaagagcagcaacgcgatccggagatgcatcagaccaagaaaggcaatcagtggcactttggcatgaaggcccacattggtgtcgatgccaagagtggcctgacccacagcctggtcaccaccgcggccaacgagcatgacctcaatcagctgggtaatctgctgcatggagaggagcaatttgtctcagccgatgccggctaccaaggggcgccacagcgcgaggagctggccgaggtggatgtggactggctgatcgccgagcgccccggcaaggtaagaaccttgaaacagcatccacgcaagaacaaaacggccatcaacatcgaatacatgaaagccagcatccgggccagggtggagcacccatttcgcatcatcaagcgacagttcggcttcgtgaaagccagatacaagggccaaattgacatagtgagcatacaccaacctccaagtatctctctacgcaaaaaggatgtagcatactactgcagatctgctggctcagatgaaagaatccgcccgaagcaattgatttactctttacaccttcggaggatcttccggaccgttctggggctgtacctcatgtcttga

SEQ ID NO: 29000 - DNA, 1122 bp, Homo sapiens
  SIMILAR (499)..(1119): 1001254mologous to Escherichia coli narP,accession number U00008,Smith-Waterman Score=1005.
gaaatagacgcagctgcgtggatcgccttctccaccccacatactgaagccagaataagccacgacttcgtgtgctccacgcgagggccgcctgacgccagagtttctcccgcatctgccatcagaggaccgtcgccctcaggagcccgagctcccgcggatgcccacgatgggcgcttgttcacctcagtctcggtacccaaaagtatccaagcggcattcaaattctgcccctactgtggaaattctttgcctgtagaggagcatgtagggtcccagacctttgtcaatccacatgtgtcatccttccaagaacttgcacagaaaacacaagacataatcatttaccataacacccgcatagagaacgaacgagcacagacgaacaacgcatgcccaacccatataaaccgggagcatcatagcaataaagtggccgtcgacattcgcttgatcaactgtgatctgcctgcttctgacaacggtagcggaatgccggtgatgattgtggatgatcatccacttatgcgacgcggtgttcgtcagttactggagcttgatcctggctctgaagtggtcgccgaagcgggcgacggcgcgagcgctatcgatctggcgaatagactggatatcgacgtgatcttgctggatctcaatatgaaaggtatgagtggcctggatactctcaatgccttgcgcagggatggcgttaccgcgcaaattattatcctgaccgtatccgatgcctccagcgatgtctttgcgctgatagacgcaggcgcagacggttatctgttgaaagacagcgacccggaagtattgctggaagcgattcgtgccggagcgaaaggcagcaaagtctttagcgaacgcgtcaatcagtacttacgtgaacgtgaaatgtttggcgcggaagaagatcccttcagcgtgctgacggagcgcgagctggatgttctgcacgagctggcacaggggctgtcaaataaacagattgcctcggtgttgaatatttccgagcagacagtaaaagtacatattcgcaatctgctgcgtaaactcaatgtccgctcacgcgtggcggccaccattctgttcctgcaacaacgcggggcacaataa

SEQ ID NO: 29001 - DNA, 1384 bp, Homo sapiens
  SIMILAR (487)..(1170): 971254mologous to Escherichia coli IS5 39.3kDa protein,accession number U70214,Smith-Waterman Score=1147.
agcaaactgggtgcggcgatggtgattgttgccgcctggtgcgtggaagattatcaggtgattcgtctggcaggttcactcaccgcacgggctacacgcctggcccacgaagcgcagctggatgtcgccccgctggggaaaatcccgcacctgcgcacgccgggtttgctggtgatggatatggactccaccgccatccagattgaatgtattgatgaaattgccaaactggccggaacgggcgagatggtggcggaagtaaccgaacgggcgatgcgcggcgaactcgattttaccgccagcctgcgcagccgtgtggcgacgctgaaaggcgctgacgccaatattctgcaacaggtgcgtgaaaatctgccgctgatgccaggcttaacgcaactggtgctcaagctggaaacgctgggctggaaagtggcgattgcctccggcggctttactttctttgctgaatacctgcgcgacaagctgcgcctgactagctcgcgcctgccggaccgcaccaccatcatgaatttccgccacctgctggagcagcatcaactggcccgccaattgttcaagaccatcaatcgctggctggccgaagcaggcgtcatgatgactcaaggcaccttggtcgatgccaccatcattgaggcacccagctcgaccaagaacaaagagcagcaacgcgatccggagatgcatcagaccaagaaaggcaatcagtggcactttggcatgaaggcccacattggtgtcgatgccaagagtggcctgacccacagcctggtcaccaccgcggccaacgagcatgacctcaatcagctgggtaatctgctgcatggagaggagcaatttgtctcagccgatgccggctaccaaggggcgccacagcgcgaggagctggccgaggtggatgtggactggctgatcgccgagcgccccggcaaggtaagaaccttgaaacagcatccacgcaagaacaaaacggccatcaacatcgaatacatgaaagccagcatccgggccagggtggagcacccatttcgcatcatcaagcgacagttcggcttcgtgaaagccagatacaaggggttgctgaaaaacgataaccaactggcgatgttattcacgctggccaacctgtttcgggtggaccaaatgatacaagcccgcatcaacgccatgctggagggattagcacagaaaaaggatttgatatttgtgcgcaacggtgatgaacatacctgctatgaagcggtttctcatctgcgtctgaagctcggcaatacccgtaaccgcattgacactgccgagcagtttattgataaggttgcttcgtcgtcatcgattactgggaagccgtatattgtgaagatccccg

SEQ ID NO: 29002 - DNA, 2802 bp, Homo sapiens
  SIMILAR (1626)..(868): 991254mologous to Escherichia coli IS5 39.3kDa protein,accession number U70214,Smith-Waterman Score=1306.
ttattgatagtgttttatgttcagataatgcccgatgactttgtcatgcagctccaccgattttgagaacgacagcgacttccgtcccagccgtgccaggtgctgcctcagattcaggttatgccgctcaattcgctgcgtatatcgcttgctgattacgtgcagctttcccttcaggcgggattcatacagcggccagccatccgtcatccatatcaccacgtcaaagggtgacagcaggctcataagacgccccagcgtcgccatagtgcgttcaccgaatacgtgcgcaacaaccgtcttccggagactgtcatacgcgtaaaacagccagcgctggcgcgatttagccccgacgtatccccactgttcgtccatttccgcgcagacgatgacgtcactgcccggcgggttgagaagcggtgtaagtgaactgcagttgccatgttttacggcagtgagagcagagatagcgctgatgtccggcggtgcttttgccgttacgcaccaccccgtcagtagctgaacaggagggacagccgcggttttaagcgaatcgatggagactgcgccgacaaacttattaccgcgttcgataacgtagccatattcgcgatcttcatcctgcaataatttcagtgccgaacgtgggccgaagccaggggttttacgaattaagccattcggtgtccggcgggcaatatctttcgcactgaatacctgactaatatcaacgccacggaagaaggtacggacataatcattcgccggctttagagcagggcgatgagcatcgcaggtgtgtgtctccggcttaaacgagactgatccatcttgatgtctcctcaacgcggaatattgactgtgtatcatttggtccgcccgaaacaggttggccagcgtgaataacatcgccagttggttatcgtttttcagcaaccccttgtatctggctttcacgaagccgaactgtcgcttgatgatgcgaaatgggtgctccaccctggcccggatgctggctttcatgtattcgatgttgatggccgttttgttcttgcgtggatgctgtttcaaggttcttaccttgccggggcgctcggcgatcagccagtccacatccacctcggccagctcctcgcgctgtggcgccccttggtagccggcatcggctgagacaaattgctcctctccatgcagcagattacccagctgattgaggtcatgctcgttggccgcggtggtgaccaggctgtgggtcaggccactcttggcatcgacaccaatgtgggccttcatgccaaagtgccactgattgcctttcttggtctgatgcatctccggatcgcgttgctgctctttgttcttggtcgagctgggtgcctcaatgatggtggcatcgaccaaggtgccttgagtcatcatgacgcctgcttcggccagccagcgattgatggtcttgaacaattggcgggccagttgatgctgctccagcaggtggcggaaattcatgatggtggtgcggtccggcaaagcgctatccagggataaccgggcaaacagacgcatggaggcgatttcgtacagagcatcttccatcgcgccatcgctcaagttgtaccaatgtttgttgcccccctcgcttttcgcttcgcgtaaggctttatctgcttccgtcatgacaagcgagatattacgcgtgtcacccgttgaaaaaaccgtgccaatactgatggtcatttgttcaggaacatcatatctgttactaaagccggtcaggagttcgacatttttacgcatacgttccgcaatgatttttgcctgggcactattgagttcggtaaatagcaagccaaacacctcaccctccagtcgcgctaaaatatcatcggggcggatgctttgctggataatatcgacaattgaaaccagcactttatcacccacacgatgtccccattgggcattgatgcgtttgaactgattaatatcaaccagcatgacacagaagtccttaacaacaggtcgcgacaataatgactctacgctgttgaaaaagtagcgccgattataaatattggtcagcacatcatgaactgccagtttgctggagagttgcagctcgtgttgctgtcggggatcagcacggaagcggcagctgcgttcaatccgcaaatgcacgtcagtgtaattgataactggtattttatggccagctccgtagtcgtactgacgattgttggcggcctcttcgataacccacacgctgacgctgccgccgttgcaaaagaaggttgcttcgccgttttcgtcggtcactactctctcttgccggttccccagaaaatcacgccaggttttattgccgtaattctctcccagatgaatggttttttcgccatcatccccgttcgacatgaccaccacgcagccgggaaattcgtcggtgccactgcggctaaaggcaatgcagttcggatggtcgaaaaataacgtctgtacaccgtgggcgaaacgctgacgggcgagaattaactcatcaagctgttcgattattggcatatctatcggataggtttgcccggcaccaccgacatcttcgtaatgcgcaccgtagaggtccggatagaataccgaaggaacgccattttcccgcaacaaaattaaggcatacgccagcggtttaaaccacggttcgaccggcgcttcgagggcttgcaacggttgggtgtcgtgattggcaacgagcgtcacggcgtggaaaggatcggcttccactaatgtacccgtgaaaatctgcgtcat

SEQ ID NO: 29003 - DNA, 2145 bp, Homo sapiens
  SIMILAR (559)..(1356): 871254mologous to Escherichia coli K12 IS5 transposase,accession number AE000234,Smith-Waterman Score=1194.
atgtgggggaccgtgattgtcggcctgaccaacgtacttgccacctttatcgcaatcggccttgttgaccgctggggacgtaaaccaacgctaacgctgggcttcctggcgatggctgctggcatgggcgtactcggtacaatgatgcatatcggtattcactctccgtcggcgcagtatttcgccatcgccatgctgctgatgtttattgtcggttttgccatgagtgccggtccgctgatttgggtactgtgctccgaaattcagccgctgaaaggccgcgattttggcatcacctgctccactgccaccaactggattgccaacatgatcgttggcgcaacgttcctgaccatgctcaacacgctgggtaacgccaacaccttctgggtgtatgcggctctgaacgtactgtttatcctgctgacattgtggctggccgttatgcgtcgcctgcgggaaaaactcgcccaggccaacctgaagctagggcgtaactacccggagccaaaactctcttacacccagcgcggaacctccgccggaacggcctggctggaaagctatgaaattcgcctcaatcccgttttgctgttggaaaacagtgaagcttttattgaagaagtgtctggtaatggccggcgaccttatccgctggaaaccatgctacgcattcactgcatgcagcattggtacaacctgagcgatggcgcgatggaagatgctctgtacgaaatcgcctccatgcgtctgtttgcccggttatccctggatagcgccttgccggaccgcaccaccatcatgaatttccgccacctgctggagcagcatcaactggcccgccaattgttcaagaccatcaatcgctggctggccgaagcaggcgtcatgatgactcaaggcaccttggtcgatgccaccatcattgaggcacccagctcgaccaagaacaaagagcagcaacgcgatccggagatgcatcagaccaagaaaggcaatcagtggcactttggcatgaaggcccacattggtgtcgatgccaagagtggcctgacccacagcctggtcaccaccgcggccaacgagcatgacctcaatcagctgggtaatctgctgcatggagaggagcaatttgtctcagccgatgccggctaccaaggggcgccacagcgcgaggagctggccgaggtggatgtggactggctgatcgccgagcgccccggcaagaaccttgaaacagcatccacgcaagaacaaacggccatcaacatcgaatacatgaaagccagcatccgggccagggtggagcacccatttcgaatcatcaagcgacagttcgtcttcggccggataaggcgtttacgccgcatcaggcatctgagcatgatgcctgatgcggcgctggtcgcgtcttatcaggcctacgactttctccgcatccggcataaacaacgagcttcagctaaacagcccaatcattgcggcacacagcacggcagcaacggcagtttgcgcgcgggcggtaaacgggtcgagggccagattaaactggtcttcccagcgaaattcgaagcgggctttcgacatggcgttatcgcgaatttgcgcgcccggatgccctttcgccaggtcagcggcgtgggcagcaatcttatagcgggtgtggcgaaacacgttggtgcacgcaatgtggtgatcactgatgttaacgaataccgccttgagctggcgcgtaaaatgggtatcacccgtgcggttaacgtcgccaaagaaaatctcaatgacgtgatggcggagttaggcatgaccgaaggttttgatgtcggtctggaaatgtccggtgcgccgccagcgtttcgtaccatgcttgacaccatgaatcacggcggccgtattgcgatgctgggtattccgccgtctgatatgtctatcgactggaccaaagtgatctttaaaggcttgttcattaaaggtatttacggtcgtgagatgtttgaaacctggtacaagatggcggcgctgattcagtctggcctcgatctttcgccgatcattacccatcgtttctctatcgatgatttccagaagggctttgacgctatgcgttcgggccagtccgggaaagttattctgagctgggattaa

SEQ ID NO: 29004 - DNA, 2466 bp, Homo sapiens
  SIMILAR (1174)..(1929): 1001254mologous to Escherichia coli IS5 39.3kDa protein,accession number U70214,Smith-Waterman Score=1305.
atgatgaataacggcggaagcatggacgctgcggcggtcatattaataatagtattcatcagatcctgcacggtattggaaccgagcatcgggataatcatcagcgggatgacgatcaggaactggatccacgctgcgcgcgccggaacgccgttttcgttcagttcgacggttttcttaccaaagatgccttccgggatttcggagaagaaaattttcaccggcgttgcggtccacatcagcagggaaccgaacatcgcggtaaaggacaccagaccgacaagcgattcatcaacgcttccggtagaccaaatacgccgccatgccgtggaatacctgcaccgatccgccggcgctgtatcgcgacatattgatcctgttcgtatgtttatgggcgacacttcgttcctgcttaatgcactggtgctgaatgttggcgactatgtgaatcgctttatgggcatgacgctcaacagttttgccttcgaccgtccggttgagtggatgaataactggacgctcttcttctgggcatggtgggtggcatggtcgccgtttgtcggcttgttcctggcgcgtatctcgcgtgggcgtaccattcgccagttcgtgctgggcacgttgattattccgtttaccttcacgctgttatggctctcggtgttcggcaatagcgcgctgtatgaaatcatccacggcggcgcggcatttgccgaggaagcgatggtccatccggagcgcggcttctacagcctgctggcgcagtatccggcgtttacctttagcgcctccgtcgccaccattactggcctgctgttttatgtgacctcggcggactccggggcgctggtgctggggaatttcacctcgcagcttaaagatatcaacagcgacgcccccggctggctgcgcgtcttctggtcggtggcgattggcctgctgacgctcggcatgctgatgactaacgggatatccgcgctgcaaaacaccacggtgattatggggctgccgttcagctttgtgatcttcttcgtgatggcggggttgtataaatctctgaaggtagaagattaccgccgtgaaagtgccaaccgcgataccgcgccgcgcaaccgcaactcctgcgccacttcttccatttacaatcgagctcggtaccggaagtatcgagcccattggtacaacctgagcgatggcgcgatggaagatgctctgtacgaaatcgcctccatgcgtctgtttgcccggttatccctggatagcgccttgccggaccgcaccaccatcatgaatttccgccacctgctggagcagcatcaactggcccgccaattgttcaagaccatcaatcgctggctggccgaagcaggcgtcatgatgactcaaggcaccttggtcgatgccaccatcattgaggcacccagctcgaccaagaacaaagagcagcaacgcgatccggagatgcatcagaccaagaaaggcaatcagtggcactttggcatgaaggcccacattggtgtcgatgccaagagtggcctgacccacagcctggtcaccaccgcggccaacgagcatgacctcaatcagctgggtaatctgctgcatggagaggagcaatttgtctcagccgatgccggctaccaaggggcgccacagcgcgaggagctggccgaggtggatgtggactggctgatcgccgagcgccccggcaaggtaagaaccttgaaacagcatccacgcaagaacaaaacggccatcaacatcgaatacatgaaagccagcatccgggccagggtggagcacccatttcgcatcatcaagcgacagttcggcttcgtgaaagccagatacaaggggttgctgaaaaacgataaccaactggcgatgttattcacgctggccaacctgtttcgggcggaccaaatgatactttcaccttccatgatacacagatcaaaagctgtaccctgcttgatggctcaagattcctatatagtcttctttgtccgcagattattaattaacactttactatgccaaacacatgcattacagatcccaccgacagtcagagaagggtgtgaacagaacacagcagaaatgtcattgttgcaccagctccatgccaggcgctgggggagattcaatggtgtacaagacctagccctgattcacaaggcccctgacctaatggtgagctggagctacgcgtacaaggcaagagccttaaccttcatcacccccaagtggatggtctccattttccaagctggcagctcaccccctctctctgtgcctctgctgctgcggtccacacacctggaatgccctctgcaccctgcacacggcatcccccctccttcaagcatcgctgctcatctgaaatatggagacaaaaatgccttcctatccacctcacagcgcaggaataagccccaaatagaaaaggtggatgggaaagattga

SEQ ID NO: 29005 - DNA, 1846 bp, Homo sapiens
  SIMILAR (1105)..(548): 891254mologous to Escherichia coli K12 putative isomerase,accession number AE000390,Smith-Waterman Score=863.
cgttttcaatcgcatcaccgaagcgcgggtctacgcggcagaccaattgtttgccaccctcgacgcgacgttgcggcgtattgacgttgcagatgtcggtgaaaccgtacttgcagataccgtagggtttattcgccacctgccgcacgattgacgtatcatttgggtccgcccgaaacaggttggccagcgtgaataacatcgccagttggttatcgtttttcagcaaccccttgtatctggctttcacgaagccgaactgtcgcttgatgatgcgaaatgggtgctccaccctggcccggatgctggctttcatgtattcgatgttgatggccgttttgttcttgcgtggatgctgtttcaaggttcttacctcggccagctcctcgcgctgtggcgccccttggtagccggcatcggctgagacaaattgctcctctccatgcagcagattacccagctgattgaggtcatgctcgttggccgcggtggtgaccaggctgtgggtcaggccactcttggcatcgacaccaatgtgggccttcatgccaaagtgccactgattgcctttcttggtctgatgcatctccggatcgcgttgaattctttcatgcctgcaggtcgttttatcggaaagcggtttcccttctttcgcttccagtttttccagcagttcgccgtcccacaccagatccagcggtttattgctggtgattttggtttccagtagtgacgtgcgcggcgtggcgaagcgcagagtcatttcgacttgcacatcttttgctgtcagtttttgcaccagcgcaccgggaatactgtatgcctccagcgtaaagtcgactttcttgccgtcctgccagacggtcaggcggtcgaaattgctggccataaagttgatgtactcttccgtcagcagcgcaacgcccggaaagccgcccatggtgttagggccgtctggcaacagatgaccatgccaggctccgagatcgaaaaacggattaaaacgctggtgatcgtcgtaatcgtaatccttcatgtactgcggcgcgccagtacggttaatcacgtttttataattgtcggcgttagcggcatgggcggaaaaacagtagaaatattgcatcaggaagatttggtcgctgggatcgtgagaggcatttttcatgtagaagcggctatcaaaagccgtggcgaaacgtccgccgccgtattcgtaccagataccaaactgcatgacagacgtggtttcatcgtcagcgtggtcagggccacgtttggcgtaagtgtaagcgggggaatcagcttcatcttcaggtgactctagaggatcccccaggaatgatctgtggcgctttgcagaagccagtggcgtgggccccggggacagttccttggaggagaactccctggccgagtcacctggagaaacgggcttatcttgggcttcagctcgtgagtcgaggaagggctggggtcctgcaccatcccccggggtgggcatatggtccccagagtccccggctctggctgggcccatagatttgctctctctcccaggctggttggtggaggcatcagagctagcttccgccgcagcctggcacctcaggtgccgaccttctacctgccctacttcctggaggccggcctggaggcggcagccttggtcttcctgctcctgacggcagattgctgtggacgccgccccgtgctgctgctgggcaccatggtcacaggcctggcatccctgctgctcctcgctggggcccagtgtgagcttggggccccgcaggccatacaggagccattgtgtttgggccgacggtctgccacaccagggggccat

SEQ ID NO: 29006 - DNA, 2016 bp, Homo sapiens
  SIMILAR (376)..(1089): 981254mologous to Escherichia coli 100 pct identical to sp:YI5B_ECOLI,accession number AP002527,Smith-Waterman Score=1228.
atgagcagctcctatgagtcctacgatgaagaggaggaggaagggaagagcccgcagccccgacaccagtggccctcagaggaggcctccatgcacctggtgagggaatgcaggatatgtgccttcctgctgcggaaaaagcgtttcgggcagtgggccaagcagctgacggtcatcagggaggaccagctcctgtgttacaaaagctccaaggatcggcagccacatctgaggttggcactggatacctgcagcatcatctacgtgcccaaggacagccggcacaagaggcacgagctgcgtttcacccagggggctaccgaggtcttggtgctggcactgcagagccgagagcaggccgaggagtggctgaagcatctaaaggcttccagcaagcctgacaagaaagcggacgttaaaaggcgtattagtgagatttatcacgagaatagaggccgatacggataccgtagggtaacgctgtctcttcatcgagaagggaaacagattaaccataaagctgttcagcgcctgatgggaaccctctcacttaaagcagcgattaaggtcaagcgataccgctcttacagaggagaggtagggcaaaccgcccctaatgttctccaaagagatttcaaggctacgcggccaaacgagaagtgggttaccgatgttactgaatttgcagtcaatgggcgcaagctgtatttgtctccagtaatagatctcttcaacaacgaagttatttcttacagcctttcggaaagaccagtgatgaacatggttgagaatatgctcgatcaggcattcaaaaagcttaatcctcacgagcatcctgttctgcactctgaccagggatggcagtatcgtatgagaagatatcaaaatatccttaaagaacatggtattaaacaaagcatgtccagaaaaggcaattgtctggataatgctgtggtggagtgtttctttggaaccttaaagtcggagtgtttttatcttgatgagttcagtaatataagcgaactgaaggatgctgttacggaatatattgaatactacaacagcagaagaattagcctgaaattaaaagcccctaatatgtcaaagccaaaatacccttttgaaaagcgccttgaagtcgtgaatcactacttcacaactgatgatggttacaggatcatctcggcacgttttggtgtcccccgaacccaggtcaggacatgggttgccctctatgaaaaacatggagaaaaaggtttaattcccaaacctaaaggcgttagtgctgatccagagttgcgtattaaggtcgtgaaagctgtgatcgagcagcacatgtcccttaatcaggctgctgctcactttatgcttgctggtagtggttctgtagccaggtggctgaaggtctatgaagagcgcggagaagctggtttacgcgcgctcaagattggcaccaaaagaaacattgcaatatcagttgatccagaaaaagcggcatcagcattggagctgtcaaaagaccgacgcattgaggatcttgaaaggcaagttcgatttcttgaaacgcggcttatgtatctaaaaaagctgaaagccttagctcatcccacgaaaaaggctgcggagataccgcgcagtacgttttattatcatctaaaggctctcagcaagcctgacaagtatgcggacgttaaaaagcgtattagtgagatttatcacgagaatagaggccgatacggataccgtagggtaacgctgtctcttcatcgagaagggaaacagattaaccataaagctgttcagcgcctgatgggaaccctctcacttaaagcagcgattaaggtcaagcgataccgctcttacagaggagaggctgggaagtctgagatcaaggtggcagccaatttggtgtctggtgagggcctgtttcctggtgatgaccatctttttgctccctggggtctctttcctaagggcactaatcctacccatgagggctccaccctcgtgacctaa

SEQ ID NO: 29007 - DNA, 2201 bp, Homo sapiens
  SIMILAR (1)..(888): 1001254mologous to Cloning vector pZC320 SopA,accession number U26464,Smith-Waterman Score=1548.
atgaaactcatggaaacacttaaccagtgcataaacgctggtcatgaaatgacgaaggctatcgccattgcacagtttaatgatgacagcccggaagcgaggaaaataacccggcgctggagaataggtgaagcagcggatttagttggggtttcttctcaggctatcagagatgccgagaaagcagggcgactaccgcacccggatatggaaattcgaggacgggttgagcaacgtgttggttatacaattgaacaaattaatcatatgcgtgatgtgtttggtacgcgattgcgacgtgctgaagacgtatttccaccggtgatcggggttgctgcccataaaggtggcgtttacaaaacctcagtttctgttcatcttgctcaggatctggctctgaaggggctacgtgttttgctcgtggaaggtaacgacccccagggaacagcctcaatgtatcacggatgggtaccagatcttcatattcatgcagaagacactctcctgcctttctatcttggggaaaaggacgatgtcacttatgcaataaagcccacttgctggccggggcttgacattattccttcctgtctggctctgcaccgtattgaaactgagttaatgggcaaatttgatgaaggtaaactgcccaccgatccacacctgatgctccgactggccattgaaactgttgctcatgactatgatgtcatagttattgacagcgcgcctaacctgggtatcggcacgattaatgtcgtatgtgctgctgatgtgctgattgttcccacgcctgctgagttgtttgactacacctccgcactgcagtttttcgatatgcttcgtgatctgctcaagaacgttgatcttaaagggttcgagcctgatagtttgactcttttcattggcatagccatcctatgctgtgctgtgaccgtggccaacacaaggaaaatccacaaagtcgtggacccatttcatgccagtgaattcagcagtaagcgccgtcagaccagaaaagagattttcttgtcccgcatggagcagattctgccatggcaaaacatggtggaagtcatcgagccgttttaccccaaggctggtaatggccggcgaccttatccgctgggaaccatgctacgcattcactgcatgcagcattggtacaacctgagcgatggcgcgattggagattgtctgtacgaaatcgcctccatgcgtctgtttgcccggttatccctggatagcgccttgccggaccgcaccaccatcatgaatttccgccacctgctggagcagcatcaactggcccgccaattgttcaagaccatcaatcgctggctggccgaagacaggcgtcatgatgactcaaggcaaccttggtcgatgccaccatcattgaggcacccagctcgaccaagaacaaagagcagcaacgcgatccggagatgcatcagaccaagaaaggcaatcagtggcactttggcatgaaggcccacattggtgtcgatgccaagagtggcctgacccacagcctggtcaccaccgcggccaacgagcatgacctcaatcagctgggtaatctgcttcatggagagaagcaatttgtctcagccgatgccggctaccaaggagcgccacagcgccgaggagcttgccgaggtggatgtggactggctgatcgccgagcgccccggcaaggtaagaaccttgaagcagcatccacgcaagaacaaaccgcccatcaacatcgaatacatgaaagccagcatcccgggccaggggtggagcacccatttcgcatcatcaagcgacagttcggcttcgtgatagccagatacaaggggttgctgaaaaacgataaccaactggcgatgttattcacgctggccaacctgtttcgggcggaccaaatgataccattggcatcaactgttgagtatggtgagacagttgatggtgttgtcctggaaaaagatatccagctggtttatgggaccgccaataatacgaaaatcaatcctggcggagaacagcatataaaagaatttggtgtaagtaataatactgaaattaacggagggtatcagtacattgaaatgaatggcgccgcagaatactcagtattaaatgacggttatcaaattgttcaaatgggtggcgcggcaaaccagactacgctcaataatggtgtgctacag

SEQ ID NO: 29008 - DNA, 1029 bp, Homo sapiens
  SIMILAR (61)..(846): 931254mologous to Escherichia coli 100 pct identical to sp:YI5B_ECOLI,accession number AP002527,Smith-Waterman Score=1258.
catttcagcggtggctaccgcaacggcatcgtcaaaacgctgatgcgcgggcagcggcgcttctggcagcatttgctgcaagcggtcgttgtccagggtagccgacataattcgactctgaggatcccaaagcgtattagtgagatttatcacgagaatagaggccgatacggataccgtagggtaacgctgtctcttcatcgagaagggaaacagattaaccataaagctgttcagcgcctgatgggaaccctctcacttaaagcagcgattaaggtcaagcgataccgctcttacagaggagaggtagggcaaaccgcccctaatgttctccaaagagatttcaaggctacgcggccaaacgagaagtgggttaccgatgttactgaatttgcagtcaatgggcgcaagctgtatttgtctccagtaatagatctcttcaacaacgaagttatttcttacagcctttcggaaagaccagtgatgaacatggttgagaatatgctcgatcaggcattcaaaaagcttaatcctcacgagcatcctgttctgcactctgaccagggatggcagtatcgtatgagaagatatcaaaatatccttaaagaacatggtattaaacaaagcatgtccagaaaaggcaattgtctggataatgctgtggtggagtgtttctttggaaccttaaagtcggagtgtttttatcttgatgagttcagtaatataagcgaactgaaggatgctgttacggaatatattgaatactacaacagcagaagaattagcctgaaattaaaaggtctgactccaattgaatatcggaatcagacctatatgcctcgtgtttaactgtccaactttttggggtcagtacacagcagggcgttcagctcggcctcgcccagccaggcaatcaacaccttgccgatggcggtggcgtgcaccggcaggcggcggccgatgcgtgaataggcgatggcggccagcttgccttcaatcttctcgatatagaccccttcacgcccgtcc

SEQ ID NO: 29009 - DNA, 3973 bp, Homo sapiens
  SIMILAR (46)..(723): 881254mologous to Escherichia coli similar to glucose transport proteins,accession number L10328,Smith-Waterman Score= 984.
atggctgaagccagtgtttttcaaactgtggatccctggaggcccggatttgccaccatccccgattttctgaaggaacgttatgataaaacgacgcgtattatcatcgacttctgcttcttaattgccaccggcgtctgctttctgccgattgttctctactccggcgcgttggcgctcaacagcctgtttcacgtcggggaatcgctacagatttctcacggtgcggctatctggctactggtaattttgcttggtctggcgggaattttgtatgcggtgatcggcggactgcgcgcaatggcagtggcggactccatcaacggtattgggctggttatcggcgggttgatggtgccggtatttggcctaatcgcgatgggcaagggcagctttatgcagggcattgagcaactcaccaccgttcacgccgagaaattaaactcaatcggtggcccgaccgatcccttgccgattggcgcggcatttaccggtttgattctggtgaacaccttttactggtgtacaaatcagggcatcgtgcaacgcacgctggcgtcaaaaagcctggcggaagggcaaaagggggcgctgttaacggcggtgctgaaaatgctcgacccgctggggctgaaacccgatctgctggcgtataataccgcgctacgtgcactcatcccacagcggctgatcgctttcgatgacgcggtacgtagcacgttgaaagaggaggaaaaactggtcaactccagcgactggggctacgacgctcaggccttttgcccgctggcgaccggagtagtgaaccaaatcggcggtaaagagcgttatttctttggcaatattttgtggcagacacgggcgttgatggaccgcgcgatcggtcataagctggcgaaaggccgcccggagcgcgaatatttacagactggcgatgcggtggatagctggaaagtgattgtcgttgaaccggaaaaacaacttacgttgttatttggcatgaaagcgccggggctgggacgactgtgttttagcctggaagataaaggcgactatcgtactatcgatgtccgcgctttctggcatccgcacggcccacattggtgtcgatgccaagagtggcctgacccacagcctggtcaccaccgcggccaacgagcatgacctcaatcagctgggtaatctgctgcatggagaggagcaatttgactcagcctgatgccggctaccaaggggcgccacagcgcgaggagctggccgaggtggatgtggactggctgatcgccgagcgccccggcaaggtaagaaccttgaaacagcatccacgcaagaacaaaacggtcatcaacatcgaatacatgaaagccagcatccgggccaggggggagcacccatttctcatcattaagcgacagttcgggtttcgtgaaagccagatacaagggggttgctggaaaacgataaccaactggcgatgttattcacgctggccaacctgtttcgggcggaccaaatgatacgtcacctgcatagtagcccatcagtcggcatcagcttcgatctcgccttgctgattgacgtggggataaggcaggcctttgcgttttgcgactttcgccagcaccggatagccgccttcaaacaacaggcgttgttgctctgcttccggcaacatgctgttttcacgcagggccaatgcttcctgcgtgatgcccgttttctcctgtcccatcaaaatgcaggtcgggcgagtgtaatcaatttcgcggaaatcgacagcgttatcagaaagatgggttgccagaatctgcatgccctggcctttgagatgagcgacggcatcgccaatggtgcggtgtgttttcacctgtacccagctgttactacccgccgctgccgaagccatggtgcgcatgcggctaccaggccagacggcgtgaacttcatgtacgccaacggcatctgcgttatcaatgggacgggcacgcggcttggtgatccgatcgaggcgcaggcgctgatcgccacctacggccgtgatcgtgatcctggccggccgttgtggttggggtcggtcaagtcgaacatcggtcatacgcaagcggcggcgggtgtggctggtgtgatcaagatggtgatggcgatgcggcacgggcagctgccacgcacgttgcacgtggaatcgccgtcgccggaggtggattggtcggcggggacggttcaactccttacggagaacacgccctggcccaggagtggtcgtgttcgtcgggtgggggtgtcgtcgttcgggatcagtggtactaacgcgcacgtcatcctcgaacagcccccgggagtgccgagtcagtctgcggggccgggttcgggttctgtcgtggatgttccggtggtgccgtggatggtgtcgggcaaaacacccgaagcgctatccgcgcaggcaacggcgttgatgacctatctggacgagcgacctgatgtctcctcgctggatgttgggtactcgctggcgttgacacggtcggcgctggatgagcgagcggtggtgctggggtcggaccgtgaaacgttgttgtgcggtgtgaaagcgctgtctgccggtcatgaggcttctgggtgtggtgaccggatctgtggagggctggggggccgcatcgggtttgtgttttccggtcaaggtggtcaatggctggggatgggcccggggctttaccgggcttttccggtgttccctggtgcctttgacgaagctttggccgagctggtatttggcatgatcattactatcggccagtctatcgtgtatgtgatgaccgggatgtatggggacccttctgaaatgggtgctggaatttgcctgctaatcaccattcagctctttgttgctggcttaattgtcctacttttggatgaactcctgcaaaaaggatatggccttggctctggtatttctctcttcattgcaactaacatctgtgaaaccatcgtatggaaggcattcagccccactactgtcaacactggccgagaatctatcaaggctcggcacaaaggtactctcccaggaggccttcctgaattcttctgtgaggcagactacttcccgagctgccccggcccttctccggccaagtctctccagaaactcatcccattcgttctcagatggaaggggacccacacccacgacaagcctccgggtttgcttaatgactcagacagcgagggtgctcgcactgacgtgtctctcggcggagctgctgtgcagtggaacgcgctgggccgcgggcagcgtcgcctcacgcggagcagagctgagctgaagcgggacccggagcccgagcagccgccgccatggcaaattcagtttaaggagaaagtgctgtggaccgctatcaccctctttatcttcttagtgtgctgccagattcccctgtttgggatcatgtcttcagattcagctgaccctttctattggatgagagtgattctagcctctaacagaggcacattgatggagctagggatctctcctattgtcacgtctggccttataatgcaactcttggctggcgccaagataattgaagttggtgacaccccaaaagaccgagctctcttcaacggagcccaaaatcaggcaccgtgtatgaaatctaacaatgcgctcatcgtcatcctcggcaccgtcaccctggatgctgtaggcataggcttggttatgccggtactgccgggcctcttgcgggatatcgtccattccgacagcatcgccagtcactatggcgtgctgctagcgctatatgcgttgatgcaatttctatgcgcacccgttctcggagcactgtccgaccgctttggccgccgcccagtcctgctcgcttcgctacttggagccactatcgactacgcgatcatggcgaccacacccgtcctgtggatctacccactagtcaattcaccatcttgttga

SEQ ID NO: 29010 - DNA, 1582 bp, Homo sapiens
  SIMILAR (517)..(1170): 941254mologous to Escherichia coli 100 pct identical to sp:YI5B_ECOLI,accession number AP002527,Smith-Waterman Score=1069.
atgtcaaagccaaaatacccttttgaaaagcgccttgaagtcgtgaatcactacttcacaactgatgatggttacaggatcatctcggcacgttttggtgtcccccgaacccaggtcaggacatgggttgccctctatgaaaaacatggagaaaaaggtttaattcccaaacctaaaggcgttagtgctgatccagagttgcgtattaaggtcgtgaaagctgtgatcgagcagcacatgtcccttaatcaggctgctgctcactttatgcttgctggtagtggttctgtagccaggtggctgaaggtctatgaagagcgcggagaagctggtttacgcgcgctcaagattggcaccaaaagaaacattgcaatatcagttgatccagaaaaagcggcatcagcattggagctgtcaaaagaccgacgcattgaggatcttgaaaggcaagttcgatttcttgaaacgcggcttatgtatctaaaaaagctgaaagccttagctcatcccacgaaaaaggctgcggagataccgcgcagtacgttttattatcatcttaaggctctcagcaagcctgacaagtatgcggacgttaaaaagcgtattagtgagatttatcacgagaatagaggccgatacggataccgtagggtaacgctgtctcttcatcgagaagggaaacagattaaccataaagctgttcagcgcctgatgggaaccctctcacttaaagcagcgattaaggtcaagcgataccgctcttacagaggagaggtagggcaaaccgcccctaatgttctccaaagagatttcaaggctacgcggccaaacgagaagtgggttaccgatgttactgaatttgcagtcaatgggcgcaagctgtatttgtctccagtaatagatctcttcaacaacgaagttatttcttacagcctttcggaaagaccagtgatgaacatggttgagaatatgctcgatcaggcattcaaaaagcttaatcctcacgagcatcctgttctgcactctgaccagggatggcagtatcgtatgagaagatatcaaaatatccttaaagaacatggtattaaacaaagcatgtccagaaaaggcaattgtctggataatgactgtggtggagtgtttatttggaaccttaaagtcggagtgtttttatcttgatgagttcagcaatataagcgaactgaaggatgctgttacggaatatattgaatactacaacagcagaagaattagcctgaaattaaaagacctatatgcctcgtgtttaactgtccaactttttggggtcagtacagtgatggggctgctgattcgcatccttggcagcattttccagaaagccctcaacatcagcaaaatcgaatcttttgttgcggttactactattttcctcgggcaaaatgagatcccggcgatcgttaagcggtttatgatcgctgaatcgcacgaagtgttaccgcatttgtacgggatgggtcactgcgggtcgagaagatggtatgccgaatggcgtcccttgcaccgagttcatgaaccctcgggctccttgccctggccttag

SEQ ID NO: 29011 - DNA, 3177 bp, Homo sapiens
  SIMILAR (2371)..(3126): 991254mologous to Escherichia coli 100 pct identical to sp:YI5B_ECOLI,accession number AP002527,Smith-Waterman Score=1318.
tcatccgtaaataaagatgctccaagatggtgcgaaaatgaaggaagcccataaacgttcccttgggccgggcttttgcacttgggaacccggttctctagccttgggccaccaaccctgtaccaatttgccggcccgccccagaatcccccccggtttccccttgggggaccgtgccgctacatgcaggacaaacggtgttagttcgcctgccagtttgtacagcgtcgggatcatcagcagcaaaccctgcgatgacgtaaacgatgttgaaagggcacccgtctgcaaagcgccatgcacggtagcgatagcacccgcttccgactgcatttcaaccacgcgtggtgtgtctccccaaacgttctttaagccgtttccggcccaggcatcagcctgttctgccatctgtggaacctgaggggtaactttcatatggagatccagcaagatcacgtcgatatccagtctattcgccagatcgatagcgctcgcgccgtcgcccgcttcggcgaccacttcagagccaggatcaagctccagtaactgacgaacaccgcgtcgcataagtggatgatcatccacaatcatcacctgaaaaggtgttgcttcgccgacagtgaattcagcagtaagcgccgtcagaccagaaaagagattttcttgtccccgccatggaagcagattcctgcccatggcaaaaccatggtggaagtcatcgagccgttttacccccaaggctggtaatggccggcgaccttatccgctggaaaccatgctacgcattcactgcatgcagcattggtacaacctgagcgatggcgcgatggaagatgctctgtacgaaatcgcctccatgcgtctgtttgcccggttatccctggatagcgccttgccggaccgcaccaccatcatgaatttccgccacctgctggagcagcatcatctggcccgccaattgttcaagaccatcaatcgcttgctgggccaaaacaggcgtcatgatgactcaaggcaccttggtcgatgccgccatcattgaggcacccagctcgaccaagaacaaagagcagcaacgcgatccggagatgcatcagaccaagaaaggcaatcaagggggcactttggcatgaagggcccacatggtggtcgaaggccaatagggggcaggacccccaagcccgggtcactcaccgcggcccaacgaggcaatgtccttcaatcagatggggtaatcctgctgcatggaagaggaagccaatttgtgttcagcccgatgccggctaaccaaggggcgcccacagccgcgaggaatctggacgagggtggaatgtggagctggcttgatcgaccgagctgccccggccaaggtaagaaccttggaagagcagcatcccacgcaagatcaaaacggccatcaacatcgaatacatgaaagccagcatccgggccagggtggagcacccatttcgcatcatcaagcgacagttcggcttcgtgaaagccagatacaaggggttgttgaaaaacgataaccaactggcgatgttattcacgctggccaacctgtttcgggcggaccaaatgatacacggtcaggcggtcgaaattgctggccataaagttgatgtactcttccgtcagcagcgcaacgcccggaaagccgcccatggtgttagggccgtctggcaacagatgaccatgccaggctccgagatcgaaaaacggattaaaacgctggtgatcgtcgtaatcgtaatccttcatgtactgcggcgcgccagtacggttaatcacgtttttataattgtcggcgttagcggcatgggcggaaaaacttatcagcagagcgcagtacccgtggctgacatgaccacggcacgcactatgtccgttcgtgagccacctcggcaccagatcggcatgctccatcgtccgatgcctacaggtcaccctcgctctcgacatctcaccgctccaacacagcatcgcgtgctggtacacgacatccgcaacgcagagcgagtgtgctccacgcacaccctctcttccgtcactgcgacgtgcgcaccaacgcatccacctgcatcccggccatcgggtcagctctcggagctgtgcactactgcccctcgagagctccgcgccctcactgacggccgacgactctctaatgtcgcactcgcggcggccagtaacaaggcatgctgcgtcgcatcactacgtggccgaatcttcccacaaagcacagcatataacggcctgggccagacctgcacgatgagctccgtcggctacgatcacagtgaatcgctcccatcagcctcagacttgccgatacatgctaccccgtccgcaggcgtaccaggcagggctctcagcaagcctgacaagtatgcggacgttaaaaagcgtattagtgagatttatcacgagaatagaggccgatacggataccgtagggtaacgctgtctcttcatcgagaagggaaacagattaaccataaagctgttcagcgcctgatgggaaccctctcacttaaagcagcgattaaggtcaagcgataccgctcttacagaggagaggtagggcaaaccgcccctaatgttctccaaagagatttcaaggctacgcggccaaacgagaagtgggttaccgatgttactgaatttgcagtcaatgggcgcaagctgtatttgtctccagtaatagatctcttcaacaacgaagttatttcttacagcctttcggaaagaccagtgatgaacatggttgagaatatgctcgatcaggcattcaaaaagcttaatcctcacgagcatcctgttctgcactctgaccagggatggcagtatcgtatgagaagatatcaaaatatccttaaagaacatggtattaaacaaagcatgtccagaaaaggcaattgtctggataatgctgtggtggagtgtttctttggaaccttaaagtcggagtgtttttatcttgatgagttcagtaatataagcgaactgaaggatgctgttacggaatatattgaatactacaacagcagaagaattagcctgaaattaaaaggtctgactccaattgaatatcggaatcagacctatatgcctcgtgttaaactgtccaactttttggggtcagtactacagggaccatgcaggcagtga

SEQ ID NO: 29012 - DNA, 1436 bp, Homo sapiens
  SIMILAR (880)..(1266): 1001254mologous to Escherichia coli aspartate transcarbamoylase regulatory chain (pyrI),accession number K01472,Smith-Waterman Score=660.
  misc_feature (1)...(1436): n = a,t,c or g
gcgtctcctcgcgcgcgtgctcacgctgggcacgggcctcatcgccgtctctgcgctcgaatgcccccacgactatactcgcgatttctatgtcgtgtgccacacgtctcgctcgctcaacacgggactgtggggtccgcgcgcctaaaacattagaatctctgtatgactttctgccgctgccaatgggcacggactctccgggtacgcaggcttaagatacgcatttcgcgggtttaatcacggtatccaaaagtggatagagttcaaacaaccagcagcctgttcaatgatgatcccgtacttcatgcaacatggctgtactatcaggaaggcaaaagccagactgaagttgcagctatcatgggggtgtcccgcgtcacggttgtcaaatacctgcaaacagcccgggaaaatggactggttcatatcaacctggatgtgaatgtctttggctctatcgacgctgctttgcaaattcgcgataaattcaatctccagagagtgatcatcgtgccggatggcgaacatgccggaaaacgtgatgatacaaagctgatgcggactcgcctttcacgtgccggtggcatgtatctgaatcangtcgtgatggcggaagtagacatcctgtacatgacccgcgtgcaaaaagagcgtctggacccgtccgagtacgccaacgtgaaagcgcagtttgttcttcgcgccagcgatctccacaacgccaaagccaatatgaaagtgctgcatccgctgccgcgtgttgatgagattgcgacggatgttgataaaacgccacacgcctggtacttccagcaggcaggcaacgggattttcgctcgccaggcgttactggcactggttctgaatcgcgatctgatcggttttaagctgttgagtctgttcaagctgaccgaaacggatcagcgcatcaccattggtctgaacctgccttctggcgagatgggccgcaaagatctgatcaaaatcgaaaatacctttttgagtgaagatcaagtagatcaactggcattgtatgcgccgcaagccacggttaaccgtatcgacaactatgaagtggtgggtaaatcgcgcccaagtctgccggagcgcatcgacaatgtgctggtctgcccgaacagcaactgtatcagccatgccgaaccggtttcatccagctttgccgtgcgaaaacgcgccaatgatatcgcgctcaaatgcaaatactgtgaaaaagagttttcccataatgtggtgctggccaattaattgcggttggtaataaaagtctggctccctataatgagccagactttttaccgctgtaataaaggagaaatcatgagcaaaactatcgcgacggaaaatgcaccggcagctatcggtccttacgtacagggcgttgatctgggcaatatgatcatcacctccggtca

SEQ ID NO: 29013 - DNA, 2883 bp, Homo sapiens
  SIMILAR (1063)..(1767): 951254mologous to Escherichia coli phnM,accession number D90227,Smith-Waterman Score=1138.
tcacgctgtatgccagccgggattttgattggcgtggtggtactgattttttccctgcaacacgagctgctgccagcctatgccttgttgatgctgattggcgtgatggggggcttttttgtcgttccgctcaatgcgttgcttggcgaaaacagcgccatgttgttgatgctgggcatttactcgctggcggtaatgataggcatcccggtcgtgcccattggcattggcttcggtgcgctgtttgcgctggcaataacggcgctgatgcaccgcttcaatttcagctaatacgtcttcgcttaactccagatgcaaactttcgatgttagttttcagctgatccatcgtggttgcgcccagcagagtgctggcaacaaacggttgacggcgtacaaacgcgagcgccatctgagcagggtccaggccatgacgtctggcgatatcaacatacgccgcgacggctttttgcgtttgctcaccgctatagcgggtgaaccgactaaagagcgtattacgtgcgccagcgggttttgcaccattgagatatttcccggtcagcgtgccgaaacccaggcacgaataggccagcagttcgaccccttcatactggctgacttctgccagacctacttcaaaactgcggtttaacagactgtaagggttctgaatggtgacaatacgcggcagatcgtgtttgtccgccagatgcaggtagcgcattacgccaaatgcagtttcgttcgacacgccgatataacgaatttttcccgcgcgttggtactctgccagtgcgtccagcgtatccagcagcgaaaccgcaggcgcagaatccgtccagctataaccgagtttgccgaagcagttgtcgggcgctgcggccagtgcacctgataaagatcgagtaatcagtctggtaccgagcggtgtctttcccgggtttgccacccgtttggaatattcccccgccccatgtgcttcctcccattgcgaggcatccctcgccttatggggcaccggctcaccccgtatggaagccgtgcaatggccacgggcccacggggccatcgcctggaaaatctgtagaagatgatcaaccccatcgaagatacgcagaaacgcggcgtcaaccgcgccgagcaccgtctgcatctgcgctgcgaactgccgcatcacaccacgctgccgctgtttgaaaaactggtgcagcgcgagccggtgacgctggtgtcgctgatggaccactcgccgggccagcgccagttcgccaaccgcgagaagtatcgcgaatattatcagggcaaatactccctcactgatgcgcagatgcagcagtacgaagaagagcaactggcgctcgccgcacgctggtcgcagccgaatcgcgaatccatcgccgccctgtgccgcgcgcgaaaaattgcgcttgccagccacgatgacgccacccacgcccacgttgctgaatctcaccagcttggcagcgtgatcgccgaatttcccaccacgttcgaagcggcggaagcctcgcgcaagcatggcatgaacgtgctgatgggcgcgccgaatattgtgcgcggcggctcgcactccggcaacgtggcggccagtgaactggcgcagcttggcctgctggatatcctctcttccgactactaccccgccagcctgctcgatgcggcatttcgcgtcgccgatgaccagagcaaccgctttacgctgccgcaggcggtgaagctggtgatggggaccaaagcagtttccatgcccaaaggtgtggctgtcgtcatcatcaacagtaacttcaaacgtacactggttggcagcgaatacaacacccgtcgtgaacagtgcgaaaccggtgcgcgtttcttccagcagccagccctgcgtgatgtcaccattgaagagttcaacgctgttgcgcatgaactggacccgatcgtggcaaaacgcgtgcgtcatatactgactgaaaacgcccgcaccgttgaagctgccagcgcgctggagcaaggcgacctgaaacgtatgggcgagttgatggcggagtctcatgcctctatgcgcgatgatttcgaaatcaccgtgccgcaaattgacactctggtagaaatcgtcaaagctgtgattggcgacaaaggtggcgtacgcatgaccggcggcggatttggcggctgtatcgtcgcgctgatcccggaagagctggtgcctgccgtacagcaagctgtcgcgactgttaactttgcgtaacaacgcagggatggtagtcacgctgatggactggggggatcctctagagtgaccacagcatgcagctgcctgccctttgtacgggtgtgggcgtgtgtgtgtgcggggtgtcatacgctcagcgaaggcgcagagatccatctccctgcggacagtcgcctgacgccctctgcccgggagttgctggaaagccgccatctgcgcatcaagtttattgacgagcagggccgcctgtttgttgacgatgaacagcagcagccgcagcccgttcatgggctgaccagtagcgatgaacatccgcaggcgtgctgcgaactgtgtcgccagccggtggcaaaaaagccggatacgctgactcacctgtcggcggaaaaaatggtcgccaaaagcgatccgcgtctgggttttcgcgcggttctcgacagcaccattgcgctggcagtgtggctgcaaattgaactggcggaaccgtggcagccgtggctggcggatatccgttcgcgtcttggcaacattatgcgcgccgatgcgctgggggaaccgctgggctgccaggcgattgtcgggctttctgacgaagatctgcatcggctttctcatcagccgctgcgctatctcgaccacgatcat

SEQ ID NO: 29014 - DNA, 2415 bp, Homo sapiens; identical to SEQ ID NO: 28791
  SIMILAR (757)..(1323): 861254mologous to Escherichia coli ORFT,accession number X73295,Smith-Waterman Score=830.

SEQ ID NO: 29015 - DNA, 570 bp, Homo sapiens
  SIMILAR (568)..(545): 1001254mologous to Escherichia coli Sensor protein copS (EC 2.7.3.-),accession number D90699,Smith-Waterman Score=40.
tttcgaggtaatattctggatttgacggctgacgctgcggatcggggcgggacctttatgtaccgccaacagtacgattaagacgatcaggatgctgattaccgatgcggtcataataagtttattcatcaaatcatttatgtaatgaagatgaaaatcgatcgaaagcgcgatgtagagcgtataaatcggtttgccgtccaccaacgggccaaccggcaagttaatcatccgccagttgctgtgttccatatgcccgtgaccgtggcctggcatcatcatcgtcgggccggaaaggagatacacctcgccaccctgagcgtctttatcgggtatggcgtcacgcgtaaactcgcggatatccggcgcaccgggggagtgatacaccgttttaccctgactatctgacagggaaatcaacacattggaataaccactgacgatatcttccagcgtcattaagcgtcgggcttgcgtttcgtcagggtgatttagtacccgttcaaggctggcgctaatctcttttaaatcattaatataaagactcggcaaaatgaacttttactgagt

SEQ ID NO: 29016 - DNA, 1953 bp, Homo sapiens
  SIMILAR (414)..(4): 961254mologous to Escherichia coli No definition line found,accession number U00039,Smith-Waterman Score=680.
ttaattcagcgccgttaatgcgactttaaccacaatttttcgtatctcagaggctgtttgcataatacaacctggtcggtgaacatcctgcggaaagaaaattgcgtagctgcccggtatcatttctataaatgattcatgttcactgtcgtgataaaaaataatattgcgctgctctaatagtgattcgctgactttattatttcccgtatcaatagcaatgccgattttctcttcgccccacgccagaaactgaatatcgatataccgacgatgcacttccggacggtttaccaccgcttcgcgtgtggttaaatcgataatttgcgtataaatatttttgccgtcgatttcgacaacgcccggcatcagggcgttgaaatcggtagcgcgcagaaaatcgacgcggcgtttctgccagcaggtaataatcatgccgtgtgagggtgtgtgagggtcattaatgacacgaatacgggaaataaactcgtctggtgacaacgcagcgcaatcctgattctcatgatgcgacactgcgcaagccacttgacaggtacggcaaccgatacatttcgtcgcatccgcaataataaaccggttcatgatcactcctttgcactgtttcagacgtgatgtcgaaagcgaaatcgacacggcgtacggcacccgcccatgaatatcaaacaccggaacagcaatacaggagacgccgagttcgttttcttctctgtccatcgcccgctccgctttcacgaatgtgcgccagttcgtcgaacatcgcgggcagcatttcagcaggtcattaaacaccacaggttctatccagacctgaatattctccccacgatcggctatccgcctgatgaccaccgagtgcgcggaagcactgtcactgatgacccgcgatacctgcgcaggcgttgttgtggcagattttcgcgctgcaataatatccggcgcggcgttcttcagtcgggtgttcatcgccaccagctgctgcaatattgtctcctgttgctcaatccgttcgctcaacggctgccagatgaggacgtaatatccgacgctaaacaggaacaccaccgcctctttctgtaacgcgtcctggtgcacaacattatcggttgccagtacactacgcagtttgtcgaaactggcaaagttcgcggcccgtagctggaggtgaagtatctggcgtttttgatcaaaggtaaaaccacgcatttcgatgtcggaaagtgacgctgatttcagggtgctggctatcgtatgtatattggctttaattattttggggggccggagatgagcgtctcggaactgatcggactgctcggcatcaccaagcagtcgctcggccgcgtgctcgacgagctgggcgagcgcggactgctttgaatgcgctcttgatgtcgctagctggaatttgccaaactcaatgccgcgcggcgcatctgccggacgcggagtgaacatctgccattcgccgttaaagtcttcatcaataaacgggctggcggcgcggaagtcgaccacttccgttccgtgtttcggtgcgccgaaacgcacgcggatcttcacttcattagctaaaatcgcccgatcttcatactcaaccagcgcagcaacacgcggtgctgtggctactaagccaccggcggtcaaaccactcttaataaaacgttccgaaagcgcatacataatcaccaccggcaatgcggtcaccagtgaggccgccatcatccgtccccagatgtaatctggcgtactgaacagcgcgttcaggcccaccggtaaggtgaaattgctggcgctggagaggaaaatcgacgcaaacagatagtcgttccacgccaccataaagcagtagacgaacacggatatcagcccggacatcggcaacggcacggtgatgcggaagataatttgcagaccgttgatgccatccatcat

SEQ ID NO: 29017 - DNA, 3159 bp, Homo sapiens; identical to SEQ ID NO: 23534
  SIMILAR (2401)..(3048): 981254mologous to Escherichia coli trkA,accession number X77091,Smith-Waterman Score=1075.

SEQ ID NO: 29018 - DNA, 1827 bp, Homo sapiens
  SIMILAR (365)..(303): 421254mologous to Escherichia coli Formate dehydrogenase, nitrate-inducible, major subunit (EC 1.2.1.2) (Formate dehydrogenase-N a subunit),accession number D90788,Smith-Waterman Score=41.
atggatgcgcgcctgttgtcggtccctggtatcgaagagggcggacgcctgcaactgaaagggccgaacataatgaacggctatctgcgggtggagaagccaggtgtactggaagtgcccaccgccgagaatgttcgcggcgaaatggagcgcggctggtatgacactggcgatattgtgcgttttgacgagcagggctttgtgcagattcagggccgcgcaaaacgctttgccaaaattgcaggcgaaatggtgtcgctggaaatggtggaacaactggcacttggtgtttcgccagataaagtccatgccactgcgattaagagcgatgccagcaaaggcgaggcactggtgcttttcaccacagataacgaactgacgcgcgataagttgcaacagtatgcccgcgagcacggcgtgccggagcttgctgtaccgcgcgatattcgctatctgaaacagatgccattacttggcagcggcaaacctgactttgtcacgttgaaaagctgggggatgaaagcggttatcgtggcgcagtttctctctgcgtttggcgataatgccctactgtttgccactctggcgttactgaaagcgcagttctatccggagtggagccagcccatcctgcaaatggtgtttgtaggtgcttacattctttttgcgccgtttgtcgggcaggtggcggatagcttcgccaaaggccgggtgatgatgtttgccaacggcctgaagctgctgggcgcagccagtatctgctttggtatcaatccgtttctcggctatacactggatgacaagtctgttcctcatgaagagtacgttcacatgatggtaaaacaccacaattaccacgcccagcggttgggcttaaacggggggttgttgcaccaagcccagtttggagcgaacgaccttacaccgaatttagatacctacagcgtgagctatgaaaagccgcacgcttcccgaaggagaaaggcggacaggtatccggggggcggagcctatggaaaaacgccagcaacgcggcctttttacggttcctggccttttgctggccttttgctcacatgttctttcctgcgttatcccctgattctgtggataaccgtattaccgcctttgagtgagctgataccgctcgccgcagccgaacgaccgagcgcagcgagtcagcgcgtaaatatccgccacagaagcggtacgcgtaaaacggggatcgacaacgatcaaggttgcgtcgttgttgtttttcgcttccatcgcccagcggaaaccgacgggatgcgcttcagcagcgttaccgcccatcaccatcacgacgttagcgtttttgatatccacccagtggttggtcatcgcaccgcgaccaaatgttggagcaagacttgctaccgttggtccgtgtcagacgcgcgcctggttgtctaccgccagcatcccgagggagcgggcaaatttctgggtcagcatcccggtttcgttgctggcaccggaggcacacagcataccggtagaaagccaacggtttaccgttacgccctgctcgttcttttcaataaagttagcgtcacggtcagctttcatcagcttcgcaatacgggagaatgcttcttcccagctaatgcgctgccatttgtcagaacctggcgcacgatattccgggtagcgcagacggttttcactgttgacgtaatccagcaaaccggcccctttcgggcacagcgcaccacggcttaccggatgatccgggtcaccttcaatgtgataaatcgcttctctggcgttttttgcgccatcacccaggctatacatcaatag

SEQ ID NO: 29019 - DNA, 2606 bp, Homo sapiens
  SIMILAR (568)..(1491): 981254mologous to Escherichia coli K12 putative resistance proteins,accession number AE000367,Smith-Waterman Score=1509.
atggcacaccaagtacctcatcgcgatgtagtgggcaagaaacaaacgtctatgtcaaatgagtattcgagtgtccaatcaatgcaagtcgcgcaatacggcatcagaataagatacaagaacggagggcaaatatgttttagacgcaaggcgctagtttatatagtcaacaaacagcatgaagtgcatgcctctatgaactggcaggatgttagcggtaaatctgccgtacctgtgaagtggcttgcgcagtgtcgcatcatgagaatcaggattgcgctgcgttgtcaccagacgagtttatttcccctgtatgctggcttgcccgtttggtgcgatggaggtgtttcttcgcgcaaaaagccagatgaagtccaggccactgcgattaagagcgatgccagcaaaggcgaggcactggtgcttttcaccacagatcacgaactgacgcgcgataagttgcaacagtatgcccgcgagcacggcgtgccggagcttgctgtaccgcgcgatattcgctatctgatacagatgccattacttggcagcggccaacctgactttgtcacgttgaaaagctgggggatgaaagcggttatcgtggcgcagtttctctctgcgtttggcgataatgccctactgtttgccactctggcgttactgaaagcgcagttctatccggagtggagccagcccatcctgcaaatggtgtttgtaggtgcttacattctttttgcgccgtttgtcgggcaggtggcggatagcttcgccaaaggccgggtgatgatgtttgccaacggcctgaagctgctgggcgcagccagtatctgctttggtatcaatccgtttctcggctatacgctggtgggtgttggtgctgcagcctattcaccggcgaaatacggtattctcggcgaattaaccacgggtagtaagttagtgaaagctaacggtttaatggaagcttctaccatagcggcgattttgctcggttccgtagccggtggtgtgctggcttactggcatgtcctcgtcgccctggccgcatgcgcactggcctacggtggtgcggtcgttgccaatatctacattcccaaactggcggcggcgcgtccggggcagtcctggaatctcatcaacatgacccgcagtttcctgaatgcctgcacctcgctatggcgcaatggtgaaacgcgtttttcgctggtgggcaccagtttattctggggagcgggtgtcacgctgcgtttcctgttggtgctgtgggtaccggtggcgctgggcattaccgataacgctacgcccacctatctcaacgcgatggtagcgattggtatcgtggttggcgcaggtgcggcagcgaagttagttacgctggaaaccgtgtcacgctgtatgccagccgggattttgattggcgtggtggtactgattttttacctgcaacacgagctgctgccagcctatgccttgttgatgctgattggcgtcttctggctgcgcgactggctgagggcgatttcggtttgcgttatgagattcgtaattgaaattggactggcgggtaaagacatcctcaatacgctcgatcatatggttgaacgacagtaccagctgttccagctcaatgggcacggtctgcgggtcgaggcgaacgtcgagatctttcgaggtaatattctggatttgacggctgacgctgcggatcggcgcgtgacctttatgtaccgccaacagtacgataaagacgatcaggatgctgattaccgatgcggtcataataagtttattcatcaaatcatttatgtaatgaagatgaaaatcgatcgaaagcgcgatgtagagcgtataaatcggtttgccgtccaccaacgggccaaccggcaagttagccacttgactgttctgcgcgaagaccgatgacgctcccacactcaaaagcaacgcgacaatagtttggtttaatccattgttttgcccgccttgatgagagtggttttcaccggaaaataatccgcgccgagatactgttccgactggcgaatttgcccttcgctgtcgatccaatagcggttatgccagcgcgcctggtcggtggagacttcttcgtccagcacgcgaaccggggtttcatcgctgccgactttgacggtatcggtgccatcccatttgaagactgagcgtgcggtggcgtagcgtacctgctggtactcggtccagcccatcgtgcgcgtccagcttgcgccatcaacgatttgtgcgggtttaatcagcgggtcggcagcaaggttattcacttcaatcaggttgtcgccgccgagcagagtcttcaccagacggccatgttgggtaacgagagtagcctgatcctgagtgacccattttttgtgtccgtcttcaacgaaagccatcaccacaaataactgcggcccgccattaaactgcatgtactggctggccgtaggcatatttttgaatatcatcattccgcagctgtacacctggtccgcgttggcatcagaaagcacaatatcagcgctgcggttcatggcgtcaaaatcagctacgctggtaccgccaaatttggagacaacaatttcagacat

SEQ ID NO: 29020 - DNA, 1743 bp, Homo sapiens
  SIMILAR (1218)..(4): 991254mologous to Escherichia coli formate dehydrogenase-O alpha subunit,accession number L19201,Smith-Waterman Score=2203.
ctagccacggttggaggagactttcacggtatcgccctgggcaatgccaagtttattcgccagcgactccccgatttccacaaactgctctggctgcaaaatcgcgttcaacagcgcgtgtttggtccagtagtggaagtgctcggtcagacgataggtggttccgacatacgggaacttatcggctttacccaatgcttcggcgtcgtctttaaagatacgtgcagccgggttcgagataacgtttggatgcagcgggttagttcccagcggcgtttcaaacggctcgtagtgttccgggaacggaccttccgccatcttatcgagggcaaacagacgccccatgccttcctgctgcatgataaacggcccgacgccgctacccggaggcgctgcgctgtagtccggaatatcccagccggtccacttagtgccgtcccatttcagcaactgacgcttcggatcccacgggttaccctgcggatctgcggaggcgcggttatacagaatgcggcggttaagcggccatgcccatgcccagcccagcgtgttaccgaggccagacggatcggcgttatcacggcgtgccatctggttgccttccggcgtccagctaccggcgaaaatccagcagccacaggaggttgtaccgtcatcgcgcaattgggcgaacgaactaagttgttggcctttcttgacgattaccgcaccggttgccggatcggtaatatcggccagcgccttaccgttgctctccatcgccacttcttctgaagatggctcatgcggaatggcgtagttccatgtcatgttcagcacctggtccgggttcgcgccaccctgttcggcatacatcttgcgcaagcgcaggaagataccggagaggatctcgccgtcagtcagcgcaatccccggggcgtccgcacctttccagtgccactgtaaccagcgacctgagttaacgatagaaccgttctcttccgcgaagcaggtcgatggcagacggaacacttcggtctggatcttcgacgagtcaacttcgttcagctcaccgtggttctgccagaagttagaggtttcagtgttcagtgggtcgatggtgacgaggaacttcagtttcgacagacaaccgatcactttgtttttgttcgggaatgaggcaacagggttaaagccctggcagatatagccattgaccttggcctctttcatcatttctgtactttctgtgctctcttgtttcatattgtctttactgcgttccgtactgccgcctactggaacacggttataatatctggctaccgcttgtgttgcagaccaccgcgtaacctgccacggccgttccttcgttcgaagagtcgatgaacggtgctgcaccatgctgacaagccaaatctgtatcatggcttgccggagaacccggaaatcagcgaaaccgtgaaattctggaaaggcatctggaaaccgctcgcggctgttggctttgcggctacctttgcggccagtatcttccactacgtgggtgtcggtccgaaccgtgcggatgaggaagagaataatcactggatcaccgccttctgcttcatcctggcggcggtgagcgggctgggctttttgttcccgtccttcaactggttgatgcaaatcatgggcacaccgcagctggcgcgaattctgcacccgtttgtcggcgtggttatgtttgcctcgttcatcatcatgtttttccgttactggcat

SEQ ID NO: 29021 - DNA, 567 bp, Homo sapiens
  SIMILAR (303)..(4): 781254mologous to Escherichia coli ribosomal protein L2 (rplB) (aa 1-273),accession number X02613,Smith-Waterman Score=382.
ctaagctttcaggcctgtaggggccaggatgtaacggcgttcaccgtctttgtacagaaccagcgcgatgttcgcggaacggttcggatcgtactcaagacgttcaacaactgccgggataccgtctttgttgcgtttgaagtcaacaatacggtaagcctgcttgtggccaccaccgatatgacgagtggtgatacggccattgttgttacgaccaccggatttgtcagcgccgccaacgaagtccagattctggccttctttcagggtgacgtaagcttttttccagtcgctacgacgaccgatacgctgtccgtgacgtttaactttccctttaactaccagggtgttaacgacttcgacttcgacttcaaacagtttctgcacagcagctttgatttctgctttggtcgcgtctttagcaactttgagtaaagtcacacactggggcatgttagggggtgggaggcgacggtggctcccatcccccggcctggtccgcatcccgtcctcggactcatcctcggagccgctgctgctgtagcccaccaggggcgccgcgctcat

SEQ ID NO: 29022 - DNA, 1743 bp, Homo sapiens; identical to SEQ ID NO: 15992
  SIMILAR (1242)..(1105): 1001254mologous to Escherichia coli yejR,accession number U00008,Smith-Waterman Score=233.

SEQ ID NO: 29023 - DNA, 2571 bp, Homo sapiens
  SIMILAR (1995)..(1372): 991254mologous to Escherichia coli ferrous iron transport protein B,accession number X71063,Smith-Waterman Score=1069.
ttacgcgcgacaatcattcatggtgaaaaaatcgcctttaaaatcgcttttccccgtgccccacaggtcgcgcagcacctgaacatattcggtgagatagtcgtaacgacgggagaaatagtcatcgccaggccagatacccatctgctcatactcgggcttttgccagccagtcacgaggttgacgccaaaacgcccgccagagatggagtcgatggttgcggccatacgggcgacgattgccggaggtaacgttaaggtggcagcagtggcgtaaatctgaatgcgcgaggtcacggccgccagccccgccatcaaggtgaacgactcaaggttgtgatcccagaactcagttttgccgccaaagccacgcagtttgatcatcgacagggcgaaatcgaaatggtagtgctccgctttttgcacaatggctttattcagttcaaaggtcggcatgtactgcggcgcgtgggtcgaaatgagccagcttatacacctagtaacacggtcatagtaatctgcccagctaatgacaagcgtcatatgtctcccgtcccatgtttttccacggtttgagcacagatcgcaacttgtttgttccgatgggattgtatccgcgatttcgaatcccgaaattttgcacgcagtcggtctgcaccgaaaatttttctcacctggaccgtgatgaatttcatcactgataacctgattccggttacgatcggcaacattatcggtggtggtttgttggttgggttgacatactgggtcatttacgagggtgacgagtccttcctggctggcgctactgaagcgaccaccacccccgcgtgcgcgtattccccacgcgtcaagagccgcgtcgtcgttgcggttggcaatcaggcgcagatacgagagcgcatctttgatttcatggcgatccaagaagcgcatcccgccgtaaatacggtgcggcatactggcctcaataacgcctctgggagcacccgcgacgtccgcgccatcggtccacagttttttacccagacgcccgttattgttttcaatcagggcgttagcggcgctcagaatattgctggtagagcggtagttttgctccagacgaatagtttcggcaccggggaaatcattaaggaaacgctgaatattctccacctgcgccccgcgccagccgtagattgactggtcgtcatcaccgacgatcatcactttgccggtgtcgcccgccagcaggcggatccacgcgtactgaatgttgttggtatcctggaattcgtccaccaggatattctttagagcacagggggataccaacggaggttcacacgaagccgcatcagcggcacaaagatttcccggcaagccagcgccggagtcttcaagaaagaagagaaacaggtacatcatgccaatctgcggcaccagtggcagcacggtgttaatgccgccacccaggccctgggcgaggaagatagtcagccagtccgggaagtggagcgtgtagccaatccattgaataccatgcacaaatagcgccacggagccgacgtcaaacagcggctgtaacgccccgccgatgttgatagccagcaggaacatcaggtacatcacaaagaggaaaatcggcagaccgaggaaacggttgagcacgattttatctaccgcagtggtgaaacggctgggttctgccgtcagggtgttgcttaccacatcacagatggcagcaatgcactggtaacgcgcatcggcaatgtgcagcgccggatcgtccatctcattacgcagacgggcgagggcggcatccagatgctgcgacgcttcaccggcgtaggcgcggctgtagatatcgccttccagcatttgcaggcccagccagcgacgttgtttcagcgggatgtcggaaggcatcacttttgccagtgaatctgcttcgttgagcagcggctgtgcgtaatgcaccagttccacattctcgttagctttatagcgatcatcgattagagtcccgacaggctgtccttcgcggtaatttccatgggtgctgtggaacacggctgtttgagtcgttcggcggtattgtatccgcctcacgcggtaaacccaccgtcgcatcgctacgagcgacgcgttgctgagctgaaaacccgcggttacgacaatgcgggtctgtacgatccggcaggcgtcggtggtacacacgttatgtacgtgctgcaccatgctgacaagccaaatctgtatcatggcttgccggagaacccggaaatcagcgaaaccgtgaaattctggaaaggcatctggaaaccgctcgcggctgttggctttgcggctacctttgcggccagtatcttccactacgtgggtgtcggtccgaaccgtgcggatgaggaagagaataatcgccttctgcttcatcctggcggcggtgagcgggctgggctttttgttcccgtccttcaactggttgatgcatatcatgggcacaccgcagctggcgcgaattctgcacccgtttgtcggcgtggttatgtttccctcgttcattatcatgtttttccgtactggcat

SEQ ID NO: 29024 - DNA, 651 bp, Homo sapiens
  SIMILAR (216)..(178): 1001254mologous to Escherichia coli ribosomal protein L2 (rplB) (aa 1-273),accession number X02613,Smith-Waterman Score=74.
  misc_feature (1)...(651): n = a,t,c or g
atgggaacgaaacaggccgtacccgaagcacacatcatggggaacctaatagttgcaaaacaggaaccgagaaatcgttacngaaccagcgcgatgttcgcggaaggttcggatcgtactcaagacgttcaacaactgccgggataccgtctttttgcgtttgaagtcaacaatacgcaacggagcaaaaggtttgcccttgtgcagctcagggttaccactttaactacgtggcgacgacccggagatgtcggtttacatttaaaactgccattgtattactcctccgacttactcagcgccgccaacgaagtcagattctggccttctttcagggtgaccgactggcttttaaacccagcgttgcggcgcttcgataccttcgaaaataatcaccggttctgtttctgtcagcttcgcaaacaagccgacagctcaatgctgtttcctcttctttacgctgacacgccaccaacgtcaatcgatggggcgcgtttgccgaagcgcaaacttgccgtcgtctggtattgcgaactattttggcgaagggcgtcaggagccgtgcgggaactgcgatatcgcctcgatccgccgaaacagtacgacggttcaaccgatgctcagattgcctttccaccattggtcgtgtga

SEQ ID NO: 29025 - DNA, 1716 bp, Homo sapiens; identical to SEQ ID NO: 24371
  SIMILAR (562)..(1128): 1001254mologous to Escherichia coli K12 putative oxidoreductase,accession number AE000459,Smith-Waterman Score=1009.

SEQ ID NO: 29026 - DNA, 6732 bp, Homo sapiens; identical to SEQ ID NO: 24708
  SIMILAR (1561)..(2238): 761254mologous to Vibrio cholerae carbamoyl-phosphate synthase, large subunit,accession number AE004309,Smith-Waterman Score=865.

SEQ ID NO: 29027 - DNA, 1581 bp, Homo sapiens
  SIMILAR (58)..(678): 981254mologous to Escherichia coli formate dehydrogenase-O beta subunit,accession number L19201,Smith-Waterman Score=1133.
ctaggagacagttttgatgctagcatgataaaaggtagggaactgggtctcagtcatgagagtgcagagaacgacaaactggaatggctgatccgcaaagacggctgtatgcactgttccgatccaggctgcctgaaagcgtgcccggcggaaggtgcaattattcagtatgccaacggtatcgtcgacttccagtccgagcagtgcattggctgcggttattgcattgcgggctgtccgttcgacattccgcgcctcaacccggaagacaaccgcgtctacaaatgtacgctgtgcgttgaccgcgtggtggttgggcaagaaccagcctgcgtgaagacctgcccaacgggcgcgattcacttcggtacgaaagagtcgatgaaaacgctggcgagcgagcgcgttgctgagctgaaaacccgcggttacgacaatgcgggtctgtacgatccggcaggcgtcggtggtacacacgtcatgtacgtgctgcaccatgctgacaagccaaatctgtatcatggcttgccggagaacccggaaatcagcgaaaccgtgaaattctggaaaggcatctggaaaccgctcgcggctgttggctttgcggctacctttgcggccagtatcttccactacgtgggtgtcggtccgaaccgtgcggatgaggaagagaataattgggtgggtcaatattctggggtccctggggattccaaggctgaccccagtggaggaggagggcagccggggacataacgtggcagactgctctctcgaggaagccataaccttgtccatgacagagttccatgtggctttctctgtactcctcccagacactgcccatggagccatgtcatagacatcgttttcatcacggcgataattatctttattgtttgcccaaacgtgatcgttaaatgtccggtaatcacgcgacgaataacgccaggccgccagaccaaaacgcgtcgacgtttggctcacaaatttgttgtaggcaatttgataactttgcccgtcaaacacatcgccgttgtcttgtttactatgcgacttagtggcatcgacggaaatggcaccaatgcgtgtattccagccagcccccaaagtaaacgcgtaataattattcgcgaccatcgagccaccatacagcgtcaataaattattaaaaccatactgataacccgcctggacaaaatcactttgtttgctcgccccttcaatatggctacgacccgccgctaaatcatatttcgacacgccgggttgcagcatatttggcaccgctgcataaggcaccagataggtggttaccgagccgtccgcctctttcacgctgacatcaagatctgctccaccaccggccaactgcaaatctgtaatcgcgaacgggccaggaggaacctctttctgataaaccacaaaccatttctcaaatgttaatggtctgaaacggataggtttcccaataatattattttgcacaacaccaagtgtttttaaggcagtctgattaacaaactgaacccgattttcatcatctacaactaatacgccctgatccatattatcgatcat

SEQ ID NO: 29028 - DNA, 1470 bp, Homo sapiens
  SIMILAR (10)..(666): 941254mologous to Escherichia coli Protease II (EC 3.4.21.83) (Oligopeptidase B),accession number D90827,Smith-Waterman Score= 1094.
atggcatcgttttatctgcgttccaaccgccacggcaaaaactttggcttataccgtacccgtatgcgtgatgagcaacagtgggaagagttaattccgccacgcgaaaacatcatgctggaagggtttacgctgtttaccgactggctggtggttgaagagcgtcagcgcgggttaaccagtttgcgccaaattaaccgcaagacccgggaagtcattggtattgcctttgatgatccggcctatgtgacctggattgcctacaatccagaacctgaaaccgcgcgattgcgttatggttattcttccatgactacaccagacactttgtttgaactggatatggataccggtgagcgtcgtgtattaaaacaaacggaagttcctggtttttatgcggcgaattaccgcagtgaacacctgtggatagtcgcccgtgatggcgtcgaagttccggtttcgttggtctaccatcgcaaacattttcgcaaaggacacaacccgttgctggtgtatggctatggttcttacggcgcaagtattgatgccgatttcagttttagccgcttgagtttgttagatcgtggctttgtctacgccattgtccatgttcgcggcggtggttgcaaaatcaacctggtcgtcgataacggcaaaatcgtccgggcggaggcagcgcaggggaaaaccaaccagggtaccctgtgtctgaagggttattatggctgggacttcattaacgatacccagatcctgaccccgcgcctgaaaacccccatgatccgtcgccagcgtggcggcaaactcgaacctgtttcctgggatgaggcactgaattacgttgccgagcgcctgagcgccatcaaagagaagtacggtccggatgccatccagacgaccggctcctcgcgtggtctgcaccaatcggtcggtaatggcgcaatgagcaatgctattaacgaaattgataataccgatttagtgttcgttttcgggtacaacccggcggattcccacccaatcgtggcgaatcacgtaattaacgctaaacgtaacggggcgaaaattatcgtctgcgatccgcgcaaaattgaaaccgcgcgcattgctgacatgcacattgcactgaaaaacggctcgaacatcgcgctgttgaatgcgatgggccatgtcattattgaagaaaatctgtacgacaaagcgttcgtcgcttcacgtacagaaggctttgaagagtatcgtaaaatcgttgaaggctacacgccggagtcggttgaagatatcaccggcgtcagcgccagtgagattcgtcaggcggcacggatgtatgcccaggcgaaaagcgccgccatcctgtggggcatgggtgtaacccagttctaccagggcgtggaaaccgtgcgttctctgaccagcctcgcgatgctgaccggtaacctcggtaagccgcatgcgggtgttaacccggtt

SEQ ID NO: 29029 - DNA, 1776 bp, Homo sapiens
  SIMILAR (1222)..(1773): 931254mologous to Escherichia coli ATP-dependent protease (clpP),accession number J05534,Smith-Waterman Score=870.
tcgcgcgtaatgttgctcactgatcaacgccgtcattgcgcggctgatcgacgcttcaatatcgatagccggatagtgcccggcttccgccagtcggcgagacagcacaatgtgaccgtcgaggatcgcccgcgcggagtcggcaatcggatcctgctggtcatcgccagcgatatccagcgggtccagcgccacgccgcgcaggtagtaatcgaacggtgaacggctggcgtgatgatattgctccagatgctgaccgataaaccaggcttcatctgtactggtaatgtcttgtgctgccagtggcgctttggcgacgtccggtaacggcaacgcttgcggctgatgttcctgataactcagtacaatattgccgtcggcatcggagagctcaatggtcagcctttcaggattgataccgtgcaacacgccctggatggcggtcgcaggcatcagtgccacggcatcatcaagtaacgcgttgcatttaccgatttcgcggatcgccaggcggtatccgttcaacggagagatggcatacagcccccactcaatcccccgcttactacgctggagttttatcaccgcatcgcgggaggcattttgcaccatgcccaaagaatgataaggcaggaaatactgctcaaaacgcttctcttcgtaagcatcaagccaggtaaaatcgggctggttatcggcaaaaataccggtcatcagttcgatatacgggccgttattgtcggtcagactcttatcccacgcctggccaaattcactgtgtccccaactccactgttttttacctggcgcaatatggagtgcctcttcattgcttaaatctggcaacaggccattaatacggctggcgagcattgttttacctgttcccggcggcccaatcagtaaaaggttgtgcccgccagcagcggtaatttccagtcctcgctttccttgttcctgaccgataacatcactgagatcatgttgtagcgcccggatacgtggacacacgtcatgtacgtgctgcaccatgctgacaagccaaatctgtatcatggattgccggagaacccggaaatcagcgaaaccgtgaaattctggaaaggcatctggaaaccgctcgcggctgttggctttgcggctacctttgcggccagtatcttccactacgtgggtgtcggtccgaaccgtgcggatgaggaagagaataatctgcacgaagagaaagacgaggagcgcaaatgttcccaagacatacaactggtcaaggaacgcgtcatttttctgactggccaggttgaagaccacatggctaacctgattgtggcgcagatgctgttcctggaagcggaaaacccagaaaaagatatctatctgtacattaactccccaggcggggtgatcactgccgggatgtctatctatgacaccatgcagtttatcaagcctgatgtcagcaccatctgtatgggccaggcggcctcgatgggcgctttcttgctgaccgcaggggcaaaaggtaaacgtttttgcctgccgaattcgcgcgtgatgattcaccaaccgttgggcggctaccagggccaggcgaccgatatcgaaattcatgcccgtgaaattctgaaagttaaagggcgcatgaatgaacttatggcgcttcatacgggtcaatcattagaacagattgaacgtgataccgagcgcgatcgcttcctttccgcccctgaagcggtggaatacggtctggtcgattcgattctgacccatcgtaattga

SEQ ID NO: 29030 - DNA, 3049 bp, Homo sapiens
  SIMILAR (984)..(1616): 941254mologous to Escherichia coli formate dehydrogenase-O beta subunit,accession number L19201,Smith-Waterman Score=1090.
ttaagcagtactggtttgccctgagtcagcacatgccgcctgataaaactgccccggattgtccagtggattcgtagacagaaacttcggcacaggcttgccaatgagcgccgattccagattggtcggatcatccccttcggcattacgctccagctgccacagctattccgcttgtatcgccaggaagataatcaacggaattaacaatactttgcgcttcatacggcctccggcgcagttttttgcggactcacgcgcttacgatagcgaggatcaaacagacacagcagtccgcccaacgccatcatcagcccgcccgcccaaatccagcgaacaaatggtttgtagtaaagacgcacggcccacgcgccgttttccagctcttcaccgagggccgcgtacaggtcacgcgtgatgccgccgtcaattgccgcttcggtcatcatcgacccggcagtgttgtaataacgtttttccgcatacagcaccgtttccggcttgccatcgcgcgttacgccgatagtcgccacaccgccacgccagttcgggccagtcacctctttgacatcacggaaggtgaagcgatattcatgaatatcgacgctatcgccggacttcatgcgcacatcacgctcaacgctatagttctggctaaaggcaatgccaacaattgtctcgtttttgttcggtttgacaatatactgggcatcctcgatatcttgtagttcccccgttgtgaggtacgctgtgtctcttaccaaattatttgcggcgaatatttgtggataatcgccggggttattacccaatgtgtgacccctcttacacctgtcgtgggcctcgcacataatagttgcgggcaacacatttacgcgtgcgattatctcgggattagcgcgcgtaactctccgtgggtcgtttttctggcacaactggctccttaggctaagtttacggtctatatctatgcggcggccctttggacgaaattcagggatagttgcagatcccgtgacggatgttccgatccaggctgcctgaaagcgtgcccggcggaaggtgcaattattcagtatgccaacggtatcgtcgacttccagtccgagcagtgcattggctgcggttattgcattgcgggctgtccgttcgacattccgcgcctcaacccggaatacaaccgcgtctacaaatgtacgctgtgcgttgaccgcgtggtggttgggcaagaaccagcctgcgtgaagacctgcccaacgggcgcgattcacttcggtacgaaagagtcgatgaaaacgctggcgagcgagcgcgttgctgagctgaaaacccgcggttacgacaatgcgggtctgtacgatccggcaggcgtcggtggtacacacgtcatgtacgtgctgcaccatgctgacaagccaaatctgtatcatggcttgccggagaacccggaaatcagcgaaaccgtgaaattctggaaaggcatctggaaaccgctcgcggctgttggctttgcggctacctttgcggccagtatcttccactacgtgggtgtcggtccgaaccgtgcggatgaggaagagaataatctgcacgaagagaaagacgaggagcgcaaatgaaacgacgtgacaccatcgtgcgctacaccgcgccggaacgtatcaaccactggatcaccgccttctgcttcatcctggcggcggtgagcgggctgggctttttgttcccgtccttcaactggttgatgcaaatcatgggcacaccgcagctggcgcgaattctgcacccgtttgtcggcgtggttatgtttgcctcgttcatcatcatgtttttccgttactggcatcacaacctaatcaatcgggatgatatcttttgggcgaagaatattcgtaagatcgtcgtcaacgaggaagtaggtgacaccgggcgttataacttcggtctgcaccaatcggtcggtaatggcgcaatgagcaatgctattaacgaaattgataataccgatttagtgttcgttttcgggtacaacccggcggattcccacccaatcgtggcgaatcacgtaattaacgctaaacgtaacggggcgaaaattatcgtctgcgatccgcgcaaaattgaaaccgcgcgcattgctgacatgcacattgcactgaaaaacggctcgaacatcgcgctgttgaatgcgatgggccatgtcattattgaagaaaatctgtacgacaaagcgttcgtcgcttcacgtacagaaggctttgaagagtatcgtaaaatcgttgaaggctacaaccgcccggagctccggttgaagatatcacccggcccgtcagcgccaagcctcgcgatgctgaccgtaactcaaccgggtgttacctggtttgattgcagcatcaacgccagactgaatctggtcgccagctttcaggcctttaggggccaggatgtaacggcgttcaccgtctttgtacagaaccagcgcgatgttcgcggaacggttcggatcgtactcaagacgttcaacaactgccgggataccgtctttgttgcgtttgaagtcaacaatacggcgttccgatcgcagccgccggaaggcgcagcggaagaggtgcgggcaggtgatgccgcagcaccgtcgctcgatccggccactattgcagccaataacaccgagtttgaaccggaacctgcaccggtcgccccaccgaagccgaaaccggtggagccgcctaaaccgaaggttgaagcaccacctgcgccgaagccagaaccgaagccggtcgtggaagaaaaagctgcaccgacgggtaaagcctatgttgtgcaactgggtgcgctgaaaaatgccgataaagtgaatgagattgtcggtaagctgcgcggtgccggttatcgggtttatacgtcgccatccacgccagtgcagggtaaaattacccgtattctggttgggccggatgcctcgaaagataagctgaaaggttcgctgggtgagttgaagcaactttctggcttaagtggcgtggtaatgggctatacgccgaattaa

SEQ ID NO: 29031 - DNA, 3667 bp, Homo sapiens
  SIMILAR (15)..(173): 581254mologous to Escherichia coli No definition line found,accession number U00039,Smith-Waterman Score=132.
atgggctgttccaggaacaagccctggggtaaaaacctggcgcaaccccattacccccggttaataacgatttcaccggttacgctggagttgtcggccataatcaggacgtgtgcgaaaaacgggccagcacaacgctttggctggatgttgggcggagcagtggactggatcgtgacctatcagaccctgaatgtgaagaatgacctgtcacacttcccggtgccattctttgacccgagcgataaccgcaccaacaccttgccgatggtctttgcgggtgcgccggatgttgggctgcaacaagcctctgccattgtcgcctcgtggtttggttcgcgttctggctggcgtgggcagaacttcccggtactctataaccaactgccggatcgcaatgccattgtctttgcaaccaacgacaaacggccggacttcctgcgcgatcatccggcggtaaaagccccggtgattgagatgattaaccatccgcagaatccttacgtcaaactgctggtggtgtttggtcgtgacgacaaagacctgttgcaggcagcgaaaggtatcgctcagggtaacattctgttccgtggtgaaagcgtggtagtgaatgaagtgaaaccgctgctaccgcgtaagccgtacgatgcgccgaactgggtacgtaccgatcgtccggtcacatttggcgaactgaaaacctatgaagaacagttacaatccagcggtcttgagccagcagcgattaacgtttcgctaaacctgccgccggatctctacatgatgcgcggtaccgtgtctcctgttcgtgttgctttctggttgttgtccgtcttttcgctcttttgctctgcttccttggtccttgcttttttctctgtgttttctttttcttgtctctttcttgttgttctctcgcttgagagagaagacaggttgaaaaacaggattgatatgacgaatctacccaagttctccaccgcactgcttcatccgcgttattggttaacctggttgggtattggcgtactttggttagtcgtgcaattgccctacccggttatctaccgcctcggttgtggattaggaaaactggcgttacgttttatgaaacgacgcgcaaaaattgtgcatcgcaacctggaactgtgcttcccggaaatgagcgaacaagaacgccgtaaaatggtggtgaagaatttcgaatccgttggcatgggcctgatggaaaccggcatggcgtggttctggccggaccgccgaatcgcccgctggacggaagtgatcggcatggaacacattcgtgacgtgcaggcgcaaaaacgcggcatcctgttagttggcatccattttctgacactagagctgttcggggatattcacgccggggtcgtcacatccgaacggctcgtaaatattgcatccggcgaattttggatccaacaggcccccgtttggctccagaggggtaaattaacgaggcccctgacgtcattccaacttccgcggcgatccagtgggaaccatgcggcaacaacttgcccggacccggtcacgcactgtgcacaacggctttatcagcagaacctgtgtaccacaccaccatgttctccgagtggtatggcgatggatctgctgacaaaacaggatggctcggtggtgggatgtaccgcactgtgcatcgaaaccggtgaagtggtttatttcaaagcccgcgctaccgtgctggcgactggcggagcagggcgtattaatcagtccaccaccaacgcccacattaacaccggcgacggtgtcggcatggctatccagtgccggcgtaccggtgcaggatatggaaatgtggacagttccacccgaccggcattgccggatgcgggcgtactggtcaccgaaggttgccgtggtgaaggcggttatctgctgaacaaacatggcgaacgttttatggagcgttatgcgccgaacgccaaagacctggcgggccgtgacgtggttgcgcgttccatcatgatcgaaatccgtgaaggtcgcggctgtgatggtccgtgggggccacacgcgaaactgaaactcgatcacctgggtaaagaagttctcgaatcccgtctgccgggtatcctggagctttcccgtaccttcgctcacgtcgatccgagccgattccggttatcccacctgtcactacatgatgggcggtattccgaccaaagttaccgatataatgatacgcgtgatatggttccgatcaatggttcgatccatcgaattggtcgagagccccactatcattatcaaaggggacagcaatatataggtctatgccgtaattgtaatgttatcgatacacatatttgtatttatctggttgatcagcccattatggacgatataagaaggcttttgctatattctgagatatctagtgcaataatatggctattaccagtagtgcagggcgagcactatatgttagtagatccagataccaacgaacgagaagagagaggaagaagcgagacgcggggatttccgcgggttccacttgggcgaactgtgtccaccgtgtggtaccctctgtctaacgctgccaccttggcggcaactagatgctctcgctcccctcatgctttcgcggaaccctcctcgaacaacggcttcattaccgcaacaccattagggcgaacccatttcctgggtatggcgtttccgccatcagcatgttggcgactgctacgcgcagaaccagaaagagttgaagcagtactatcagcaagtgggatgaacaaggcaatgcgctgtggcgtgtcgctcatctgcaacttccgtctggattacgcccctattgagaaacagtgggatttgcacttcgctgattactttgcggaagatctcaagctgctcgccccgttagcaaaagatgggctggtggatgtggatgagaagggaatacaggtgacggcgaaaggccggataaggcgtttacgccgcatcaggcatctgagcatgatgcctgatgcggcgctggtcgcgtcttatcaggcctacgactttctccgcatccggcataaacaacgagcttcagctaaacagcccaatcattgcggcacacagcacggcagcaacggcagtttgcggaccctgtggaattctatagatagcggtagtgtactcacttggtgcgcgtcgctaattttcagtagcaggaaatcgttatcgcctatccagcttgtaaggtctgtcgaccgtggcgatgtgaaaaagagatattcgatgcgcgaattttcattgggcgaaacacacagtgaagccgagtttcgcgagctgctggaacagaacccgtctttcgtcttctttaaaccgcaatcttttgctccggtgaaaggggcaagtgcggtgccgctggttggtcgcgcgtcagttgcctctgatcgttccattattccgccaggtactaccttgctggcagaagtgccgttgctggataataacggcaaatttaatggtcagtacgaactgcgtctgatggtggcgctggatgtcggtggtgcaatcaaaggccaacacttcgatatctatcaagggatcgggccggaagccggacaccgcgcaggttggtacaaccactatggacgtgtctgggtgctgaaaaccgccccgggcgcag

SEQ ID NO: 29032 - DNA, 2157 bp, Homo sapiens
  SIMILAR (1341)..(1156): 481254mologous to Escherichia coli methionyl-tRNA synthetase,accession number X55791,Smith-Waterman Score=114.
ttaatctggcgaatacgctccgccataacttccgctttgccagcccaacgttatcgcgcagggcatgaatttgccgattggtattgtgacgcacacatcatccatatcgataagcgtgattgcgccaatccccgtcgcgccagcgcttccgccgcccaggaaccgacaccaccgataccaaccaacaaatatgcgcgtcagcaaacagttgcaacgctttttcaccatacagagcgctgtgccaccaaaacgctgacgccatgcatcactgcgcggtgtccggcttccggcccgatcccttgaagatatcgaagtgttggcctttgattgcaccaccgacatccagcgccacatcagacgcagttcgtactgaccattaaatttgccgttattatccagcacggcacttctgccagcaggtagtatgacattgcgcgcgtcattgaagtcaggtcttccagcaaatccatcatatgcgccagcggccagcgcacatgtggtgcggctctggctcatcgccttccagtgattccgggtagagatcttgcgcaccacgatattcattttgctggaaaagtaagacggtgccatgctgagctctaattcgtaggattcagttcccactgcgtattcgcggatcagatcaggtgatcgtccacaatcggcacaatcatcactgcttcccggttgttggacgcattcgttcataaacacgccgcacgccattgctgaactccagtccacgctctcgacggtaaacagtcgggaacgggctacagtttcaacatcagaatggtgggtttttgtaatgatttgctcatcgtgggatctatgctggaaatcagcggttattgtgcgatatcggacacgctttcggcaatgtgaatgcatgttatttacatttggggatcctctagagtggacttcacgagggaacgcttcaccaatcacttcagcggcatagtgaagttttgacaactgcggtagccagttcgcggcgtagcgccagaaaccaccgatttcggctcgatagttcagtcgggctgtaggtcgcgccgcagacttcgcagttatcgccgtttgatccggggatttacatttcgggcaggtgcctttcacaaaacggtccgcaggaacatgcctttttccggatcgtacagcaagctgctgagctttcagcatgatcggtgtaccgtggcatcgtcggcgcagatgaagttgacctcgtggccgcgcattcgctggaacggacccagacatcagcctggatgtgctccagcatatggccgaggtgattgagccgttagcgtacggcagtgcgcacgtcaccagaattttcttcggacttgagtcatagtaggcattacttctaatagtgtaacggtagcggccgtgagttcttggtgtcgcacctgggtacctgtttctgttttgtgcttgaattgttatcctgcctccatggctttggtgcgcggtgtaatacggggtgtgtgaacttgcttgagcctttgccctaactgcgccgcgatttttatattcgcttttggggcggttatattctgtatcacctcggtgggttttttgttccccccaatggtgtacaagtctggactccggttttttgtgttcacctaaatgcgggatactggcgttccacaaaggttgcgcgcacccagaaggtctttgtcggccaaactgggacctgcttgtccctttgcctatattgtgccccatatctggtgtcgctggattggctggggcacatgtgtgtgcctggctatttgtgtgtgtgtgtgcgtggctgattgaacagcaatctgtgcaatgctgtgtgtgtgggcaatgacactgggcaatgacctgtgggtttgaggttgtattgtgtggtttgattggtgctggtgcctgcgcaatgcctgtgcgactcctaggaaactggtggaaaggtctgtcgcaatggtatgattggcaaggatgggctgtgatgctggtgtggtgaactgctagggtgatgacggctgtgacgtgcactgatgcaacatatgtgggaggatctgcaaatgataatggttgtcgtggaataaatgtggatgcagaattacgttgttgaaagactcgtgcatctagcttagtctccgggcactcggtgggctgcat

SEQ ID NO: 29033 - DNA, 2367 bp, Homo sapiens; identical to SEQ ID NO: 9202
  SIMILAR (2334)..(1603): 971254mologous to Escherichia coli DNA polymerase III alpha chain,accession number U70214,Smith-Waterman Score=1231.

SEQ ID NO: 29034 - DNA, 2187 bp, Homo sapiens
  SIMILAR (448)..(1356): 711254mologous to Escherichia coli 46 KD MEMBRANE PROTEIN,accession number D90860,Smith-Waterman Score=999.
atgggcggtgttctctttggtctgtcgatcggttcgatgagcggtattctctgctcggcgtggttagtgaaacgctttgggacacgtaatgtcatcctggtcacgatgtcctgcgcattgatcgggatgatgatattaagtctggcactctggctgacatcgcccctgctctttgccgttggtctcggcgtctttggggcaagttttggttctgcggaagtggcgatcaacgttgaaggtgctgccgttgagcgagaaatgaataagacggttttgccgatgatgcacggtttttatagcctgggcacgctggcaggcgcaggtgtcgggatggcactgacggcctttggcgttccggcaacggtgcacattttacttggcggcgctggtgttgtggtgctggcgatggccttttccgaaggttctgccaacgactggttacccttattaatggttgacggtcacggttttagccctacttccggctcgctgatttatgccggttttaccctggggatgaccgttggacgcttcaccgtcgtgatgcgtttcatgctgaaaggggatacccagaccccgcagcgcgaaggctggacgcgtcgaacctttcgcgatcttatccgtgaatatcgactgaccgggcgtgcgcgacgtctggctattcgccccggatcgccaatgattggtcaacggctggatgatctcaaattacgtgagcgttatggcgctaacgtcatcggtgttgaacgctggcggcgttttcgtcgcgttatcgtgaacgttaatggggtttctgaatttcgcgcgcgtgacgttttgcttattgatatgtctgcggctgatgtcgatctccggccattttgtagtgagccattgctggagccgatggtattgcgcggcgagtatttttctgaccaggcccttgatgtgggcatggcagagatttcattaattcctgagtcagaactgattggtaaatcggtgcgcgaaattggttttcgtacccgctacggactgaatgtggtggggctaaagcgccatggcgtggcgctggaaggttcgctggcggatgagcctctgctgctgggcgatatcatcctggttgtgggtaactggaaactgatcggtctggttgcccgtttcctcgggagtttgctcatcgcgccccgcgtcagcgatccttcccgcctgatttccgccttgcgcgtgctggcactgctgacacttctctttgctgtcgccttctgggcgggggcgcacgtagcgtggctgatgctggtgatgattggctttaacctctttttctcaccactgggggcacatgcggcctattacggttttagcgccatttactggcaggcagctggctactcggcctcggcggtggggtatttgtggtcgctgggcgtggtggcggaagtcatatctttgcggtaccgagctcgagtcgtatcatgtagtggtgcaaggccttgtgcacaacctgggccggaatcaattttgctctccgacgtcagcggcattctcgacggcaaagggcaacgcattgccgaaatgaccgccgcgaaagcagaaccactgattgagcagggcattattactgacggcatgatagtgaaagtgaacgcggcgctgaatgcggcccgcacgctgggccgtccggtagatatcgcctcctggcgtcatgcggagcagcttccggcactgtttaacgcagatcaacggttcaaacaattcaacgactcactgcgctttgattaccgtctggcggagcaggatattgttggctctgtggcctggtccaaagccctggtcacggtaggcgtgttaaccgcagaagagcaggcgcaactggaagaggcgctgaacgtgttgctggaagatgttcgcgccaggccacaacaaatccttgaaagcgacgccgaagatatccatagctgggtggaaggcaaactgatcgacaaagtgggccagttaggcaaaaagctgcataccgggcgtagccgtaatgatcaggtagcgactgacctgaaactgtggtgcaaagataccgttagcgagttactgacggctaaccggcagctgcaatcggcgctggtgaaaccgcacaaaacaatcagacgcggtaccgactatcccaatcttgtcataagacccatgcggcaaaatgggggttctctggtctaa

SEQ ID NO: 29035 - DNA, 1370 bp, Homo sapiens
  SIMILAR (267)..(1226): 921254mologous to Escherichia coli 46 KD MEMBRANE PROTEIN,accession number D90860,Smith-Waterman Score=1492.
acggtattgaacgcaaactggaaatagaaaaagcggtcactgacgttgcggaactgaacggtgaattacgtaatcggcagtatcttgtcgagcaattaacaaaagcacatgtcaacgatgtgaattttacgccgtttaaatatcagttaagcccgtcattgccagtgaaaaaagacggtccgggtaaggcgattattgtgatcctttccgcgttgatcggcgggatgttgtattgtcgcgtctgcattaagcggaacgctgacagtccagaagtattttccggcttttctgatcctaacgttgtcctgattgccgccgtgtttattattggcgatggtttggtccgtaccggtgttgccaccgtaatgggaacatggctggtcaaagttgcgggcaatagtgaaatcaaaatgttggttttgttgatgctgaccgtcgcggggcttggcgcgtttatgagttcaaccggcgttgtcgctatctttattcccgtggtgttaagcgttgccatgcgtatgcaaacgtcgccgtcacgtctgatgatgccgttaagttttgccgggctgattagcggcatgatgacgctggtggcgacgccgccgaacctggtagtcaacagtgaattgctgcgtgaaggctatcacggcttcagtttctttagcgtaacacctattggcctggtcgtgctggtgctgggtattttgtatatgttagtgatgcgtttcatgctgaaaggggatacccagaccccgcagcgcgaaggctggacgcgtcgaacctttcgcgatcttatccgtgaatatcgactgaccgggcgtgcgcgacgtctggctattcgccccggatcgccaatgattggtcaacggctggatgatctcaaattacgtgagcgttatggcgctaacgtcatcggtgttgaacgctggcggcgttttcgtcgcgttatcgtgaacgttaatggggtttctgaatttcgcgcgcgtgacgtttcgcttattgctatgtctgcggctgatgtcgatctccggcaattttgtagtgagcgcttgctggagcctgatggtattgcgcgattctctttaattcctgagtcagaactgattggtgaatcggtgcgcgaaataggtttgcgtacccgctacggactgaatgtggtggggctaacgcgcactggcgtggcgctggacggttcgctggcggatgagcctctgctgctgggcgatatctcctggttgtgggcactggaaagtgatcggtatgcggccatgctgggccggagtcggagcctgacttaccggagaggtgatgaacattgccgtgccagcaggtcccctgcattctggcgggcgaaggggggtaagctccgataa

SEQ ID NO: 29036 - DNA, 2352 bp, Homo sapiens
  SIMILAR (1048)..(1953): 781254mologous to Escherichia coli Initiation factor IF2- alpha,accession number AJ002542,Smith-Waterman Score=1122.
atgatcgctattactggtgccactggccaacttggtcactatgttattgaatccttgatgaaaacggttcctgccagccaaatagtggctatcgttcgtaatccggcaaaagcccaagccctggcagcacaaggcattaccgtgcgtcaggctgactacggcgatgaagccgcactgacatctgcacttcagggagtggaaaaactactgctgatctcttccagcgaagtgggtcaacgtgccccgcagcatcgtaatgttattaatgccgcaaaggcggctggcgtgaaatttatcgcttataccagcctgctacatgcagatacctccccgctcggcctcgccgatgagcacatcgagacggagaaaatgctggctgattctggcatcgtttacaccctgctgcgcaacggctggtacagcgaaaactacctcgccagcgcccggcacgggggtctctcaatggactgccgatgcagtcactcaaaaagtattcttcgcggatcattgtcttctgaatttttttgtagggaaaaaatggttttcggttccgactctgccattaatatggcaagtcaacacattaatatccatacaaccggtgtgatgtcggaaaatgtcaccactgcaggggggaaaccggggaatgtactgaccgttaacggcaactataccggaaacaatggcctgatgacgttcaacgcgacgctgggcggcgataattcgcccaccgataagatgaacgtgaaaggcgatacccaagggaacactcgcgttcgggttgataacattggcggcgtcggtgcacaaacggtcaacggtattgaactcattgaggttggcggtaattctgcaggtaacttcgcgctgaccaccggaactgtcgaagctggggcttacgtctacacgctggctaaagggaaggggaatgacgagaaaaactggtatctgaccagtaaatgggacggcgtaacgccagcggatacacccgatcccatcaataatccccctgttgtggatccggaaggcccatcagtttatcgcccggaggccgggggatacaattccttattaatggttacccatggaaaagttataaacggcgggagggggatcctcatagagtccgatggaacccggggacgcgcgttagtcaagcggctcgtgtgccaggcacggactcgtattctggttgtgctcttgtcgccggtgtatgccgcagaccatcgaagcaatccagcacccgaatgcggcgcagtgaacaagatcgatagaccagaagctgatccggatcgcgttaagtacgtactctcccagtacggcatcctgccggaagagtgggtcggtgaaagccagttcgtacacggatctgcgaaagcgggtaccggtatcgatgaactgctggacgctatcctgctgcaggcggaagttctggagctgaaagcggtacgtaaaggtatggcgagcggtgcggttatcgaatccttcctcgataaaggtcgtggtccggttgctaccgttctggtacgtgaaggtactctgcacaagggcgatatcgttctgtgtggcttcgaatacggtcgtgttcgtgcgatgcgtaacgaactgggtcaggaagtgctggaagcgggtccgtccattccggtggaaatcctcggcctgtccggcgtaccggctgcgggtgatgaagttaccgttgtacgtgacgagaagaaagcgcgtgaagttgcactctatcgtcagggtaaattccgcgaagttaaactggcgcgtcagcagaaatctaaactcgagaacatgttcgccaacatgaccgaaggcgaagttcacgaagtgaatatcgtcctgaaggcagacgtacagggttctgtcgaagcgatctccgactccttgctgaaactgtctactgacgaagttaaagtgaagatcatcggttctggcgtaggtgtgattgaagcggaaagcctggatctgcgttactactccgtcatctataacctgattgacgaagtgaaagcggcgatgagcggtatgctgtctccggaactgaaacagcagattatcggtctggcggaagttcgtgacgtgttcaaatcgccgaaatttggtgccatcgcaggctgtatggttaccgaaggtgtggttaaacgtcacaacccgatccgcgttctgcgtgacaacgtggttatctacgaaggcgagctggagtccctgcgccgcttcaaagatgacgttaacgaagtccgtaacggtatggaatgtggtatcggcgttaagaactacaacgacgtccgcactggcgatgtgatcgaagtattcgaaatcatcgagatccaacgtaccattgcttaa

SEQ ID NO: 29037 - DNA, 1493 bp, Homo sapiens
  SIMILAR (1491)..(547): 901254mologous to Escherichia coli Methyl-accepting chemotaxis protein II (MCP-II) (Aspartate chemoreceptor protein),accession number D90830,Smith-Waterman Score=1374.
ttagtgaacgcggttaaaaataaaaggcatcacggtggtgaataatgccgctttcggccaagccggattaatcgccgtcaattcagcgcgagcagactcatattgcgcaacctccccgagtcccgcggacgccagcatcgccaccatcaggcatttttctttatgctgctgttgtaaatcgccatacagcgacaacaagtcaggttgcgagacggcaaagaaatccgcttcgatactggttttcgccatctcttgcgcccactgtttcatttcactaaacagttgctgtgcggtttgttgttcgcccagcagtcgcagcgccatcccttgccagaagagataatcaaccggctgatcgttgtaataactgtgaatgttaatagtgcgatcgccggtcgccgccagacgtaaacaacgcgtcgcttcagtttcatcgccctgcgcgttggcgcatatcgcctgccagaaccagatgtcgttatcagtttgccccggtaaacggccttcgcttaaattctccggataatgcagcgcggcatgaagcagttcgcaggcctgctgcggctgtctggcatcaagatgctgccaagcgcgtaataactgggtgagctgctccatgctgcgggcagtttcttccagcgcggatgcctgctgttcagtacgggaggaaagatcggtgttgcccgccgcaatttcacgggtaccggcatagatggcatctgaaccttcgcggacatgagtgacggtgtcagtcaaagagcgttgcatatgtgaaacgctctgcgccaggtcgcccatttcactgcgcccgtcaatggtcagggtattcgccaggttaccaccggcgatttcgcgaatgtgagcaataatttttgccagcggagtaagcaacatacggcgaatgccgtaccacgccaccagcagaatcaataccaccaccagcgcgataaccgccagttgccactgggcaaatcggtaatcatctgcgttgtcagtgacgatatcgcgatacagtttttcactgctgagggcgtactgagcaaacgcttcgcccattgccttatgccttccctgggtgggctaagcaaaataggacccagtatgccattatttagaataatcagccagttcagttaacgctgggtaatagtttttatatttttcatcaatattacgactggtagcgaccatttcaggtaacggtgccatgcttttgaattttttataatgcgtcgctgcctgcgccaatgttttcctggcgctatcgagcaattcaactttggcgttactttgttgattggaggaatccatcatcatccgtaccgctgaacgactcaggttaatgcgcgtttgcagcattaaatcccaggttgacgtcagctcgccctgctgttcccgtaattgattggaaaccacaaagctcttctggctatggtgaagggaagaaaataacagactgccggaaatgggtagtcacagtgcgaataccccca

SEQ ID NO: 29038 - DNA, 3373 bp, Homo sapiens
  SIMILAR (811)..(1989): 981254mologous to Escherichia coli 46 KD MEMBRANE PROTEIN,accession number D90860,Smith-Waterman Score=1911.
atgatcgctattactggtgccactggccaacttggtcatctgtttattgaatccttgatgaaaacggttcctgccagccaaatagtggctatcgttcgtaatccggcaaaagcccaagccctggcagcacaaggcattaccgtgcgtcaggctgactacggcgatgaagccgcactgacatctgcacttcagggagtggaaaaactactgctgatctcttccagcgaagtgggtcaacgtgccccgcagcatcgtaatgttattaatgccgcaaaggcggctggcgtgaaatttatcgcttataccagcctgctacatgcagatacctccccgctcggcctcgccgatgagcacatcgagacggagaaaatgctggctgattctggcatcgtttacaccctgctgcgcaacggctggtacagcgaaaactacctcgccagcgccccggcagcactggaacacggcgtatttatcggtgcggcgggcgatggcaaaatcgcctcagcaacgcgggcagattatgcggcagctgcggcacgcgtgattagcgaacgcggtcacgaaggcaaggtttacgaactggcgggcgatagtgcttggacgttgacacagttagcggcagagctgaccaaacagagcggcaaacaggttacctatcaaaatctgagcgaacgcgatttcgccgcggcactgaaaagcgtcggactgcccgacggactggcggatatgctggcggattctgacgttggcgcatcgaaaggcggtctgtttgatgacagcaaaacacttagcacattgattggcccaccaacgacaacagtgcgtatggatgcggtcgctttgtttgttattgtcgcgtttgcattaagcggaacgctgacagtcccagaagtattttccggcttttctgatcctaacgttgtcctgattgccgccttgtttattattggcgatggtttggtccgtaccggtgttgccaccgtaatgggaacatggctggtcaaagttgcgggcaatagtgaaatcaaaatgttggttttgttgatgctgaccgtcgcggggcttggcgcgtttatgagttcaaccggcgttgtcgctatctttattcccgtggtgttaagcgttgccatgcgtatgcaaacgtcgccgtcacgtctgatgatgccgttaagttttgccgggctgattagcggcatgatgacgctggtggcgacgccgccgaacctggtagtcaacagtgaattgctgcgtgaaggctatcacggcttcagtttctttagcgtaacacctattggcctggtcgtgctggtgctgggtattttgtatatgttagtgatgcgtttcatgctgaaaggggatacccagaccccgcagcgcgaaggctggacgcgtcgaacctttcgcgatcttatccgtgaatatcgactgaccgggcgtgcgcgacgtctggctattcgccccggatcgccaatgattggtcaacggctggatgatctcaaattacgtgagcgttatggcgctaacgtcatcggtgttgaacgctggcggcgttttcgtcgcgttatcgtgaacgttaatggggtttctgaatttcgcgcgcgtgacgttttgcttattgatatgtctgcggctgatgtcgatctccggcaattttgtagtgagcaattgctggagccgatggtattgcgcggcgagtatttttctgaccaggcccttgatgtgggcatggcagagatttcattaattcctgagtcagaactgattggtaaatcggtgcgcgaaattggttttcgtacccgctacggactgaatgtggtggggctaaagcgcaatggcgtggcgctggaaggttcgctggcggatgagcctctgctgctgggcgatatcatcctggttgtgggtaactggaaactgatcggtatgctggccaaacagggccgcgacttcgtagcgctgaacttaccggaagagctggccagcgagccgtcaggccaggaatttctggtatttacccttggtgatgaagagtacggtattgatatcctgaaagtgcaggagatccgtggctacgatcaggtaacacggattgcgaacacgccagcgtttatcaaaggcgtcacgaatctgcgcggcgttattgtgccgattgttgacttacgaattaagttcagccaggtggatgtggactataacgacaacacggtagttatcgtcctgaatctcggacagcgggtggtcggcatcgtggttgacggcgtctcagacgtgctttcattgacggcggagcaaattcgtccggcaccggaatttgccgtgacgctttcaacagaatatctcactggactgggcgcactgggcgaccggatgttgattctggtgaacatcgaaaaactgctgaacagcgaagagatggcgctgttagatagcgcggcgtcagaagtggcccagaagagctttgtggtttccaatcaattacgggaacagcagggcgagctgacgtcaacctgggatttaatgctgcaaacgcgcattaacctgagtcgttcagcggtacggatgatgatggattcctccaatcaacaaagtaacgccaaagttgaattgctcgatagcgccaggaaaacattggcgcaagcagcgacgcattataaaaaattcaaaagcatggcaccgttacctgaaatggtcgctaccagtcgtaatattgatgacaaatataaaaactattacacagcgttaactgaactgattgacctggcagatggaaggtgccgacaactatgtaactccctgatggataacttcattatggatgtgcagggtagtgggtatatcgactttggtgatggcagtccgcttaactttttcagctatgcagggaaaaacggtcatgcctatcgcagcattggtaaggtgctgatcgaccgtggcgaaagtgaaaaaagaagatatgtcgatgcagccgattcgtcactggggcgaaacacacagtgaagccgaggttcgcgagctgctggaacagaacccgtctttcgtcttctttaaaccgcaatcttttgctccggtgaaaggggcaagtgcggtgccgctggttggtcgcgcgtcagttgcctctgatcgttccattattccgccaggtactaccttgctggcagaagtgccgttgctggataataacggcaaatttaatggtcagtacgaactgcgtctgatggtggcgctggatgtcggtggtgcaatcaaaggccaacacttcgatatctatcaagggatcgggccggaagccggacaccgcgcaggttggtacaaccactatggacgtgtctgggtgctgaaaaccgccccgggcgcaggtaacgtctttagcggctga

SEQ ID NO: 29039 - DNA, 168 bp, Homo sapiens
  SIMILAR (124)..(59): 361254mologous to Streptomyces violaceoruber putative glycosyl transferase,accession number AJ011500,Smith-Waterman Score =33.
atgatgcccgccatcgcgcttattgtgtcggttattgcctcggtagtcattggcggagcggggagtctggcgttcccgctgcctgcattaatctggtgtgcagtgcgctatacgccgcagatacatcttcagggtaaatttctggtagtggaattgcctgatcaaaag

SEQ ID NO: 29040 - DNA, 1104 bp, Homo sapiens
  SIMILAR (1104)..(412): 991254mologous to Escherichia coli era,accession number M14658,Smith-Waterman Score=1157.
ttagggagaacctacatggccataagcatcaagggtgttaataccggtgttattcgcaagagtaataatttcattgcactggcgctgaaaattaaagaacctcgcaataaagaatcgttgttctttatgtctgtcatggaactgcgcgacctgctgattgcgctggaaagtcgtctgcatcaaaagcataaactggatgctgctgcacaccttcagtatgagcaagctcgcgataaagtcatctttgtcaccggtgcggtggaaatcgtactggtggcaaattcggtgattgatatctcggtcggttcgccgttctccattccgcaaatgttctccgcacgtctcggtattgccacgatggcgatatgcccaattatggtttcttttagcgtggcagcgatcaattcgcgtgatgtcataaccaccgcgttcgttagagacgaaacgttcgatctccacggtcgcggagtacggcagttcagcgccgaggaaacgcatcagtttttcgcggatgatttcagacgccatacaacgctgtgagcgatcggtgatgtaatcttccgggaagtgatgagtcgcttcaggtagatgcttacgcacgattgccgcaatagtgtcaacattcagcccggtttcggcagagattggcacgatatcgaggaagttcatctggcttgccaggaactgcaggtgcggcagcagatcggctttctcctgcacgttgtccactttgttcaccgcgaggattaccggcgctttgccttcgcgcagtttgttgagcaccatttcgtcgtccggcgtccagcgggtgccttcaacgacaaaaatcaccagctcaacatcgccaatagagctgctcgccgctttgttcatcaggcggttaatggcgcgtttttcttccatatgcaggcccggtgtatcgacgtagatcgcctgatacgcgccttcagtatggatccccacaatgcggtgacgagttgtctgcgccttgcgggaagtgatggagattttctgccccagcagtttgttcaacaatgtggatttgccaacgttcggacgtccgacgatggcaataaatccgcagtaacttttatcgatgctcat

SEQ ID NO: 29041 - DNA, 1884 bp, Homo sapiens
  SIMILAR (1366)..(1881): 991254mologous to Escherichia coli K12 orf, hypothetical protein,accession number AE000497,Smith-Waterman Score=866.
atgacggccttccatcgcggcggctaccgtaccggaataaataacatcatcccccagattcggcccggcgttaattccggacacaacaatgtccgggcgcggacgcatcagagcattcacgccaagatagacgcaatcggtcggggttcccatttgcacagcaatatcaccattttcaaagggaggattccagtgtcagagaatttgaagcgccgctgcggttacgatcgggggcgaccactcttagagcacataggagtcttcaagcgcatcgaatccggttcggtggaaatcgtactggtggcaaattcggtgattgatatctcgaagattgtcggtgataaggggctggtggcgcgaatgggcggcgaagaatttgctgttgcagtgccgtcggtgaatcctgtcgatggtctgctaatggcggaaaaaatccgtaaaggcgttgaactgcaaccattcacctggcaacaaaaaacgctttatctcacggtaagtattggcgtcggtagtggtcgcgcatcgtacctaacgctgaccgatgactttaataaattgatggtcgaagccgatacgtgtctgtatcgctcgaagaaagatgggcgcaaccgtaccagcactatgcgttacggagtcgatggcgtcgccggtatcccgtttgataattaccccttcgcttacatggtaagtaacctggcactggcgattattttgctcgacggcgggatgcgcactcaggccagttcctttcgtgtggcgttaggaccggcactgtcgctggcgacgctgggcgtgcttatcacctctggtttaaccggcatgatggcggcgtggctgtttaatcttgatttgattgaaggcttattaatcggcgctatcgtcggctctaccgatgctgcagcggtcttttctctgctgggtggtaaggggcttaacgaacgtgttggctcgacgctggaaattgaatccggcagtaatgatccaatggcggtctttctgacgattaccctaattgcgatgatccagcatcatgagagcaatattagctggatgttcattgtcgatattctgcaacaatttggtctgggcattgtaataggtcttggcggcggttatttactactgcaaatgatcaaccgcatcgccctgcccgccggattatatccattgctggcattaagtggcggtattctgattttctcattaactactgcgctggaaggtagcggtattctggcggtgtatctgtgcggttttatggcgtgggcgtctggttcgtttcgcaaaacccgtctgatattccggataatgtgctcggccagctcggtaatcgcgttcaacatgctttgcgggcttttacgccaaaaggatcagaaagcagtgaagccagcggcgcaaaccatgcgggccaatccggcgtttgataccgaaaaggcgattcaggaactgggcaccggcgaggcgttgatctcttttctggatgcgaaaggaagcccttctgtggtggagcgtgcgatggtgatcgcgccttgttcgcggatggggccggtgacggaagatgagcgtaatggcttgattaatcactctccggtgtatggcaaatatgaggatgaggtggaccgggaatccgcctatgagatgttgcaaaaaggctttcaggccagtaccgagcagcaaaataatcctcccgcgaaagggaaagaggtagcggtggatgacggcattcttggtggattgaaggatattttgttcggcactaccggaccacgcggcgggaagaaagatggtgtggtgcaaacaatggccaaaagcgccgctcgccaagtgacgaatcagattgtacgcgggatgttggggagtttgctgggggggagaagaaggtaa

SEQ ID NO: 29042 - DNA, 2160 bp, Homo sapiens
  SIMILAR (481)..(1089): 1001254mologous to Escherichia coli K12 putative oxidoreductase,accession number AE000165,Smith-Waterman Score=1024.
atgagcgcctggtgcagctatcataccttcgaaggtgctgccgcgttcctgcgccgtcacgcccaggaagagatgacgcatatgcagcgtctgtttgattacctgactgataccggcaatttaccgcgtattaataccgttgaatctccgtttgctgaatattcctcacttgatgaattattccaggaaacctataaacacgaacaattaatcacccagaaaattaacgaactggctcatgctgcaatgaccaatcaggactacccaacatttaatttcctgcaatggtatgtttctgagcagcatgaagaagagaaactgttcaaatcgattattgataaattaagcctggcaggcaaaagcggcgaaggtttactgccgccgtttcaaatcagtgacggcaaatcttactctgatcggtcgaaaaaccgtctttcgaagatatcactcgggatccttagagtcgacctagcatgcagggtggaaccggagattatcctcaatgcaccgcaacaatatctgctggcggggatcggtgacacgctggcgaaatggtatgaagcggtggtgctggctccgcaaccagaaacgttgccgctaaccgtgcgactggggatcaataatgcgcaagccattcgcgacgtcttgttaaacagtagcgaacaggcgctgagcgatcagcaaaatcaacagttaacgcaatcattttgcgatgtggtggatgctattattgctggtggtgggatggttggtggtctgggcgatcgttttacgcgtgtggcggcagctcatgccgtgcataacggtctgaccgtgctgccgcaaaccgagaagtttctccacggcaccaaagtcgcctacggaattctggtgcaaagcgccttgctgggtcaggatgatgtgctggcgcaattaactggagcgtatcagcgttttcatctgccgactacactggcggagctggaagtggatatcaataatcaggcggagatcgacaaagtgattgcccacaccctgcgtccggtggagtccattcattacctgccagtcacgctgacaccagatacgttgcgtgcagcgttcaaaaaacaacttcaaaccgtcagcacggctggaaaaaccatacgcgatggtgtgcatcaatattaccgccgtgaaagtgccaaccgcgataccgcaccgcgaccgctggggcttcaggatcgcctgagctggaaaaaacgtctctcgcgcctgatgaattatccgggcacgcgttacactaaacagatgatggagacggtctgttacccggcaatggttattaaattatgctttcagtacagccagagctgcttcgtaatccggctcggtggtgatttcatccaccagctggctgaaaatcacattgtcattttcgtcaataaccacaacggcacgcgctgccagacctttcagtgggccatcagcaattgccacaccgtaagcttgcagaaattcagcgtacgaaagggagcaaagcaatgcaaaataagtaaatgctttgaattaaaagcactggagcgacagcattccagggacagaagcagactggagcgcctctacgacttccggctgtgcgggtttcgccgcttttgcctgctccagttcctgagtgatttgtttgctatcgggggccgtcgcggcgtacgccccccaactgaggcaccaggccatcagaaaagtgataatcaggcgcacgtcagcgtttcctttgatggattagacctggtcttttttgtcgtcaaccaatgggctggcgtcgtgttctgcttcgatctcttcagcaggaagcggggcaggttcagcgtctggcgtaacaaaggtttcggtagatactgccagcggctggccaattttcgtgacagacaggctttccagttgctcaaccagattcactttacccggtgcaaacaggttgataacggtggaaccgagtttaaagcgacccatttcctggcctttcagcagtgccacagaaccgtcgttttccccggcaggccaggtccagcgcttgatgataccttcgcgcggcggcgtaatggtgcccgcccagaccgtctcaatgctgccaacaatcgtcgctccgaccggaccctattcttcccaccttttaggcagtttcaccctttctcctcctag

SEQ ID NO: 29043 - DNA, 1713 bp, Homo sapiens
  SIMILAR (385)..(1110): 991254mologous to Escherichia coli high-affinity choline transport protein,accession number U73857,Smith-Waterman Score= 1260.
atgatgaataacggcggaagcatggacgctgcggcggtcatattaataatagtattcatcagatcctgcacggtattggaaccgagcatcgggataatcatcagcgggatgacgatcaggaactggatccacgctgcgcgcgccggaacgccgttttcgttcagttcgacggttttcttaccaaagatgccttccgggatttcggagaagaaaattttcaccggcgttgcggtccacatcagcagggaaccgaacatcgcggtaaaggacaccagaccgacaagcgattcatcaacgcttccggtagaccaaatacgccgccatgccgtggaatacctgcaccgatccgccggcgctgtatcgcgacatattgatcctgttcgtatgtttatgggcgacacttcgttcctgcttaatgcactggtgctgaatgttggcgactatgtgaatcgctttatgggcatgacgctcaacagttttgccttcgaccgtccggttgagtggatgaataactggacgctcttcttctgggcatggtgggtggcatggtcgccgtttgtcggcttgttcctggcgcgtatctcgcgtgggcgtaccattcgccagttcgtgctgggcacgttgattattccgtttaccttcacgctgttatggctctcggtgttcggcaatagcgcgctgtatgaaatcatccacggcggcgcggcatttgccgaggaagcgatggtccatccggagcgcggcttctacagcctgctggcgcagtatccggcgtttacctttagcgcctccgtcgccaccattactggcctgctgttttatgtgacctcggcggactccggggcgctggtgctggggaatttcacctcgcagcttaaagatatcaacagcgacgcccccggctggctgcgcgtcttctggtcggtggcgattggcctgctgacgctcggcatgctgatgactaacgggatatccgcgctgcaaaacaccacggtgattatggggctgccgttcagctttgtgatcttcttcgtgatggcggggttgtataaatctctgaaggtagaagattaccgccgtgaaagtgccaaccgcgataccgcgccgcgcaaccgcaactcctgcgccacttcttccatttacaatcgagctcggtaccggaagtatcgagcccattggtacaacctgagcgatggcgcgatggaagatgctctgtacgaaatcgcctccatgcgtctgtttgcccggttatccctggatagcgccttgccggaccgcaccaccatcatgaatttccgccacctgctggagcagcatcaactggcccgccaattgttcaagaccatcaatcgctggctggccgaagcaggcgtcatgatgactcaaggcaccttggtcgatgccaccatcattgaggcacccagctcgaccaagaacaaagagcagcaacgcgatccggagatgcatcagaccaagaaaggcaatcagtggcactttggcatgaaggcccacattggtgtcgatgccaagagtggcctgacccacagcctggtcaccaccgcggccaacgagcatgacctcaatcagctgggtaatctgctgcatggagaggagcaatttgtctcagccgatgccggctaccaaggggcgccacagcgcgaggagctggccgaggtggatgtggactggctgatcgccgagcgccccggcaag

SEQ ID NO: 29044 - DNA, 3039 bp, Homo sapiens
  SIMILAR (453)..(52): 991254mologous to Escherichia coli rhsA,accession number X78541,Smith-Waterman Score=707.
tcatccagttttgccacgccgcggcgcacaagccacagtgactcgctgcgggctgtagccgtcctcaccgggaaacaggtgctcaaaatacaggcttctgccgccgttatcactgagtatcagtgtgttatcgcgcagctgtaagcggatatccgcaggcattttccagccggggccgaggctccccaccggcgcgggcgtttttgtccggtaactgctgtaggtgcgggagaggatgaacggcagcgggccgggcagggcgatgtcggtttcaccgggaaggacctttgcaccgagcaggggattgaccggatggccggacgtcactccgccggggcacaccgaacaggccacgccggtgggggcaccaatacgtaccccggctgaaccctgaacaatgctaccgccatactgcgtcatgtcaccctgacgcgccgccggttttccgctcatcgtaaaatccttttctattattttaatgacagtatcttcatacgaaaaagcgaagaaaaagccgcgctgggcgataacgtcatcggcaaaatgctgcacgtcacccatgtcacctttcaacacggcgatttccagacagtcgtcgtggttgatgtgcacatgcagcgtggcgacggagaggtcgcggtgatgatgctgggtggagacaatgcggctggctaagtcgcgtctaacgagtgcatacacatacgacagcaccgcgaaaacttgcgtgccgtgctgatgggtggcctcttgcgcggttctggtgacaactgtttcgtgtttataaccagatacccatgctttggaccaagatatcgtggctgctgtttctagtaagaatagcaaccagatgactccaggatcccaatggaaacggcggctacgaccattgtcgtcatatctactggtaattgacgcgcgaccacctgaccctcggatgctgctccattgctcaccatatgcgtcgaagccacctagcgccgtggaacatatatgtgggtagaactgtagatgttgcacaataccggacgagcataggccgaagatggtcgaaggaatgagacaaccgatgatctcaagtagcgctggagactcgatgtgcccaacggagagagagggtccatggagggcacacgagccactcgtctccaagtgctccaggccgcctaacacatcgacgctaacatcagtcaacagcaagggttcttcttcagtccacggataacgcccttgcaaatcagccgtaatatttttcgctgtcaccagattaatcacttcggcaattcgcaacgtaacgggaccgcgagtccccagatgccaggctccatcggcaaaacggaaaggcaggacaaaatcgacaccgttaacctgattatctggcatccaggcactaccgcctttcaacacgccgtgtcctcccgcgcggaatccttgttcaggcgcagcagaaaatgcaacctgagcatacagttcaccatcgcgtaagttcatcttccagtcgggtggcaccagcggctggaatacggtcagtgattgtttaggccaccaggcgttaccgcgcagacgaataccgtcccagcgaccatttacccgaaccgggccaatctcaccagcatgtaaatcgcctttgtcctgcgacatcgccaggtggcattgcatacgcgtgtaaaactcccttttccccagtagcgccaccgcttgcccctgggtcagcacactcagtcgtccgctgaccagagcgttctcaagccctgcctgccagttgtcgactttgacacccagtcggccactcaaaggaaaacctgcatacggccagctccagcgaccatcgcttacggtcaattgttgacgagtaatttgccacggcaaatcgagcaacggatcgccgttatcccgtgccagcacgatcaattgcccgctattttcctgccagtccagctcggcatccaccagtgacggttcctgcggcaagtttaacgtcgcagtagcatgcccacttacaggaagtccatccggcacgagcggcatagcaaattcccccaccagttttaccggcggctgattttcaaacgcgacgacatccagttcgctgactgtaagttgttgccctttcagctggccttgaaatttaactttttcgccctgagtcgcagcgatgtaaacaatacctgctaaaccagtacccagcatggttgccagcggaacggtacgtttcgggtttttaaccataccagtacttacagctgcggattcaacacccacgaaggcccacaggcagagcagaatacttttaatgatcgcatgaccatcagtggtatccgcagtattccagttagctgcataagttgccgcatcaaaccaatgccagccaacaatagcagtcatcaccacaggaataagaaccagcaccagaccaatagtggcggcattaccggctttgtcaccggtgcggtggaaatcgtactggtggcaaattcggtgattgatatctcggtcggttcgccgttctccattccgcaaatgttctccgcacgtctcggtattgccacgatggcgatatgcccaattatggtttcttttagcgtggcagcgatcaattcggccagccacaatcgacaaggtttcgcgttgcagttcttcttcaacgatgcggcgtgcggcagcggcgagttcaggatcttgatgcaggaagagcatcccgacagcgtagttttttgctaaacgccagccgcgctcctgcgcaacgatgcgaaaaaagcgatccggtttttgtaacagcaagccgcaaccgtcgccggttttaccatcggcgagaatcgcgccacggtgctgcatgcgggccagtgcgtgtattgcagtacgcactaccttgtggctaggttcgccttctatgtgggcgatcaggccgaaaccacagttatccctctcaagggatttatcgtacaacatatcgtgaacctcccccaggctctgcgggaaccccacttccgaaccgctgcgcacgggcacagaaagagcgtggcgacggggtttgcgtgtcat

SEQ ID NO: 29045 - DNA, 586 bp, Homo sapiens
  SIMILAR (362)..(583): 1001254mologous to synthetic construct lac repressor,accession number A14595,Smith-Waterman Score=354.
ggattttgccgatttcggaaccaccatcaaacaggattttcgcctgctggggcaaaccagcgtggaccgcttgctgcaactctctcagggccaggcggtgaagggcaatcagctgttgcccgtctcactggtgaaaagaaaaaccaccctggcgcccaatacgcaaaccgcctctccccgcgcgttggccgattcattaatgcagctggcacgacaggtttcccgactggaaagcgggcatcattggcggagcggggagtctggcgttcccgctgcctgcattaatctggtgtgcagtgcgctatacgccgcaggtaacatgtctgttgacctttgtcaccgggattttgccgatttcggaaccaccatcaaacaggattttcgcctgctggggcaaaccagcgtggaccgcttgctgcaactctctcagggccaggcggtgaagggcaatcagctgttgcccgtctcactggtgaaaagaaaaaccaccctggcgcccaatacgcaaaccgcctctccccgcgcgttggccgattcattaatgcagctggcacgacaggtttcccgactggaaagcgggcagtga

SEQ ID NO: 29046 - DNA, 1518 bp, Homo sapiens
  SIMILAR (520)..(1464): 991254mologous to Escherichia coli K12 orf, hypothetical protein,accession number AE000250,Smith-Waterman Score=1587.
ttcttcgtgatggcggggttgtataaatctctgaaggtagaagattaccgccgtgaaagtgccaaccgcgataccgcaccgcgaccgctggggcttcaggatcgcctgagctggaaaaaacgtctctcgcgcctgatgaattatccgggcacgcgttacactaaacagatgatggagacggtctgttacccggcaatggaagaagtggcgcaggagttgcggttgcgcggcgcgtacgtggagctaaaaagcctgccaccggaagagggacagcagttgggtcatctggatttgttggtgcatatgggcgaagagcaaaactttgtctatcagatttggccgcagcaatattcggtgccgggctttacctaccgcgcacgcagcggtaaatcgacctactaccggctggaaaccttcctgttagaaggcagccagggcaacgacctgatggactacagcaaagagcagcgaacatgctatcttggttcggtcagtattgatagtctggatttctggcctttgcttgcggactggttcagtgagcaattctcaacgggcgtgttgatcgtgccttgtatgctgacgttggctattcctggagtgctgccgcgctttaaagcagaacagatgatgcccgccatcgcgcttattgtgtcggttattgcctcggtagtcattggcggagcggggagtctggcgttcccgctgcctgcattaatctggtgtgcagtgcgctatacgccgcaggtaacatgtctgttgacctttgtcaccggtgcggtggaaatcgtactggtggcaaattcggtgattgatatctcggtcggttcgccgttctccattccgcaaatgttctccgcacgtctcggtattgccacgatggcgatatgcccaattatggtttcttttagcgtggcagcgatcaattcgctaatgaagcaagttgcgctgcgagccgactttgattttctgactcaggtttactcacggtccggtctttatgaggcgctgaaaagtccatcgctgaaacagacacaacatctgactgtcatgctgcttgatatcgactatttcaaaagcattaacgataactatggacatgaatgtggcgataaagtgttaagcgtgtttgcccggcatattcagaagattgtcggtgataaggggctggtggcgcgaatgggcggcgaagaatttgctgttgcagtgccgtcggtgaatcctgtcgatggtctgctaatggcggaaaaaatccgtaaaggcgttgaactgcaaccattcacctggcaacaaaaaacgctttatctcacggtaagtattggcgtcggtagtggtcgcgcatcgtacctaacgctgaccgatgactttaataaattgatggtcgaagccgatacgtgtctgtatcgctcgaagaaagatgggcgcaaccgtaccagcactatgcgttacggtgaggaagttgtctgacatctttattcattacgcgcgatttgaatgcaatgtgttctaccactttat

SEQ ID NO: 29047 - DNA, 810 bp, Homo sapiens
  SIMILAR (26)..(190): 1001254mologous to Escherichia coli K12 putative structural protein,accession number AE000507,Smith-Waterman Score=267.
ttatgcaaactgagcaacagcgacggtaacacggctttgtatccagtgtggattatttcttttgcaacatggtgcggaaagcgcgttggttgatgagctttcctcacgactgggtcgggcactgggaatggacagcgtcgaaagttctatctcttcgaacgccatagtgctgacaactattaaagatggcaatgcctgacatcgacacgtaaaaatcacgatcgcggcattaatatgcatgtggtgactgaagtccagcacattgtgattctgcggagcatcatctgccagatccagagccataggagcagctccaaaccttctgggtcccccaggagagagtccacagtcactcatccagtgctcagagcctgccagagtagaggtatcagctgggtcatccatcaccaggataggaggtgcaacaggcgtcagcttgtttctacacgggcagggaagttcagtcaggcctccttgtatagcaatagcagacttaaccctgttagcaaactggactgcatcttctccttccggttcagcagtgtcacctctgcagccctggtatctcttcactggcccaaattttctcttcttatgaggataccagtcagattggattagggaccaccctaaagatttcatttttaactgaactcctttaagtcctaatctccaattttttcttaatataacttccatcccaccttcctcgtctgcttgccaaagaaggaaaatagacttgttctctcgaataatcaaatgagactgaaagctggcgttctgaaagaaactgattaaatgacgcatcat

SEQ ID NO: 29048 - DNA, 1866 bp, Homo sapiens; identical to SEQ ID NO: 21510
  SIMILAR (1548)..(799): 931254mologous to Escherichia coli fatty acid oxidizing complex,accession number M59368,Smith-Waterman Score=1151.
  misc_feature (1)...(1866): n = a,t,c or g

SEQ ID NO: 29049 - DNA, 1106 bp, Homo sapiens
  SIMILAR (29)..(697): 901254mologous to Escherichia coli K12 putative structural protein,accession number AE000507,Smith-Waterman Score=1043.
ttaacctaccgcaaaacaaccgtgcttcatgatacaaatggattctcattatctgaacaatacgcagcacgtctatgacaaagggcgagttatgcaaactgagcaacagcgagccgtaacacggctttgtatccagtgtggattatttcttttgcaacatggtgcggaaagcgcgttggttgatgagctttcctcacgactgggtcgggcactgggaatggacagcgtcgaaagttctatctcttcgaacgccatagtgctgacacctattaaagatgggcaatgcctgacatcgacacgtaaaaatcacgatcgcggcattaatatgcatgtggtgactgaagtccagcacattgtgattcttgcggagcatcatctgctggattacaaaggcgtagagaaacgatttagccaaattcagccattacgttacccaagatggctggtagccttaatggttggcctttcttgcgcctgtttctgtaaactcaataacggtggctgggatggtgccgtcatcaccttctttgccagtacgaccgcgatgtatatccgccagctgctggcacaacgtcatcttcatccacagatcaacttttgccttaccgctttcgccgccaccacctcaacgttaagtcagctttcggcattttcgctctcctttatgctgctggcactgctgctggtgttgcgtggcgatctgctcgaccgctggcagcagcagctacctccagaaagcccgaactactttttaattaacatcgccacagaacaggtagcaccgctaaaagcgttcctcgcggaacatcagatagtcccggaatcgttttatccggtggtgcgggcgcggctgacggcgattaacgataagccgacagaaggtaatgaagatgaggcgcttaaccgcgaactcaattttaccttggcaaataccgcggcccgatcataatccgattgtcgccggtaactggccgccaaaagccgatgaaatgtccatgaaacagagaactgactgcttctgcagtcactctatgatccccaatggtttattcataataaaatttgagaacttgctcattaaatttaactcaaattttgcctggtaa

SEQ ID NO: 29050 - DNA, 696 bp, Homo sapiens; identical to SEQ ID NO: 7179
  SIMILAR (175)..(648): 871254mologous to Escherichia coli K12 aspartokinase I, homoserine dehydrogenase I,accession number AE000111,Smith-Waterman Score=701.

SEQ ID NO: 29051 - DNA, 1086 bp, Homo sapiens; identical to SEQ ID NO: 28974
  SIMILAR (445)..(1080): 951254mologous to Escherichia coli K12 putative transport system permease protein,accession number AE000305,Smith-Waterman Score=1000.

SEQ ID NO: 29052 - DNA, 978 bp, Homo sapiens
  SIMILAR (462)..(1): 921254mologous to Escherichia coli 37KD protein, similar to YI22-ECOLI,accession number D85613,Smith-Waterman Score=765.
cgccgtgttcttcggttcaagtcccaacatccgggcgaactggcgtgtttcattagcccggtagcatgaaccattatccgtcagccactccactggagacgacggaagatcgttgccgaagcggcgttccaccgctcccagcatgacgtcctgtactgtttcactgttgaagccgccggtagtgaccgcccagtgcagtgcctcacgatcacagcagtccagcgcgaacgtgacacgcagtctctgtccgttatcacagcagaactcgaacccgtcagagcaccatcgctgattgctttctttcacggccactctgcctgtatgtgcccgtttcgatggcggtacagcaggttttcgatcaagcaacagcgcattctggcgcatgatccggtaaacacgtttggcattgatcgcaggcatacctatcaagttctgcctgtgtgcgaagcagcgcccatacccgacgataaccatacgttggcagctccccgataacatggcgtatacggagaagcacatccgtatcatcagtgtgacgactgcggcggccatccatccagtcatcggttcgtctgagaatgacgtgcaatccccatccccgggcaataagggcgcgtgcgctatccacttttttgcccgtccatattcaacggcttctttgaggagttcattttccatcgttttcttgccgagcaggcgctggagttctttaatctgcttcatggcggcagcaagttcagaggcaggaacaacctgttctccggcggcgacagcagtaagacttccttcctggtattgcttacgccagagaaataactggctgggtgctacaccatgttgccgggaaacggacctgcaggcatgcatgcttgcatcagcaagcttgacaagtaggcggccgttaaaaagcgtattagtgagattattcacgagaatagaggccgatacggataccgtagggtaccgctgtctcttcat

SEQ ID NO: 29053 - DNA, 705 bp, Homo sapiens
  SIMILAR (705)..(256): 1001254mologous to Escherichia coli 100 pct identical to sp:YI5A_ECOLI,accession number AP002527,Smith-Waterman Score=764.
cgaatcggggaccaccgccagcatctgatacaggttaatcaggtcagcgctgacgtcagccagaaggaagcgttcgtgcttgtctgagttaaggaacaccgagccgccacccacaaaaggctcaataaggcgtttacctgcggggatcaaacgatccagttccggcagcagcgaatatttgccgccagcccatttaaggaacgggcgctgccagtgcgcagcgccggttcttctatgggcatcgccgcagctccattgcctttcaagatcctcaatgcgtcggtcttttgacagctccaatgctgatgccgctttttctggatcaactgatattgcaatgtttcttttggtgccaatcttgagcgcgcgtaaaccagcttctccgcgctcttcatagaccttcagccacctggctacagaaccactaccagcaagcataaagtgagcagcagcctgattaagggacatgtgctgctcgatcacagctttcacgaccttaatacgcaactctggatcagcactaacgcctttaggtttgggaattaaacctttttctccatgtttttcatagagggcaacccatgtcctgacctgggttcgggggacaccaaaacgtgccgagatgatcctgtaaccatcatcagttgtgaagtagtgattcacgacttcaaggcgcttttcaaaagggtattttggctttgacat

SEQ ID NO: 29054 - DNA, 2910 bp, Homo sapiens; identical to SEQ ID NO: 18222
  SIMILAR (43)..(1311): 991254mologous to Homo sapiens DLL3 protein precursor,accession number AF241373,Smith-Waterman Score=2405.

SEQ ID NO: 29055 - DNA, 2544 bp, Homo sapiens
  SIMILAR (1)..(957): 991254mologous to Escherichia coli IS5 39.3kDa protein,accession number U70214,Smith-Waterman Score=1649.
atgagtcatcaacttaccttcgccgacagtgaattcagcagtaagcgccgtcagaccagaaaagagattttcttgtcccgcatggagcagattctgccatggcaaaacatggtggaagtcatcgagccgttttaccccaaggctggtaatggccggcgaccttatccgctggaaaccatgctacgcattcactgcatgcagcattggtacaacctgagcgatggcgcgatggaagatgctctgtacgaaatcgcctccatgcgtctgtttgaccggttatccctagatagcgccttgccggaccgcaccaccatcatgaatttccgccacatgctggagcagcatcaactggcccgccaattgttcaagaccatcaatcgctggctggccgaagcaggcgtcatgatgactcaaggcaccttggtcgatgccaccatcattgaggcacccagctcgaccaagaacaaagagcagcaacgcgatccggagatgcatcagaccaagaaaggcaatcagtggcactttggcatgaaggcccacattggtgtcgatgccaagagtggcctgacccacagcctggtcaccaccgcggccaacgagcatgacttcaatcagctgggtaatctgctgcatggagaggagcaatttgtctcagccgatgccggctaccaaggggcgccacagcgcgaggagctggccgaggtggatgtggactggctgatcgccgagcgccccggcaaggtaagaaccttgaaacagcatccacgcaagaacaaaacggccatcaacatcgaatacatgaaagccagcatccgggccagggtggagcacccatttcgcatcatcaagcgacagttcggcttcgtgaaagccagatacaaggggttgctgaaaaacgataaccaactggcgatgttattcacgctggccaacctgtttcgggcggaccaaatgatacacggtcaggcggtcgaaattgctggccataaagttgatgtactcttccgtcagcagcgcaacgcccggaaagccgcccatggtgttagggccgtctggcaacagatgaccatgccaggctccgagatcgaaaaacggattaaaacgctggtgatcgtcgtaatcgtaatccttcatgtactgcggcgcgccagtacggttaatcacgtttttataattgtcggcgttagcggcatgggcggaaaaacttatcagcagagcgcagtacccgtggctgacatgaccacggcacgcactatgtccgttcgtgagccacctcggcaccagatcggcatgctccatcgtccgatgcctacaggtcaccctcgctctcgacatctcaccgctccaacacagcatcgcgtgctggtacacgacatccgcaacgcagagcgagtgtgctccacgcacaccctctcttccgtcactgcgacgtgcgcaccaacgcatccacctgcatcccggccatcgggtcagctctcggagctgtgcactactgcccctcgagagctccgcgccctcactgacggccgacgactctctaatgtcgcactcgcggcggccagtaacaaggcatgctgcgtcgcatcactacgtggccgaatcttcccacaaagcacagcatataacggcctgggccagacctgcacgatgagctccgtcggctacgatcacagtgaatcgctcccatcagcctcagacttgccgatacatgctaccccgtccgcaggcgtaccaggcagggctctcagcaagcctgacaagtatgcggacgttaaaaagcgtattagtgagatttatcacgagaatagaggccgatacggataccgtagggtaacgctgtctcttcatcgagaagggaaacagattaaccataaagctgttcagcgcctgatgggaaccctctcacttaaagcagcgattaaggtcaagcgataccgctcttacagaggagaggtagggcaaaccgcccctaatgttctccaaagagatttcaaggctacgcggccaaacgagaagtgggttaccgatgttactgaatttgcagtcaatgggcgcaagctgtatttgtctccagtaatagatctcttcaacaacgaagttatttcttacagcctttcggaaagaccagtgatgaacatggttgagaatatgctcgatcaggcattcaaaaagcttaatcctcacgagcatcctgttctgcactctgaccagggatggcagtatcgtatgagaagatatcaaaatatccttaaagaacatggtattaaacaaagcatgtccagaaaaggcaattgtctggataatgctgtggtggagtgtttctttggaaccttaaagtcggagtgtttttatcttgatgagttcagtaatataagcgaactgaaggatgctgttacggaatatattgaatactacaacagcagaagaattagcctgaaattaaaaggtctgactccaattgaatatcggaatcagacctatatgcctcgtgttaaactgtccaactttttggggtcagtactacagggaccatgcaggcagtga

SEQ ID NO: 29056 - DNA, 1569 bp, Homo sapiens; identical to SEQ ID NO: 28980
  SIMILAR (718)..(1566): 991254mologous to Escherichia coli 100 pct identical to sp:YI5B_ECOLI,accession number AP002527,Smith-Waterman Score=1478.

SEQ ID NO: 29057 - DNA, 845 bp, Homo sapiens; identical to SEQ ID NO: 28984
  SIMILAR (845)..(237): 961254mologous to Homo sapiens Eag-related gene member 2,accession number AF311913,Smith-Waterman Score=1039.

SEQ ID NO: 29058 - DNA, 1350 bp, Homo sapiens; identical to SEQ ID NO: 28987
  SIMILAR (499)..(1347): 991254mologous to Escherichia coli 100 pct identical to sp:YI5B_ECOLI,accession number AP002527,Smith-Waterman Score=1478.

SEQ ID NO: 29059 - DNA, 2460 bp, Homo sapiens; identical to SEQ ID NO: 28995
  SIMILAR (2460)..(1894): 1001254mologous to Escherichia coli glutamate--cysteine ligase (EC 6.3.2.2),accession number D90892,Smith-Waterman Score= 1012.

SEQ ID NO: 29060 - DNA, 2550 bp, Homo sapiens; identical to SEQ ID NO: 28997
  SIMILAR (2050)..(2535): 1001254mologous to Escherichia coli O157:H7 DNA gyrase, subunit A, type II topoisomerase,accession number AE005455,Smith- Waterman Score=809.

SEQ ID NO: 29061 - DNA, 1383 bp, Homo sapiens
  SIMILAR (805)..(1383): 971254mologous to Escherichia coli Ferredoxin I,accession number D90724,Smith-Waterman Score=984.
atggcgatccatcaggttagcccctttcgtgaagagccagtggattgcgttctgtgggttaaaaacagccaacttatgcctaatgattacaacccaaacaacgtggcaccacccgaaaaaaaactgctgcaaaaatccattgaaatagatggttttacccaacccattgtggtcacacatacggataaaaatgccatggaaatcgtggatggttttcaccgccatgaaattggtaaaggctcatcatcattaaaattacgcttaaaaggttatttgccggtgacctgtctggaaggtacgcgtaatcaacgcatcgccgcgactattcgtcataatcgcgctcgtggacgccatcaaatcaccgccatgtcggaaatcgtccgtgaacttagccagttgggatgggacgataataaaattggcaaagagctgggaatggacagcgacgaagtgctgcgcctgaagcaaattaacggcctgcaagagttgtttgccgaccgtcaatattcccgcgcctggacgctaaagctggcgcagcgttcagctgctgccagcaacgtcgattccttcttggcaaacagagacgaatcagtttatgggaagggatcggccaacaccgacagcggaatcgccgtacgccgtgctcctgcgtcagccactggcaaaactcaacatcatccaggaccagtgatgaacatggttgagaatatgctcgatcaggcattcaaaaagcttaatcctcacgagcatcctgttctgcactctgaccagggatggcagtatcgtatgagaagatatcaaaatatccttaaagaacatggctgcggcgtcacgccgattatgtcgatgcgtcgctggcttgcgaagaaccgtccacaggccgatgtgcgggtgatctacaacgtgcgtacgccgcaggatgttattttcgccgatgagtggcgtaactatccggtaacgctggtggcagaaaataacgttaccgaaggctttatcgctggtcgtctcactcgcgaactgctggcaggtgtacctgacttagcttcacgtaccgtgatgacctgcggcccggctccgtatatggattgggtagagcaggaagtgaaagcgctcggcgtgacgcgtttctttaaagagaaattcttcaccccagtagcagaagcggcgaccagcggtctgaaattcaccaaactgcaaccggcacgagaattttacgccccggttggcaccacgctactggaggcgctggaaagcaataacgttccggttgtcgctgcctgccgtgcgggtgtttgcggctgctgtaagacaaaagtggtttccggtgaatatacggtgagcagcacaatgacgctgaccgacgccgaaatcgctgaaggttac

SEQ ID NO: 29062 - DNA, 2499 bp, Homo sapiens
  SIMILAR (589)..(1113): 981254mologous to Escherichia coli 100 pct identical to sp:YI5B_ECOLI,accession number AP002527,Smith-Waterman Score=909.
atgctggaagagaaatacatcgcgtcggtcctgttgttcgtggcccacggggattgttacctgaactctgattcgggtcctctgggatcccgtgtgcacggcaactcccgggacctcccttcaggtaatacgggggcccggggagtaaacctttctgtttcccccacgggggcggatatcccatcggcaccaccacttttaccgtatcgccaaattgccgatgaaactctggcgttgatgcgcgagatgacccatgcgggtgaactggaacacctgacgcctgaacgggtatggaaagagacggaaagcgccctcaccacccgcaatccacaggtgttcttccaggtactgcgcgattgcggcgcactgcgcgttttattcccggaaattgacgcactgtttggcgttccggcgcctgccaagtggcatccggaatcatacggtatgatggaccggcgcaggaacgtggtcaaccctcgccccgcacatcggggtcatgtcttccgccatatcttcgtggtccagacccgcgataccgttcagcgcagaagagtaaacgatcgggaagtccagctgctcgtctgtcgcgtcgaggctctcagcaagcctgacaagtatgcggacgttaaaaagcgtattagtgagatttatcacgagaatagaggccgatacggataccgtagggtaacgctgtctcttcatcgagaagggaaacagattaaccataaagctgttcagcgcctgatgggaaccctctcacttaaagcagcgattaaggtcaagcgataccgctcttacagaggagaggtagggcaaaccgcccctaatgttctccaaagagatttcaaggctacgcggccaaacgagaagtgggttaccgatgttactgaatttgcagtcaatgggcgcaagctgtatttgtctccagtaatagatctcttcaacaacgaagttatttcttacagcctttcggaaagaccagtgatgaacatggttgagaatatgctcgatcaggcattcaaaaagcttaatcctcacgagcatcctgttctgcactctgaccagggatggcagtatcgtatgagaagatatcaaaatatccttaaagaacatgacttcagcgatatttttggtgacgttttcggcgatatttttggcggcggacgtggtcgtcaacgtgcggcgcgcggtgctgatttacgctataacatggagctcaccctcgaagaagctgtacgtggcgtgaccaaagagatccgcattccgactctggaagagtgtgacgtttgccacggtagcggtgcaaaaccaggtacacagccgcagacttgtccgacctgtcatggttctggtcaggtgcagatgcgccagggattcttcgctgtacagcagacctgtccacactgtcagggccgcggtacgctgatcaaagatccgtgcaacaaatgtcatggtcatggtcgtgttgagcgcagcaaaacgctgtccgttaaaatcccggcaggggtggacactggagaccgcatccgtcttgcgggcgaaggtgaagcggcttttggtccacaatgccaggcggtcgaacagcaagattggtgtagtgaaacagaatcggtgctttacgcattttttcgtacctggcgcggcgaacgcaactggctggagaatatgcacgggcatgattatgagcatcatcatcacgatcacgaacatcaccacgaccatggacatcatcaccatcacgaacatggcgagtatcaggatgcccatgcacgagcccatgccaatgacatgtgctgctttggtcactctagaggatcccccaacttaaatgtacatctctatgtcatagaggggaacgaagatatagaccacgtccctgaatctctggcttgtcgactgttattacgcgcctggcagcatcttgatgccagacagccgcagcaggcctgcgaactgcttcatgccgcgctgcattatccggagaatttaagcgaaggccgtttaccggggcaaactgataacgacatctggttctggcaggcgatatgcgccaacgcgcagggcgatgaaactgaagcgacgcgttgtttacgtctggcggcgaccggcgatcgcactattaacattcacagttattacaacgatcagccggttgattatctcttctggcaagggatggcgctgcgactgctgggcgaacaacaaaccgcacagcaactgtttagtgaaatgaaacagtgggcgcaagagatggcgaaaaccagtatcgaagcggatttctttgccgtctcgcaacctgacttgttgtcgctgtatggcgatttacaacagcagcataaagaaaaatgcctgatggtggcgatgctggcgtccgcgggactcggggaggttgcgcaatatgagtctgctcgcgctgaattgacggcgattaatccggcttggccgaaagcggcattattcaccaccgtgatgccttttatttttaaccgcgttcactaa

SEQ ID NO: 29063 - DNA, 2056 bp, Homo sapiens
  SIMILAR (240)..(884): 1001254mologous to Escherichia coli K12 putative transport protein,accession number AE000261,Smith-Waterman Score=1052.
aggtaatccggctgggagcacagcaggttgtcgatatcgacgcccagtttacgtgcgtagattgggtccagcgcgtgttcagcatcgataaacgcacaggttttaccttcacgctgcgctgcggcgatcacctgcagcgtcagcgtggttttaccggaagattccggtccgtagatttcgacgatacggcccatcggcagaccacctgccccaagcgcgatatccacgcgagtcgtcgagtcatgttccttgccatggtttcttacattaaacgcgcccgctccatgcgcgatattcgtaacgaaaaaggcaccgcaaaacccgatcctgcggttatgaaacgactgattcaactcggtttgccgattgcgctggcactgttctttgaagtgacactgtttgccgtcgtggctctgttagtgtctccgctcggtattgttgatgtcgcaggacaccagattgccctgaactttagttcactaatgttcgtgcttccaatgtcgctggcggcagcggtaactatccgcgtaggttatcgtctgggtcagggctcaacgctggatgcgcaaaccgctgcgcggaccgggcttatggtgggtgtctgtatggcaaccctgacggccattttcacggtttcactgcgggagcaaatcgccctgttgtacaacgacaatcccgaggttgtaacgctggctgcgcatttgatgttgctggcggcggtatatcagatttctgactcaatccaggtgattggcagtgggattttgcgtggttataaagatacgcgttccattttctatattacctttacggcttactgggtgctgggcttgccaagcggctatattctggcactgaccgatctggtcgttgaacctatgggccagcaggcttctgatagcttattattgcctacaacactgcactggattaagatgaaaacgattgaagttgatgatgaactctacagctatattgccagccacactaagcatatcggcgagagcgcatccgacattttacggcgtatgttgaaattttccgccgcatcacagcctgctgctccggtgacgaaagaggttcgcgttgcgtcacctgctatcgtcgaagcgaagccggtcaaaacgattaaagacaaggttcgcgcaatgcgtgtctatgaagagcgcggagaagctggtttacgcgcgctcaagattggcaccaaaagaaacattgcaatatcagttgatccagaaaaagcggcatcagcattggagctgtcaaaagaccgacgcattgaggatcttgaaaggcaagttcgatttcttgaaacgcggcttatgtatctaaaaaagctgaaagccttagctcatcccacgaaaaaggctgcggagataccgcgcagtacgttttattatcatctaaaggctctcagcaagcctgacaagtatgcggacgttaaaaagcgtattagtgagatttatcacgagaatagaggccgatacggataccgtagggtaacgctgtctcttcatcgagaagggaaacagattaaccataaagctgttcagcgcctgatgggaaccctctcacttaaagcagcgattaaggtcaagcgataccgctcttacagaggagaggtagggcaaaccgcccctaatgttctccaaagagatttcaaggctacgcggccaaacgagaagtgggttaccgatgttactgaatttgcagtcaatgggcgcaagctgtatttgtctccagtaatagatctcttcaacaacgaagttatttcttacagcctttcggaaagaccaaatacggtgattcgtattaaaggcgatctggtttctaaaccttatatcgacatcacactcaatctgatgaagacgtttggtgttgaaattgaaaatcagcactatcaacaatttgtcgtaaaaggcgggcagtcttatcagtctccgggtacttatttggtcgaaggcgatgcatcttcggcttcttactttctggcagcagcagcaatcaaaggcggcactgtaaaagtgaccggtattggacgtaacagtatgccagg

SEQ ID NO: 29064 - DNA, 2100 bp, Homo sapiens; identical to SEQ ID NO: 28990
  SIMILAR (2096)..(1872): 311254mologous to Homo sapiens endothelial nitric oxide synthase,accession number X76303,Smith-Waterman Score=45.

SEQ ID NO: 29065 - DNA, 1569 bp, Homo sapiens
  SIMILAR (796)..(1566): 951254mologous to Escherichia coli 100 pct identical to sp:YI5B_ECOLI,accession number AP002527,Smith-Waterman Score=1310.
atgcagctggttggcgacatcaagggcgatgccaagatccttatgggcaagatcgatcatgaaggcgggagaaagatctccgctgaggactttgtttggccaggaagtggtgaagtgacctttaccggcggcggtaccgctcatcactttgacggcaacatcgaagggaagattcagggcttcgcacaaaacggcggcttctgccgaaagcgcattgagcgcgatgctcatgtagttgttgatgagcttaacgcggatccccatgcccggaccgccagcgttgatcaactcactgcccatcgccatcaggatcggtgtggcacgttcaacttgttcagcggtgccgccagccagcagatcatctcggcacgttttggtgtcccccgaacccaggtcaggacatgggttgccctctatgaaaaacatggagaaaaaggtttaattcccaaacctaaaggcgttagtgctgatccagagttgcgtattaaggtcgtgaaagctgtgatcgagcagcacatgtcccttaatcaggctgctgctcactttatgcttgctggtagtggttctgtagccaggtggctgaaggtctatgaagagcgcggagaagctggtttacgcgcgctcaagattggcaccaaaagaaacattgcaatatcagttgatccagaaaaagcggcatcagcattggagctgtcaaaagaccgacgcattgaggatcttgaaaggcaagttcgatttcttgaaacgcggcttatgtatctaaaaaagctgaaagccttagctcatcccacgaaaaaggctgcggagataccgcgcagtacgttttattatcatctaaaggctctcagcaagcctgacaagtatccggacgttaaaaagcgtattagtgagatttatcacgagaatagagcccgatacggataccaagggaaacagattaaccataaagctgttcagcgcctgatgggaaccctctcacttaaagcagcgattaaggtcaagcgataccgctcttacagaggagaggtagggcaaaccgcccctaatgttctccaaagagatttcaaggctacgcggccaaacgagaagtgggttaccgatgttactgaatttgcagtcaatgggcgcaagctgtatttgtctccagtaatagatctcttcaacaacgaagttatttcttacagcctttcggaaagaccagtgatgaacatggttgagaatatgctcgatcaggcattcaaaaagcttaatcctcacgagcatcctgttctgcactctgaccagggatggcagtatcgtatgagaagatatcaaaatatccttaaagaacatggtattaaacaaagcatgtccagaaaaggcaattgtctggataatgctgtggtggagtgtttctttggaaccttaaagtcggagtgtttttatcttgatgagttcagtaatataagcgaactgaaggatgctgttacggaatatattgaatactacaacagcagaagaattagcctgaaattaaaaggtctgactccaattgaatatcggaatcagacctatatgcctcgtgtttaa

SEQ ID NO: 29066 - DNA, 1605 bp, Homo sapiens
  SIMILAR (967)..(1590): 991254mologous to Escherichia coli 100 pct identical to sp:YI5B_ECOLI,accession number AP002527,Smith-Waterman Score=1079.
atgaaagttcccaggggagatgtgatgttccagctgaatcttcgcaaagatgacgggcagttcgaggatcagctgcttcttcttgttctccttcccaaacacagagggcatctccttcttcaggtagctgatgatgtttggttcaagaaccggagggctaaatgcaggcagcagcgacagcagcagaaacagcagcagcagcccccagggggccaggccaaggcccggcctgccaagaggaaggcgggcacgtccccaagaccctccacagattttagatcccgggatggcattcctgagaaagcaacccgaaccagctgtccttctgacagctcggtgttcagcttacagagaccacccctttcctccacagggagaggctcctccctctcctgggacagctcacaagtcctagtgattctctcaaccctaacaccgtctggcacgattgtgaccgctgaaccaaaatacccttttgaaaagcgccttgaagtcgtgaatcactacttcacaactgatgatggttacaggatcatctcggcacgttttggtgtcccccgaacccaggtcaggacatgggttgccctctatgaaaaacatggagaaaaaggtttaattcccaaacctaaaggcgttagtgctgatccagagttgcgtattaaggtcgtgaaagctgtgatcgagcagcacatgtcccttaatcaggctgctgctcactttatgcttgctggtagtggttctgtagccaggtggctgaaggtctatgaagagcgcggagaagctggtttacgcgcgctcaagattggcaccaaaagaaacattgcaatatcagttgatccagaaaaagcggcatcagcattggagctgtcaaaagaccgacgcattgaggatcttgaaaggcaagttcgatttcttgaaacgcggcttatgtatctaaaaaagctgaaagccttagctcatcccacgaaaaaggtaacgctgtctcttcatcgagaagggaaacagattaaccataaagctgttcagcgcctgatgggaaccctctcacttaaagcagcgattaaggtcaagcgataccgctcttacagaggagaggtagggcaaaccgcccctaatgttctccaaagagatttcaaggctacgcggccaaacgagaagtgggttaccgatgttactgaatttgcagtcaatgggcgcaagctgtatttgtctccagtaatagatctcttcaacaacgaagttatttcttacagcctttcggaaagaccagtgatgaacatggttgagaatatgctcgatcaggcattcaaaaagcttaatcctcacgagcatcctgttctgcactctgaccagggatggcagtatcgtatgagaagatatcaaaatatccttaaagaacatggtattaaacaaagcatgtccagaaaaggcaattgtctggataatgctgtggtggagtgtttctttggaaccttaaagtcggagtgtttttatcttgatgagttcagtaatataagcgaactgaaggatgctgttacggaatatattgaatactacaacagcagaagaattagcctgaaattaaaaggctctgactccaattga

SEQ ID NO: 29067 - DNA, 1119 bp, Homo sapiens
  SIMILAR (147)..(665): 981254mologous to Escherichia coli 100 pct identical to sp:YI5A_ECOLI,accession number AP002527,Smith-Waterman Score=855.
acggcagcaacatagtagaagcaaacgacagagtacatcccgtggagagaaagtacccgcggcaacaacgcgggtaccactggtgtggcgaaaggcgcgatgctgactcaccgcaatatgctggcgaacctggaacagcccctaatatgtcaaagccaaaatacccttttgaaaagcgccttgaagtcgtgaatcactacttcacaactgatgatggttacaggatcatctcggcacgttttggtgtcccccgaacccaggtcaggacatgggttgccctctatgaaaaacatggagaaaaaggtttaattcccaaacctaaaggcgttagtgctgatccagagttgcgtattaaggtcgtgaaagctgtgatcgagcagcacatgtcccttaatcaggctgctgctcactttatgcttgctggtagtggttctgtagccaggtggctgaaggtctatgaagagcgcggagaagctggtttacgcgcgctcaagattggcaccaaaagaaacattgcaatatcagttgatccagaaaaagcggcatcagcattggagctgtcaaaagaccgacgcattgaggatcttgaaaggcaagttcgatttcttgaaacgcggcttatgtatcttaaaaagctgaaagccttagctccttccccgaaaaaagtgaaagtactcaacgagttaaggcagttttatcctcttgatgagcttctcagggctgcggagataccgcgcagtacgttttattatcatttaaaggctctcagcaagcctgacaagtatgcggacgttaaaaagcgtattagtgagatttatcacgagaatagaggccgatacggataccgtagggtaacgctgtctcttcatcgagaagggaaacagattaaccataaagctgttcagcgcctgatgggaaccctctcacttaaagcagcgattaaggtcaagcgataccgctcttacagaggagaggtagggcaaaccgcccctaatgttctccaaagagatttcaaggctacgcggccaaacgagaagtgggttaccgatgttacaaaattagcagtcaatgggcgcaaccagtatttgtctacagtaatagatctccgggtaccgagct

SEQ ID NO: 29068 - DNA, 1029 bp, Homo sapiens; identical to SEQ ID NO: 29008
  SIMILAR (61)..(846): 931254mologous to Escherichia coli 100 pct identical to sp:YI5B_ECOLI,accession number AP002527,Smith-Waterman Score=1258.

SEQ ID NO: 29069 - DNA, 3385 bp, Homo sapiens
  SIMILAR (184)..(1062): 991254mologous to Escherichia coli No definition line found,accession number U00039,Smith-Waterman Score=1484.
atgagcgaaaagctacagaaagtcgcctcggcgcgtgccggccacggttctcgccgtgaaatcgaatctattattgaagccggtcgtgtgagtgatgatggcgaaattgctaaactcggcgataatgttgaagcttggtaccgagctcgattagcgggcgcttttacacttcaggagtgtgttatggcagcttcaacgttctttattccttctgtgaatgtcatcggcgctgattcattgactgatgcaatgaatatgatggcagattatggatttacccgtaccttaagtgtcactgacaatatgttaacgaaattaggtatggcgggcgatgtgcaaaaagcactggaagaacgcaatatttttagcgttatttatgatggcacccaacctaaccccaccacggaaaacgtcgccgcaggtttgaaattacttaaagagaataattgcgatagcgtgatctccttaggcggtggttctccacacgactgcgcaaaaggtattgcgctggtggcagccaatggcggcgatattcgcgattacgaaggcgttgaccgctctgcaaaaccgcagctgccgatgatcgccatcaataccacggcgggtacggcctctgaaatgacccgtttctgcatcatcactgacgaagcgcgtcatatcaaaatggcgattgttgataaacatgtcactccgctgctttctgtcaatgactcctctctgatgattggtatgccgaagtcactgaccgccgcaacgggtatggatgccttaacgcacgctatcgaagcatatgtttctattgccgccacgccgatcactgacgcttgtgcactgaaagccgtgaccatgattgccgaaaacctgccgttagccgttgaagatggcagtaatgcgaaagcgcgtgaagcaatggcttatgcccagttcctcgccggtatggcgttcaataatgcttctctgggttatgttcatgcgatggcgcaccagctgggcggtttctacaacctgccacacggtgtatgtaacgccgttttgctgccgcacgttcaggtattcaacagcaatgagcgtggggaaattagcgacgaagcgttcgcagaggcgctgtgtcatgagatggctctaccgctaagctacgagcagttctctcacggctggcaggcggtgtttgttgcgctgcgcccggaagtgatcgccatcatgcataaactgcgtgagcaggggcatcgcgtggtggtgctttccaataccaaccgcctgcataccaccttctgcaaagttctggtagagaaagcagtctctatggctcgcccctacaatgcgaaagtttctctgatccacgtagatgtaaactactctgacctatacaccgggcttattgatgtgaatctgggtgatatgcagaaacgcatctctgaagagacacatcatgcactgaccgagctttccactaatgcaggctacccaatcactgaaaccctgagcggcagcggcgacctgggccaggttctggtcgatgcaatcaagaaatacgatatggatttggtggtttgtggtcaccaccaggacttctggagcaaactgatgtcttccgcacgtatcgccattggcggcaacgcaacgtcggcgaatctgatggggatttccactcgcagcaccactattcgcatttatatgctctccaccggactggcaacgctggcggggattgtcttctcgatttatacccaggccggatatgcgctggcgggcgtaggtgtggaactggatgctatcgcctcagtggtaattggcgcccctaatatgtcaaagccaaaatacccttttgaaaagcgccttgaagtcgtgaatcactacttcacaactgatgatggttacaggatcatctcggcacgttttggtgtcccccgaacccaggtcaggacatgggttgccctctatgaaaaacatggagaaaaaggtttaattcccaaacctaaaggcgttagtgctgatccagagttgcgtattaaggtcgtgaaagctgtgatcgagcagcacatgtcccttaatcaggctgctgctcactttatgcttgctggtagtggttctgtagccaggtggctgaaggtctatgaagagcgcggagaagctggtttacgcgcgctcaagattggcaccaaaagaaacattgcaatatcagttgatccagaaaaagcggcatcagcattggagctgtcaaaagaccgacgcattgaggatcttgaaaggcaagttcgatttcttgaaacgcggcttatgtatctaaaaaagctgaaagccttagctcatcccacgaaaaaggctgcggagataccgcgcagtacgttttattatcatctaaaggctctcagcaagcctgacaagtatgcggacgttaaaaagcgtattagtgagatttatcacgagaatagaggccgatacggataccgtagggtaacgctgtctcttcatcgagaagggaaacagattaaccataaagctgttcagcgcctgatgggaaccctctcacttaaagcagcgattaaggtcaagcgataccgctcttacagaggagaggtagggcaaaccgcccctaatgttctccaaagagatttcaaggctacgcggccaaacgagaagtgggttaccgatgttactgaatttgcagtcaatgggcgcaagctgtatttgtctccagtaatagatctcttcaacaacgaagttatttcttacagcctttcggaaagaccagtgatgaacatggttgagaatatgctcgatcaggcattcaaaaagcttaatcctcacgagcatcctgttctgcactctgaccagggatggcagtatcgtatgagaagatatcaaaatatccttaaagaacatggtattaaacaaagcatgtccagaaaaggcaattgtctggataatgactgtggtggagtgtttatttggaaccttaaagtcggagtgtttttatcttgatgagttcagcaatataagcgaactgaaggatgctgttacggaatatattgaatactacaacagcagaagaattagcctgaaattaaaagacctatatgcctcgtgtttaactgtccaactttttggggtcagtacagtgatggggctgctgattcgcatccttggcagcattttccagaaagccctcaacatcagcaaaatcgaatcttttgttgcggttactactattttcctcgggcaaaatgagatcccggcgatcgttaagcggtttatgatcgctgaatcgcacgaagtgttaccgcatttgtacgggatgggtcactgcgggtcgagaagatggtatgccgaatggcgtcccttgcaccgagttcatgaaccctcgggctccttgccctggccttag

SEQ ID NO: 29070 - DNA, 2019 bp, Homo sapiens
  SIMILAR (1618)..(1887): 921254mologous to Escherichia coli 100 pct identical to sp:YI5B_ECOLI,accession number AP002527,Smith-Waterman Score=434.
atgagcagctcctatgagtcctacgatgaagaggaggaggaagggaagagcccgcagccccgacaccagtggccctcagaggaggcctccatgcacctggtgagggaatgcaggatatgtgccttcctgctgcgtttataagtgtttcgggcagtgggccaagcagctgacggtcatcagggaggaccagctcctgtgttacaaaagctccaaggatcggcagccacatctgaggttggcactggatacctgcagcatcatctacgtgcccaaggacagccggcacaagaggcacgagctgcgtttcacccagggggctaccgaggtcttggtgctggcactgcagagccgagagcaggccgaggagtggctgaagcatctaaaggcttccagcaagcctgacaagaaagcggacgttaaaaggcgtattagtgagatttatcacgagaatagaggccgatacggataccgtagggtaacgctgtctcttcatcgagaagggaaacagattaaccataaagctgttcagcgcctgatgggaaccctctcacttaaagcagcgattaaggtcaagcgataccgctcttacagaggagaggtagggcaaaccgcccctaatgttctccaaagagatttcaaggctacgcggccaaacgagaagtgggttaccgatgttactgaatttgcagtcaatgggcgcaagctgtatttgtctccagtaatagatctcttcaacaacgaagttatttcttacagcctttcggaaagaccagtgatgaacatggttgagaatatgctcgatcaggcattcaaaaagcttaatcctcacgagcatcctgttctgcactctgaccagggatggcagtatcgtatgagaagatatcaaaatatccttaaagaacatggtattaaacaaagcatgtccagaaaaggcaattgtctggataatgctgtggtggagtgtttctttggaaccttaaagtcggagtgtttttatcttgatgagttcagtaatataagcgaactgaaggatgctgttacggaatatattgaatactacaacagcagaagaattagcctgaaattaaaagcccctaatatgtcaaagccaaaatacccttttgaaaagcgccttgaagtcgtgaatcactacttcacaactgatgatggttacaggatcatctcggcacgttttggtgtcccccgaacccaggtcaggacatgggttgccctctatgaaaaacatggagaaaaaggtttaattcccaaacctaaaggcgttagtgctgatccagagttgcgtattaaggtcgtgaaagctgtgatcgagcagcacatgtcccttaatcaggctgctgctcactttatgcgttgctggtagtggttctgtagccaggtggctgaaggtctatgaagagcgcggagaagctggtttacgcgcgctcacagattggcaccaaaagaaacattgcaatatcagttgatccagaaaaagcggcatcagcattggagctgtcaaaagaccgacgcattgaggatcttgaaaggcaagttcgatttcttgaaacgcggcttatgtatctaaaaaagctgaaagccttagctcatcccacgaaaaaggctgcggagataccgcgcagtacgttttattatcatctaaaggctctcagcaagcctgacaagtatgcggacgttaaaaagcgtattagtcagatttatcacgagaatagaggccgatacggataccgtagggtaacgctgtctcttcatcgagaagggaaacagattaaccataaagctgttcagcgcctgatgggaaccctctcacttaaagcagcgattaaggtcaagcgataccgctcccacaccggagaggctgggaagtctgagatcaaggtggcagccaatttggtgtctggtgagggcctgtttcctggtgatgaccatctttttgctccctggggtctctttcctaagggcactaatcctacccatgagggctccaccctcgtgacctaa

SEQ ID NO: 29071 - DNA, 378 bp, Homo sapiens
  SIMILAR (169)..(375): 841254mologous to Escherichia coli O157:H7 flagellar biosynthesis,accession number AE005318,Smith-Waterman Score=272.
gccaatgtcagccagccagatacaccgtttggtggtggacagactgtggtttctccccaaacgcagatcgatttacgccagagcggcgtttcgctgcaaagcgtacgttccagcgccagcctcaataacgtgtgcgggatgtctgcggccaaaactgtatatcatctgatgatcagcgtcagcatactactggcaagtgcggcttgggatgcgcaatcactcaccgaactaaagtcgaaaccggttgaagatccggcggcaaatatctgtctggtggcccgtcaggtggaaggcatgttcgcgcagatcatgttaaacagcatgcgtgacgctttacctaaagatggcctgttcagcagcgagcacactcgcctgtaa

SEQ ID NO: 29072 - DNA, 5082 bp, Homo sapiens; identical to SEQ ID NO: 17817
  SIMILAR (1984)..(2679): 981254mologous to Escherichia coli OUTER MEMBRANE USHER PROTEIN PAPC PRECURSOR,accession number D90864,Smith-Waterman Score =1238.

SEQ ID NO: 29073 - DNA, 1269 bp, Homo sapiens
  SIMILAR (1)..(855): 1001254mologous to Escherichia coli tartrate dehydratse,accession number U28379,Smith-Waterman Score=1461.
atgagcgaaagtaataagcaacaggcagtgaataagttgacagagattgtcgctaactttaccgccatgatttctacccgaatgcctgatgacgtggtggataaactaaaacagctaaaggatgccgaaacgtcgtcgatggggaaaattatctaccatacgatgttcgacaacatgcaaaaagcgattgacctgaatcgtcctgcctgtcaggacaccggggagattatgttcttcgttaaagtcggttcccgcttcccactgcttggcgagctgcaaagcatactcaaacaagccgtggaagaggcaaccgtcaaagcgccactacgtcacaatgcggtagaaatttttgacgaagtaaacaccggcaaaaataccggtagcggcgtaccgtgggtcacctgggacatcatccccgacaatgacgatgcggaaatcgaagtttacatggcaggcggcggctgcacgctacctggccgctcgaaagtgttaatgccgtcagaaggctacgaaggcgtggtgaaattcgtcttcgaaaatatctccaccctcgccgtaaacgcctgtccaccggtactggtgggcgtgggcatcgccacctcggtggaaaccgccgccgtactctcgcgtaaagccattttgcgcccgattggcagccgccatcccaatccaaaagcggcagaactggagctacgcctggaagaaggactcaaccgtctggggattggtccacaagggctgaccggcaacagttcagtgatgggcgtacatatcgaatctgccgcccgccatccgtcaaccatcggcgttgctgtctctaccggctgctgggcgcatcgtcgcggcacgctgctgcgcgttatgaaaaagatcctgacaaccccgatcaaagctgaagatctgcaagatattcgcgtcggcgatgtgatctacctgaccggtacgctggtgacctgccgcgacgtttgtcaccgccgtttgatcgaactgaaacgtccgatcccttacgatctcaacggcaaagcgatgttcctatacttatatggtatgctgtttgaaacgaaggtgaagaactgcgcacgtggcaaccgacggccaccgtctggcggtctgttcaatgccaattggtcaatctttgccaagccattcggtgatcgcgtgattgaactgatgcgtatgctcgacggcggcgacaatccgctgcgcgtacagattggcagcaacaacattcgcgcccacgttggcgactttatcttcacctccaaactg

SEQ ID NO: 29074 - DNA, 946 bp, Homo sapiens
  SIMILAR (438)..(298): 1001254mologous to Escherichia coli K12 orf, hypothetical protein,accession number AE000330,Smith-Waterman Score=243.
gaattcattgtcgcgacccggacatcaggtggacggggagatccctgacaatacccaacttagtcagcttgtaatgcaactggctggtctgagagtgctgacaaacgcaaaactgcctgatgcgctacgcttatcaggcctacgtggagcccacaatatattgaattagcacgatttcgtaggccggataaggcgttcacgccgcatccggcgtgtacaacgcgcacttggtcaacaatctgaggccagtcagtaatgttactgcctggcctttaatcaatgaatcagaaacgcttacagcgccatcaacttgtccagcgacggtgcgaaataatagccgccggttaccggtttggtgaaacgcaacatcgcatcacgcttaccatcggtatcgccaaacatgctcagcagttgctgctcaatgttatgcagacgcgcggcagtaggcgcagaagtacagaccgtgagtgccactggcagtgccgtacggcaggctctggcgaacaatcttcagccctttgccatcttctttcagatcaacgcgggtgaggtgagaggtttccggacgttcgtcgccgtcgatctcttcgttggcctctttggtgcgcccgatcaccatctcctgatcgtgaacgctcatccggttgagctgcttcaggttgtgttcccaacgctggacaaacacatagctgccgcccgcatccacgccgtctttgataaccgccacttcgcgacgcgtctcttcacccgccgggttttccgtaccgtcaacaaagccgctcaggtcacgctcttcaacccaacggaagccgtggatctcttctttcacttcaatgcagtcaccaaaggcttccatctccgccagggcgacaaagaagggtacgtccaggctcatacaaataatggcgatctccgggtacggacctcgaatccgtagtcatggtcg

SEQ ID NO: 29075 - DNA, 2180 bp, Homo sapiens
  SIMILAR (1418)..(2143): 971254mologous to Escherichia coli Flagellar basal body P- ring protein precursor,accession number D90744,Smith-Waterman Score =1165.
  misc_feature (1)...(2180): n = a,t,c or g
atgaaaaagatcctgacaaccccgatcaaagctgaagatctgcaagatattcgcgtcggcgatgtgatctacctgaccggtacgctggtgacctgccgcgacgtttgtcaccgccgtttgatcgaactgaaacgtccgatcccttacgatctcaacggcaaagcgattttcgtccgctgcattcttgatgctgatgcccagcgcgaaggtatcaatgcctcgacacgctacccgaaaaactgggtgcagtcgggggatccggcgcgcgaatccaccatgattcagtcacaaattaaccgcaatattcgtcttgatcttgccgatgccattttgctcagcaaagctaaaaaagatctctcatttgccgagattgccgacggcaccggtctggcagaagcctttgtaaccgcggctttgctgggtcagcaggcgcttacataaagacgccgcccgcctgaatattgcatgccagcgcggcgcgtcgaagaggcggttatcaaaggaccgcgtggatgcaggcggcagctatgtgtttgtccagcgttgggaacacaacctgaagcagctcaaccggatgagcgttcacgatcaggagatggtgatcgggcgcaccaaagaggccaacgaagagatcgacggcgacgaacgtccggaaacctctcacctcacccgcgttgatctgaaagaagatggcaaagggctgaagattgttcgccagagcctgccgtacggcactgccagtggcactcacggtctgtacttctgcgcctactgcgcgcgtctgcataacattgagcagcaactgctgagcatgtttggcgataccgatgctgtagcgcgtaccatctcgggcaaccacgcgaatgacttcgcaaagacgatcagcaatacgcgtgcgcccgacggagataaagtcgtagtaaggagaaaggcgtttgaaatcggtatagataagcgatggcagagaatcaacaatgtaatcgccattaagcgtgaacggttcaatccatttagcctgattgctacggttaaacttgcgtcgatcaataccagaagattcgatcagcgcatccagttcacccactgcgtcgcgccactgctgttttaccgtatcaatacgcgccacaatttgcgcataacgattaatatcgcgcagcaacgcctgcggccctttccaggtttcaaagacgacctgggctatttcacgcggcagcttaagcaggtggcgacgcagcaaatcggcgcaggctcattcaacatgtctgcagccttcctctctacacagggcttccacgtggaccacacggccgagctgcggggaatccggtggaccagcagtttgcggcgggagacctcggactatcaccgcacgctgacgcccaccctggaggcactgatgatgtacgttggtgtctcatctccacttaaaaacgttgggactcaggtgtataagctggcgcagggcaatattctggttggcggcgcaggagcctccgctggcggtagcagtgttcaggttaaccaactgaacggtggacggatcaccaatggtgcggttattgaacgtgaattgcccagccagtttggcgtcgggaatacccttaatttgcaacttaacgacgaagatttcagcatggcgcagcaaatcgctgacaccatcaaccgcgtgcgtggatatggcagcgccaccgcgttagatgcgcggactattcaggtgcgcgtaccgagtggcaacagttcccaggtccgcttccttgccgatattcagaatatgcaggttaatgtcaccccgcaggacgctaaagtagtgattaactcgcgcaccggttcggtggtgatgaatcgcgaagtgaccctcgacagctgcgcggtagcgcaggggaatctctcagtaacagttaatcgtcaggccaatgtcagccagccagatacaccgtttggtggtggacagactgtggttactccacaaacgcagatcgatttacgccagagcggcggttcgctgcaaagcgtacgttccagcgccagcctcaataacgtggtgcgcgcgctcaatgcgctgggcgctacgccgatggatctgatgtccatactgcaatcaatgcaaagtgcgggatgtctgcgggcaaaactggaaatcatctgatgatcagcgacacccacctnntnncaattgtgcc

SEQ ID NO: 29076 - DNA, 450 bp, Homo sapiens
tcaatgtcccactccttcatcttctttctccacactcactctcttggtcacttcagccaatctaatgactttaagtgtcatcttgatatctgtaactccccagattgtatcttcacctttctgctgaattccacatgcatatttctggctaccttcctgatactcccacttgaatgttgaatgccttgttactctttgagatggggtgattagaaaaggccttgggaagagacaacagttaagttcatcccagaagtatgaggaggtatcaggcattgtgaggacagagggaagtgtttcagcacctgcaaattcagaaagcggcagatcctgcttctggatccagagacagaccctcccatttttctcatagaactctgtggcacttgaaaaaggtcctcggggaagtaaattctttgagacaaactgtttctggctgctaataactga

SEQ ID NO: 29077 - DNA, 1770 bp, Homo sapiens
  SIMILAR (1)..(633): 1001254mologous to Escherichia coli hexose phosphate transport protein UhpT,accession number M17102,Smith-Waterman Score =1090.
atgctgatcctctctgctatttgtatgctgggcttcagtgccagtatgggcagcggctcggttagcctgttcctgatgattgccttctacgccttaagcggctttttccagagtaccggcggttcgtgcagttactccaccatcaccaaatggacgccgcgtcgtaaacgcgggacattcctcggtttctggaatatttctcacaaccttggcggtgcaggcgcagcaggtgtggcgctgttcggggcaaattacctgttcgatggccatgtcatcggcatgtttatcttcccgtcgattatcgcgctgattgtcggttttatcggcctgcgttacggcagcgactccccggaatcttatggcctcggcaaagctgaagaactgttcggcgaggagatcagcgaagaggacaaagagacagaatctaccgatatgaccaagtggcagatctttgttgagtatgtgctgaaaaacaaagtgatctggctgctgtgcttcgccaacattttcctctatgtggtacgtattggtatcgaccagtggtcaaccgtatacgcgttccaggaactgaaactctctaaagcggtggcgattcagggctttacgctgtttgaagctggtgcgctggtcggaaacggctgctcatacgcgcaggggatgtgtggtaaaacggcggaaacttctgaccttcaggatttactcatcgcggcgctgcaagggctttctgcctgggcggtaaaagcgcgtgaatacggcatcatcaaccacgatgttgacagcttcgcgccacgtgcctttttctcaaccctgaccaacgttaacttcgattctccgcgtattgtcggctacgctcgtgaagcgattgccctgcgcgaggcgctgaaagcgcaatgcctggctgtagatgccaacgcgcgcgtcgataacccgatggctgacctgcaactggtgagcgacgatctcggcgagctgcaacgtcaggcagcagaatttacccctaacaaagataaagcggcgattggcgaaaacattctcggcctgcgtctgctgtgcctgtatggcctgaaagtgttcaatggaagagaagaccaactagactcttgttatcacgggaataggcagctgcgcggcagcctgcgcctgttgtttttggcgtttatccgccagcgtctgcgcgacctgataataaccgctcaccgcgtcattcgggttaatcgccagcacgccgcactgggcgtcaagcactgcaggttgcccggcataacgggcaatcgcatccagcggcaagccactcagtaccgggatcgccgaggcacgggccagaatcagtgtatgcgaggtgatatgcagcaactgttcgctgatatcgcgaatgtcgctaacacgttcgcgcagataatcgctggcagaggcagaaagtttggcgcaaacctgctccatattgctgatgatcgccgcccccagcccctgatgctgttctgtcatcaggcgacggatattgcctgcaaattcatcatcctgaatcagcgacaaatgggcgctgaggatagttttgctttcgccgtcacgctcacgcaattgctggttcagttgctcggcaagcgttgccaggctgtgctccagccggatggacagtgtacgctcgacagcgacccggatgacatgaaggacttcatggagaacgtgctgcgctatctatccgacgatagatggaagccgacgcgaaagccacgcatgaccgtaggcaccaaacacgtggatactgtctag

SEQ ID NO: 29078 - DNA, 2502 bp, Homo sapiens; identical to SEQ ID NO: 28918
  SIMILAR (1063)..(1536): 931254mologous to Escherichia coli K12 putative isomerase,accession number AE000179,Smith-Waterman Score=790.

SEQ ID NO: 29079 - DNA, 607 bp, Homo sapiens
  SIMILAR (215)..(607): 941254mologous to Homo sapiens PR-domain zinc finger protein 6 isoform A; PR-domain family protein 3 isoform A; PRDM6A; PFM3A,accession number AF272898,Smith-Waterman Score=663.
cggccgccgcgcccccgccggagctgccggagtggctgcgggacctgcctcgcgaggtgtgcctctgcaccagtactgtgcccggcctggcctacggcatctgcgcggcgcagaggatccagcaaggcacctggattggacctttccaaggcgtgcttctgcccccagagaaggtgcaggcaggcgccgtgaggaacacgcagcatctctgggagtaaatgtcccttcaacggtaatggaagccatgtgcagacaagacgccctgcagcccttcaacaaaagcagcaaactcgcccctaccacccagcagcgctccgttgttttcccccagactccgtgcagcaggaacttctctcttctggataagtctgggcccattgaatcaggatttaatcaaatcaacgtgaaaaaccagcgagtcctggcaagcccaacttccacaagccagctccactcggagttcagtgactggcatctttggaaatgtgggcagtgctttaagactttcacccagcggatcctcttacagatgcacgtgtgcacgcagaacctcgacagaccctaccaatgctgccactggtctcagttcttttaccagccttcagac

SEQ ID NO: 29080 - DNA, 541 bp, Homo sapiens
  SIMILAR (3)..(377): 1001254mologous to Homo sapiens PR-domain zinc finger protein 6 isoform A; PR-domain family protein 3 isoform A; PRDM6A; PFM3A,accession number AF272898,Smith-Waterman Score=695.
gttgcgacatgtgcgcggacaaccgcaacggcgagtgccctatgcatgggccactgcactcgctgcgccggcttgtgggcaccagcagcgctgcggccgccgcgcccccgccggagctgccggagtggctgcgggacctgcctcgcgaggtgtgcctctgcaccagtactgtgcccggcctggcctacggcatctgcgcggcgcagaggatccagcaaggcacctggattggacctttccaaggcgtgcttctgcccccagagaaggtgcaggcaggcgccgtgaggaacacgcagcatctctgggagatatatgaccaggatgggacactacagcactttattgatggtggggaacctagtaagtcgagctggatggaggtatatcccgatgtgcaaggcactgcggagaacagaatctaacagtagttcagtacaggaatagctttatttgcacaacagcatgggaaaccaagaactcgctaccttcccaaggatacctttccaaaaccgttagacttagtggcagtgacagagccagg

SEQ ID NO: 29081 - DNA, 4003 bp, Homo sapiens
  SIMILAR (1)..(174): 1001254mologous to Homo sapiens PR-domain zinc finger protein 6 isoform A; PR-domain family protein 3 isoform A; PRDM6A; PFM3A,accession number AF272898,Smith-Waterman Score=297.
caggtccgtccgcactctcgcgccctccgcgggcctcccaattttctcgcttgcaggtcgggaggtttccgggcggcacaatctctaggactctcctcccgcgctgctcaggggcatgtagcgcacgcagggcgcacactctcgcgcacccgcacgctcaccgagacacccgcacgcacccaccggcagcaccgagttttcagttcgaggcgccggacatgctgaagcccggagaccccggcggttcggccttcctcaaagtggacccagcctacctgcagcactggcagcaactcttccctcacggaggcgcaggcccgctcaagggcagcggcgccgcgggtctcctgagcgcgccgcagcctcttcagccgccgccgccgcccccgcccccggagcgcgctgagcctccgccggacagcctgcgcccgcggcccgcctctctctcctccgcctcgtccacgccggcttcctcttccacctccgcctcctccgcctcctcctgcgctgctgcggccgctgccgccgcgctggctggtctctcggccctgccggtgtcgcagctgccggtgttcgcgcctctagccgccgctgccgtcgccgccgagccgctgccccccaaggaactgtgcctcggcgccacctccggccccgggcccgtcaagtgcggtggtggtggcggcggcggcggggagggtcgcggcgccccgcgcttccgctgcagcgcagaggagctggactattacctgtatggccagcagcgcatggagatcatcccgctcaaccagcacaccagcgaccccaacaaccgttgcgacatgtgcgcggacaaccgcaacggcgagtgccctatgcatgggccactgcactcgctgcgccggcttgtgggcaccagcagcgctgcggccgccgcgcccccgccggagctgccggagtggctgcgggacctgcctcgcgaggtgtgcctctgcaccagtactgtgcccggcctggcctacggcatctgcgcggcgcagaggatccagcaaggcacctggattggacctttccaaggcgtgcttctgcccccagagaaggtgcaggcaggcgccgtgaggaacacgcagcatctctgggagactggggagcagtgctggatctctgtggatctgaggctccaggctgaaatccacaaatgtcccgggctttgcatccagatatatgaccaggatgggacactacagcactttattgatggtggggaacctagtaagtcgagctggatgaggtatatccgatgtgcaaggcactgcggagaacagaatctaacagtagttcagtacaggtggcagtgggtttggccctttgatgattcaggatttgtttcagttgatgaggcagtttccgggcatagagaagcccctggtttcctgaaagtaacaaggcattcaacattcaagtgggagtatcaggaaggtagccagaaatatgcatgtggaattcagcagaaaggtgaagatacaatctggggagttacagatatcaagatgacacttaaagtcattagattggctgaagtgaccaagagacactgtcccccgggaagatcggttctcggagatagtccaaccatcttgaaacaaggaacagtagcacaccgagcaaccaccaacgccgggaaccaacacgtggacatgcccaaagagatccccaagaatgtggcgcccgatgacccgagcgctgtggcacatcctggggacacgagtttgcagggggagctggtaaccccctgccagactgcacaggggggaaaccgcagtattcaaaagggggcctcaatcagcggaaagaagggggtcaatggaatagggagctcagggggccagcatcgtttccggctagccccccgaattctaaacgcatcttctggagacactctaaaagccacacgcagtaaagctgatgatctgggagcagtggaagcaagactgctctctgttggctcagtcacaggacacataggaaaagaattcatttatggctgctgtggtgttgtcccatggggaaggaagatggatttgtcaaccccggagcgaggttctccctacccgaggctgctgccgtgtggagatcccctgggtgaaaccattgtcgccattgaccaggaggcaaaaccttcaactgaggacttagggaataagaaggaaacaaaatacattaaactcaaagtcattagatgggataacagtgacttcaatttcctgtattctaattatgagaggattcgggcacgcacaacaaagaaagaggactctgcgactaatgtcccggtgacgtttgaaaaacacggttcccacgccgtcgtatatgcacggcgcagcgccacggtgctgaccgaccggaacaaggaggccccaagagtgccccaaggcggttatatggtttcttttgtggatatccctgaagcgttgacccagggcgaaactgtcgctgaagcgatggaagcggcaaaagatgctttactgaccgcatttgatttttattttgaagataacgagcttatccctttaccttcgccattaaatagtcacgatcactttattgaagtacctttgagcgtcgcctctaaggtattgctgttaaatgcttttttacagtcagaaatcactcagcaagagttagccaggcgaattggcaaacctaaacaggagattactcgcctatttaacttgcatcatgcgacaaaaatcgacgccgtccagctcgcggcaaaggcgcttggcaaagagttatcgctggagtgccttatggacattctcaatcttaataaacatatttccggacagttcaacgccgaactggaaagtatccgcacgcaggtgatgaccctgggcggcatggtggacaagcagctttctgatgcaatcaccgcgatacataaccaggacagcgatctggcgaagcgcgtcatcgaaggccacaagaacctcaacatgatggaagtggcgatcgatgaagcccgcgttgagccatcatcgccaaacatcagtcagacggcgagcgacactgagactggttatggtgatcagtaaaaccattgccgagctggagcgtattggtcgacgtaggtcggaacaaaatctgccgtacagcgctggagaaattatcccaacagcatcagccgtaggtggtaagtgctggagtacgttggaccgtcataccatccagatgctgcacgacgtagtgaaagcgttcgcgcggatggacattgacgaaacggccaagtgccagatctttgttgagtatgtgctgaagcccaaagtgatctggctgctgtgcttcgccaacattttcctctatgtggtacgtattggtatcgaccagtggtcaaccgtatacgcgttccaggaactgaaactctttaaagcggtggcgattcagggctttacgctgtttgaagctggtgcgctggtcggtacgctgctgtggggctggctctctgacctggcgaacggtcgccgtggcctggtggcctgcatcgcgctggcgctgattatcgccacgctcggtgtgtatcaacatgccagtaacgaatatatctatctggcttctctctttgcgttgggtttcctggtctttggcccgcaattgttgattggtgtggctgctgttggctttgtacctaaaaaagcgattggcgctgccgatggtattaaaggcacctttgcttacctgattggtgacagctttgccaagttaggtctgggaatgattgccgatgggacgccggtattcggccttaccggctgggcaggcaccttcgccgcgctggatatcgccgcgattggttgtatctgcctgatggcgatagtggcggtaatggaagaacgcaaaatccgccgcgagaaaaaaattcagcagttgacagtggcataaacgtaactggtgacttttgccccggaatgacgcccggctttttttaatatatcggggacttccagcgtagtggagggaaactttttgc

SEQ ID NO: 29082 - DNA, 2094 bp, Homo sapiens
  SIMILAR (1087)..(1587): 851254mologous to Escherichia coli GUG start,accession number U28375,Smith-Waterman Score=778.
atggtgcggcacacaaaacccacagggacaacacaaccaccccaaagactaacacacgagacccgcgccatcaggcaaccacccaactggcacccagcgcacacacaccagtggtgcaaccacaccaacgcggaatcacaacaccgcaacccaagactacaactggaaacccgaatatgcgccaacccaaaacaacggcactcgcaggcgcatcacacccaccatgtccaccaccaaacacagcaacggaacaacaccaccaccgacaccagcacacacgcgacaaagcggatactcgaaccgacacccaacccatcaaccacatctacaacccagtgtggaacaacacaaaaaacgcgaagacatccactccacccaccaccaaggcatccacaacaaagaaaaccagctcgcacccaccaacaccacccatcgcgcaaccgcagcgcaacacaacaacatgtgtccacaaccaacaaactgcccacccacgagcacgaaccccaccaccgacggtcaacacacacgagcacccgtgaactgaccgtcccaccacacagcgaccccccgcagaccaacactgcaggaggacacaaaccacccaccgaggtcatcaccaccccccccccgagagaccaccacacccgacggccgactcccacacccaccaccacccggtaccccacattctcccacaccgctaccgacccacaaaacaccacggatcacccgcaccccacaccagtgcacaccaacaacactgattctgattattctcacaaaacattaataccagacacacaaagcctcaacgttgtgatctacgacaagccgcgaatggaactcgcagcattgacaaattcacccatgggaacatcaaaaggtcgcgccgggcgcatgggcgttcacttcgtcggcaaaatcttttgcctggaggaaatcccggaagacaatctcaatcaagaggtggatattccgctcggtattcagggcattgataccccaatcaacctgttagccagcgttcaaccagaccacttgtccgagttttcacaggatcgctttgatgaggttattcataaacgaccgtgtttccatcgaccttgtgaagaagcattcgtacttccgtgtcgagcagttcgaatgtgctggaaagcgaaccagggaaaagtgcagggatttacgccagaagcgattgatgcactggtgcaacgaccagagtgtgacgtaattctcattgaagcagatggctcgcgtggaatgccgttaaaagcgcctgatgagcacgaaccttgcatacccaaaagcagttgctgcgtgattgctgtgatgggaggacatactttgggcgcgaaagtgagcacagaaaatgtccatcgctggtcgcagtttgctgatattaccgggttaacacctgatgcaaccttgcaactgagcgatctcgttgcgctggttcgccaccctcagggggcgtttaaaaacgtaccgcaaggttgtcggcgagtctggttcattaaccgtttttctcaatgtgagaatgcgattgcaccaagcgagctccttcaaccgctgcaacaacacgacatttgtgaattagcggcccgggtattccgggttactgaaaggatatccattgaggttggtatgaatattttcacagaggctgcaaaactcgaagagcaaaattgtccgtttgctatggcgcaaattgttgatagccgaggctcgactccccgccattctgcacaaatgttagtgcgcgccgatggttctatcgtcggtacaattggtggcggaatggttgagcggaagagccacactctgtctggaggtctcttcataacactcacatatccggtgccgagggggaaactttttgatcctagtatgccaacaagtaacaccgtgaatcctaggagtaaagctaggcctgctgaagacttggtttgttgggagcaagttgccatagtaacagctgtacaagtgagaacaactgttgagatgctaagattatctaagacccacatccttgtacttcaggatgataccatgactgtaaataggaagttcctaacttatactacactatcttaa

SEQ ID NO: 29083 - DNA, 751 bp, Homo sapiens
  SIMILAR (1)..(435): 991254mologous to Escherichia coli Lactam utilization protein (lamB) homolog,accession number D90710,Smith-Waterman Score=722.
atgcagctgccgccagaaaccgtttacgcccagacgctgtatcaaattggcgcgctggcaacgattgcccgtgcgcaaggcggcgtaatgcgtcatgtcaaaccgcacggcatgttgtacaaccaggcggcgaaagaagcacaactggcagacgccatcgccagagcggtatacgcttgcgatccagcattgattctcgtcgggctggcgggaagcgagctgattcgtgcaggcaagcaatatggtctgacaacgcgcgaggaagtgtttgccgatcgcggttatcaggctgacggctcgctggtgccgcgaagccagtcaggcgcgttgattgaaaacgaagaacaggcgctggcgcaaacgctggagatggtgcaacacggcagagtcaaaagtatcaccggcgaatgggcaacggtcgcggcgcaaacgttaaaaccttatcaatcacaacttatcggtcaacacgttacccatgtggaaacgcgtggtaaggcgttgttaactcatttttccaacgacttaacgctctacagccataatcagctttacggcgtctggcgcgtggttgataccggcgaagagccgcagaccacgcgagtattgcgggtaaaactgcaaacggctgacaaaaccattctgctttatagcgcctcggatattgagatgttgaccccggaacaactgaccacgcatccgtttttacaacgcgttggtcccgatgtgctggatccgaatctgacgcccggag

SEQ ID NO: 29084 - DNA, 930 bp, Homo sapiens
  SIMILAR (4)..(519): 1001254mologous to Escherichia coli K12 homolog of Salmonella FimH protein,accession number AE000196,Smith-Waterman Score=943.
atgagcgggcagtgtcatactactcaggggaatccgtatattggcgtcaattttggcgttaaaaccctggaggaagaagcaaatacggcaggggtagttaaagacaaattttatcagtggaacgaatcgaatgattattatgtttcctgtgattgcgataaagacaatgtcagaagtggccgatgggcattcgccgcggattcaccgttagtctatttaggcgacaactggtacaaaattaatgactatcttgccgccaaagttttattgcaggttaaaggcagttctcctactgcggttcctttcgaaaacgtgggcacagggggggatacccgatggcatatttgcgaccctggcggtcaacgtttaggtgggcagggggcaagcggtaatagcggtagcttttccctgaaaatattgcagccgttcgttggctcggtcgtcattcctcctatggcgctggcgcgattatatgaatgctacaacatacccgcaggtgattcctgcacgactacaggagaagaacctagacgatttgtatctacttccctgtcgccgcgctttcgtaaccgtcagtttgctggattactgctcgatcaagcgtttctggctgggcttggcaattatttgcgggtggagatcctctggcaggttgggttgactggaaatcataaagcgaaagatctcaatgcggcgcaactggatgcactcgcacacgcgttactggagattcctcgattttcctacgctacgcgggggcaggtggatgagaataaacatcatggggcgctgtttcgctttaaggtttttcatcgagatggcgaaccgtgcgaacgttgtggcagcatcattgagaaaaccacgctgtcatctcgcccgttttactggtgccctggctgccaacactatgccgaccgcttcggcgcataa

SEQ ID NO: 29085 - DNA, 1116 bp, Homo sapiens
  SIMILAR (787)..(1113): 1001254mologous to Escherichia coli endonuclease VIII,accession number D89754,Smith-Waterman Score=592.
atgtgcctgatatttggcctaggcctcaataatagcattggcaaacagggtttccttggggcccagggacttgaattgggtacccgaattgcgtctggtgttttacgccagcaactggatttgattgccacgcgcactggggaaaataaatggctgacgcgtgagcaaacctctggcgtgcagcaacaaatccgccaggctttgtcggcgttgccgttgccggttaaccgactggaagaattcgataactgccgtgaggcgtggcgtaaatatgttggctttggtaaaacagaagtggcgatgcgcgcagctttcctggcagtagataaccacaagcaggcttattttcaaaaatgttttggccaactggccaagacctgccctgtgcagctgtgggttgattccacacccccgcccggcacccgcgtccgcgccatggccatctacaagcagtcacagcacatgacggaggttgtgaggcgctgcccccaccatgagcgctgctcagatagcgatggtctggcccctcctcagcatcttatccgagtggaaggaaatttgcgtgtggagtatttggatgacagaaacacttttcgacatagtgtggtggtgccctatgagccgcccttacaagaaaccatcgttaagcgtctgcaacaggaatcctggtttgtgggcaccagcaactacgatctggcgcgtcggctttccctcacgccgatgggaacacaggcacacgaatggttccagattatcctgaattgtcctgctacttgggaggtgcttgctggattactgctcgatcaggcgtttctggctgggcttggcaattatttgcgggtggagatcctctggcaggttgggttgactggaaatcataaagcgaaagatctcaatgcggcgcaactggatgcactcgcacacgcgttactggagattcctcgattttcctacgctacgcgggggcaggtggatgagaataagcatcatggggcgctgtttcgctttaaggtttttcatcgagatggcgaaccgtgcgaacgttgtggcagcatcattgagaaaaccacgctgtcatctcgcccgttttactggtgccctggctgccagcactag

SEQ ID NO: 29086 - DNA, 1100 bp, Homo sapiens
  SIMILAR (403)..(873): 981254mologous to Escherichia coli endonuclease VIII,accession number D89754,Smith-Waterman Score=819.
atggagctcggtaccacatttaacgccaaaaacactacaaaactggaatatttaaacttaagcaataacaatttactgccaaccaatgacattgatcaactaatatcatcaaaacatctttggcatgtattagttaacggcatcaacaatgatccacttgcacaaatgcagtactggactgcagtaagaaatataattgatgacactaatgaagtgaccattgatttatcaggacttaatttaaccactcaaccaccagggctgcaaaacttcacatctatcaatcttgataataaccaattcacacattttgatgcaaccaactacgatagactcgtaaagctaagtctgaatagtaatgctcttgagtcaataaattttcctcaaggcagaaatcgcctcgatattgagatgttgaccccggaacaactgaccacgcatccgtgtgttgtacaacgcgttggtcccgatgtgctggatccgaatctgacgccggaggtggtgaaagaacgattattgtcgccgcgctttcgtaaccgtcagtttgctggattactgctcgatcaggcgtttctggctgggcttggcaattatttgcgggtggagatcctctggcaggttgggttgactggaaatcataaagcgaaagatctcaatgcggcgcaactggatgcactcgcacacgcgttactggagattcctcgattttcctacgctacgcgggggcaggtggatgagaataagcatcatggggcgctgtttcgctttaaggtttttcatcgagatggcgaaccgtgcgaacgttgtggcagcatcattgagaaaaccacgctgtcatctcgcccgttttactggtgccctggctgccagcactaggccgaccgcttcggcgcataggttgaaataaaccgcgcaatggcaggccctgtcagcaaaatactgaacaggcgtagggtttgcatcgccataatgagcgccatatcggcattgctcctgcggcgatgaccgcaacgtaatcaagcccgccgggtggttggccaagtaagcagtcataaatcatgggataaccggttagccccaagccataccgacaatagccg

SEQ ID NO: 29087 - DNA, 453 bp, Homo sapiens
  SIMILAR (82)..(450): 991254mologous to Escherichia coli ribosomal protein L17,accession number J01685,Smith-Waterman Score=609.
ccatcattacggattcaatgtccgtacccgtacatcgcagggactgggaataccgtgacggaacccgacttgctccctttgcagagcggtcgtcaactgaaccgcaacagcagccatcgccaggctatgttccgcaatatggcaggttcactggttcgtcatgaaatcatcaagacgactctgcctaaagcgaaagagctgcgccgcgtagttgagccgctgattactcttgccaagactgatagcgttgctaatcgtcgtctggcattcgcccgtactcgtgataacgagatcgtggcaaaactgtttaacgaactgggcccgcgtttcgcgagccgtgccggtggttacactcgtattctgaagtgtggcttccgtgcaggcgacaacgcgccgatggcttacatcgagctggttgatcgttcagagaaagcagaagctgctgcagagtaa

SEQ ID NO: 29088 - DNA, 525 bp, Homo sapiens
  SIMILAR (232)..(309): 801254mologous to Escherichia coli ribosomal protein L17,accession number J01685,Smith-Waterman Score=106.
atgcagacaatgccaaatgctagcaaggatgcagaacaacaggaactgtcattaattgctgtgtttctggtaattaaactttctcagatactagaatgtggaagacctgaaaccagagctggtcttccaatccctgcatcccaggttgaagtgttgaaaaacccaaatgggaccaggctggcctcttcatcgccactaaacggcgggaaatcaaaatggcagtgggtgtcgataaaacggcaaatcaagccgctgattactcttgccaagactgatagcgttgctaatcgtcgtctggcattcgcccgctatgttggaggcctgtaccgagtaataatgctcatcttggggcactcattcaattgtgataactcacccagcttaaatcagctcggtacccgatttctaaggattcagcatggcaattttctacacgcggcgcgcaccatctctttaattttgaggtctaaaatgtcttcacaacaatggaaatcaatagaagttcctcagtcggctctactgtga

SEQ ID NO: 29089 - DNA, 915 bp, Homo sapiens
  SIMILAR (195)..(572): 481254mologous to Mus musculus proline-rich protein MP- 3,accession number M12100,Smith-Waterman Score=214.
atgcaagcgctgtgggaagatatcgaccgcctcacattgccttatggggatttagaatccgacgaagacccagggagcaaagaagggaaaccagtcataaccgcggccgtgaagctgtgcgagcccaagctttggagggccgggaactgtttcagccggctggcggcctttaacgaaggaagaaagacccccagcctcagccccgggaccctcagtgattctctggaggacccgctggggggcagcctcagacaagggaccctcagtgattctctggaggaccctctgcgtggcagcctcagccccgggaccctcagtgattctctggaggaccctctgcgtggcagcctcagccccgggaccctcagtgattctctggaggaccctctggggggcagcctcagccccgggaccctcagtgattctctggaggaccctctgcatggcagcctcagccgcgggaccctcagtgattctctggaggaccctctgcgtggcagcctcagccccgggaccctcagtgattctctggaggaccctctgcgtggcagcctcagccccgggaccctcagtgattctctggaggaccctctgcgtggcagctttgcagctgcagcaccaggacccccgcaccactgccgccgggtgattctggttagccatggggactcctgccgcttcctagctaaccacaattacctctgctatctaaagagaacaaggggtcgtccccggcagggagacccaacagggattcgggatgggatgtttttcaggcgaatcgaatctgtcgccgaagtaaagggtaaattacgagtgttagatttgaaacggcaggatgtgcaggatgctgttgctaccgctgaaaatgcagaaacgttatttaggagcggacttgctgatgactatcagtaa

SEQ ID NO: 29090 - DNA, 2417 bp, Homo sapiens
atgcttgcgcagtcgttacaggcgttagaacaggatggttttcttaaccgtatcgcgtatccggtggtgccgccgcatgtggaatatagcctcactccgctgggcgagcaggtgagcgaaaaggttgctgcactggcggactggattgagttgaatttgcccgaggtgttggcggtgcgggatgaacgcacccgctatgacattgcggttcccaggaaacggtatggccatgccgtttcgaggaacacgtttgccttgcgttcccaggaacggtatggccatagcgtcctggaaacggttggcaatagcggatccagtaaacagttttccatggatatcctggacccgtgtgcacgcggtccgggacagatatcgttgattacggtgaatcataaactgcacgtacgctgtgaaagtatcgcttactccgtgcagactatggtggtgaagggcggttcagcctttgcggcttttttcattgcggttgtgttatggatgattggctatgtaccgaatgttgaacagtctacgcaagccctattaggtatgcagtttattatgattgctctaccaactctgtttttcatggtaacgctgattctctacttccgtttctatcgcctcaatggtgacacgctgcgcaggatccagatccatctgctggataaatatcgcaaagtaccgcccgagcctgttcatgctgatattccggtcggtgcaaggttgtcatttgcggagcgggtgatggaaggactgagtgatggagggcagtcccttcagagcccatcagctttattctcaaagcagacactgaaaaatatgtctatttataaaattcctcttccgctcaatattctggaagctgcacgagagcgtattacctggacactcaacaccctaccccgcgtttgtgtctcattttctggcggcaaagactctggtttaatgctgcatctgacagccgaacttgcccgacaaatgggcaaaaaaatctgcgttttgtttatcgactgggaagcgcaattctcttgcaccattaactatgttcagtccctgcgcgagttgtacaccgatgtcatcgaagagttttactgggatgcgctcccgcttacgacgcaaaattccctttcacaataccaacccgaatggcagtgctgggaacctgatgtcgaatgggtacgtcaacctccccaagatgcgataaccgaccctgactttttctgcttttaccagccaggcatgaccttcgaacaatttgtacgtgagtttgccgaatggttttcacaaaaacgtccggcggcgatgatgatcggcatccgtgcggatgagtcctacaaccgttttgtcgccatcgccagtttaaataaacaacgttttgccgacgataaaccctggactacggccgcaccaggcggtcatagctggtacatttaccccatttacgactggaaagtggctgatatctggacctggtatgcaaatcatcaaagtctctgcaacccactgtataacctaatgtatcaggcaggcgttcctctgcgtcatatgcgaatttgcgaaccttttggcccggagcaacgacaaggattatggctctatcacgttatcgaaccggatcgctgggctgctataggatcccctgcggatcgagaagaggatgcagaggaatatctggaagcaatcatggaggctcgtgttaccgttgctggcatggggctggtgatggaggtgcaggattacttcgatggcgaggcccgatagactggcgaaggcgtggctgccccgagtacacaccgcaaatcaagtcgttgaaagatgagcgtaaagaggcctatcgtcaaatcgtcgaaatgagtaccgaaccgcaggatgtggatctggtcaggccggcgaacaagtttgaaatgaccagggtgcgtgaaggtgaaaaggaagctgaccttccagtctggaaacaccatttgttgtgtgacgaaagcgggaactatccggctctgttgaaccattgggaaaccaaggtttttgagatcgaaaccaaacgtgaaggatttgctttctggtatcgtaatccacagtacacagggcagtcgtcactgggaatcgcttatgttgaagctgaacagtacaagattgttcgtcccgatttcctgttctttgccgaacaggatggcaaaatggttgtggacctggtagatccacatagcctacatctggctgatgctttgcccaaactggaaggacttgcgctatatgccgaacatcattctgatgcttacaggcgaatcgaatctgtcgccgaagtaaagggtaaattacgagtgttagatttgaaacggcaggatgtgcaggatgctgttgctaccgctgaaaatgcagaaacgttatttagtagcggacttgctgatgactatcagtaa

SEQ ID NO: 29091 - DNA, 2319 bp, Homo sapiens
  SIMILAR (876)..(4): 981254mologous to Escherichia coli CG Site No. 33230,accession number U29579,Smith-Waterman Score=1438.
ttatcgcgaaggagcaatgagtgagtcgcggcggatcagttttccgctgaaggttttcggcggtgagaaatccccgccatcgagcataaaaatcagccgtccaataatttcctgaatcatctcagtcaccggaatttttacgctggagagcgccggaacggtgtagggggcaatagcgatatcatcgaatccgataactgacacctgctctggcacccgtacgccgcgctcgtgtaacgctttcatcgcacctatcgccatatcgtcgttactggcaactaacgcgctaaatttagccccacgttcgagcaacatttctaccccttcggccccgctggcaggcgtccatttaccgttagcgataagtttttcattgagcgcaataccatgctgcgccagcgcgtctttatacccggcaagacgttcaatgctggtgggggaatccatcgagccggtaaggaaagcaatctcctgatgcccggcgtttatcaactctgccacggcgttaaaactggtctgtttatgatcgcaccagacgctatggctgctgtttttgcgcaggcggcgattaagcaccattatcggctgactgtgcgcgtcaatgatgtcatcgatctcatccacgcttaaaaaacgcgggtaaatcatgatcgcgtcgcagcgcagatccagcagatactgaatcgcctggcgctcttcttctgcgctgtgtttaccatctgccaatagcaactgccgccctttctcttccgccattcgcgcggcatgaaagagtaattcactaaaataaatgccgtggtaaagcgtgttggtcactaccagctccagcgtctgagtactcttcgccgacagattgcgcgccacaagtttggaccgtaacgctctctttgggaatcgcttatgttgaagctgaacagtacaagattgttcgtcccgatttcctgttctttgccgaacaggatggcaaaatggttgtggacctggtagatccacatagcctacatctggctgatgctttgcccaaactggaaggacttgcgctatatgccgaacatcattctgatgcttacaggcgaatcgaatctgtcgccgaagtaaagggtaaattacgagtgttagatttgaaacggcaggatgtgcaggatgctgttgtaccgagttcgatttgctacagccgaagttacggtctccttcaccaaacactttgctttcaactttggtcaggtagtcgggatcctctagccaggacatatccggcgcattgaggaagcagcctttatcgcctactgccagcaccgccagcgcgttagcctggcccatcgccgtcatgcgcgtgccttcaatcggatcaacagcaatatctaccgcgtcgccgcgaccagtaccgactttttcaccaatgtagagcatcggtgcttcgtcgatttcaccttcaccaatgacgatggtgccgtcaatgttgacctggttgagcataatacgcatggcgtttaccgccgcgccgtccgcggtgtttttatcgccgcgtcctaaccatttgtagccagccagcgccgctgattcggtgacgcgggaaaattcgatggcaagttctcgtctcatagcaaactgctcagtggtttcgatgcctggacggaactcgcgctcaatcaccgctttctcttgcagctcgtcgaggttctgccagaagccaaccgccaggcctgcgagataggccgcacccaatgcggtgacttcgcgcacttccgggcgctcaacgcgggtgccgagaatatcggactggaactgcatcaggaaattgtttgctactgcgccaccatccacgcgcagggcgtgcagacggataccagagtcggcctgcatcgcttccagcacgtcacgcgtctgataagcaatagactccagcgtcgcgcgtataatgtggttagcgttcaccccacgagtcagaccgaaaatcgccccgcgcgcatacgggtcccagtacggcgcacccagcccggtaaatgccggaaccacatacacaccattggtgttttgcactttggtggcgaaatattcggaatcgtaggcgtcgttaatcaacttcatttcatcgcgcagccactgaatggatgcgcctgccataaacaccgcaccttccaacgaatagttcacttcgccagtcgggccgcaggcgatggtggtcagcaggccgttttcaaacagcgcggcctgctggtcaccggcgatcccggagattggaataccggtgccgcctttgccgccaatgttagtctgaccgtatacttcggaagaacgacgcacttctctcatctgcat

SEQ ID NO: 29092 - DNA, 10161 bp, Homo sapiens
  SIMILAR (7147)..(7106): 421254mologous to Escherichia coli formylglycineamide ribonucleotide synthetase (EC 6.3.5.3),accession number M19501,Smith-Waterman Score=41.
atgccgcatccgggctgcaaaaccaatgggctgacgacttaccccaactgcttacgcgcattgcggaaaatgcgcatccatgggccatcctcgccccagttttccggatgccaggagttgctgacagtacggaaaacacgttccgggtgcggcatcataatggtgactcgaccactttcagtcgtgactgccgtaataccgttcggtgaaccgttcgggttagccggtgactttgccgaagttatcgacatagcgcagtgccaccagccctttgctttccagtgccgccagatgcgccgcatcacgcacttccacgcgcccttcaccatgagagacagcaatcggcatttgcgagcccaacatcccctgcaacagcagagacgggctttgggttacttcaaccaggctgaaacgcgcttcaaagcgatcggaggtattgcgcacaaaacgtggccacaactcactacctgggatcagttcacgcagattagacatcatctggcaaccgttacatacccccagcgccagcgtttgcggacggtggaagaaggttgcaaactcatcgcgtacacgcacatcaccgtaggagaaaccaccgcacgcgaccagggcgtggaaatcttccaggcccgtgcgtccggtcagcaggtcactcatatgcacgtcgatagcatcaaagcctgcacggtggaaagctgccgccatttcaacatgcgagttcacgccctgctcacgcagtacggcaactttcggacgtgcgccagtggcaatatacggtgctgccacatcttcgttgatatcgaacgacagttttacattcaggcccggatcggcgtcgttagatttcgcctgatgctcctgatcggcacactccgggttgtcacgcaggcgctgcatctgccaggtagtttctgcccaccagacacgcaacgtggtgcggctttcgctgaatacagtctgcccgttggcggtaatcacaaaacggtcaccggaaaccgcctgccctacataatggacacaatcagcaagcccatgctgtgccagtacggactcgaccgcttcacggtcagcggcacgaacctgaatcaccgcacccagttcttcgttaaacaacgccgccaggcgatcgtcacccagagtggcgatatccgcgtcaatgccacaatgaccagcaaaggccatttccgccagcgttaccagcaggccgccatcagagcggtcgtgatacgccagcagcttacgctgtgcaaccagcgcctgaatcgcgtcatagaagcctttcagttgcgcgacatcgcgtacatctgccggtttgtcgccaagctgacgataaacctgcgccagcgccgttgcgcccagcgcgttattgcctttgcccaaatcaatcagcagcagtgcgtatcttcggtagaaagctgcggcgtgatggcgtcagcggagccggagcattacgaggcgttgtttgtttacgcgcaaaagcggctggataaatgtgtgttcggcgaagagaaaccagcctacgctcggtaccgagctgatctgaccggggagaagatacgccccaacacatcgtccacttccgccagcggctggcagagattttcccaggtgtacggtgccccttgcgctactacgcgctccacgttttcgcggcagtcgttcaatgccttagtcacggctggaacgacatgttccgggagaattttagaaaacggaggcaattcaaagggagtcagtaacggattcgtcattcgcgcagtcctggttaaagagagcctgatcatcgagtcgctgaaagagaaagataaaccgtttctctatctcgacacccacgcaggggccgggcgttatcagttaggcagcgaacatgccgagcgtaccggcgaatatctcgaaggcatcgcccgtatctggcagcaggacgatttgcccgcagaactggaggcgtacatcaatgtggtaaaacacttcaaccgtagcggtcagttgcgttactaccccggttcgccgttgattgctcgcctgctactgcgtgaacaggacagcctgcaactgaccgaactgcacccgagcgattacccgttgttgcgttctgaatttcagaaagatagccgtgcgcgtgtcgaaaaagccgacggtttccagcagcttaaggccaaactgccgccggtttcccgccgtggtttaatccttatcgacccgccgtatgacatgaaaactgactatcaagcggtggtcagcgggatagcagaaggttacaaacgtttcgccactggtatttacgcactgtggtatccggtggtgctgcgtcagcaaattaagcgcatgatccacgatctggaagcgaccggtattcgcaaaattctgcaaattgaactggcggtactgccagacagcgatcgccgtggcatgaccgcttccggcatgattgtgattaacccgccgtggaaactggaacaacagatgaataacgtgctgccgtggctgcacagcaaactggttccggcaggcaccgggcacgccaccctggatcgtgccggagtaattgcagccattgctggcacctattacgtctcgcgctacaatcgcggacactttgtcatgactaaacactatgattacatcgccatcggcggcggcagcggcggtatcgcctccatcaaccgcgcggctatgtacggccagaaatgtgcgctgattgaagccaaagagctgggcggcacctgcgtaaatgttggctgtgtgccgaaaaaagtgatgtggcacgcggcgcaaatccgtgaagcgatccatatgtacggcccggattatggttttgataccactatcaataaattcaactgggaaacgttgatcgccagccgtaccgcctatatcgaccgtattcatacttcctatgaaaacgtgctcggtaaaaataacgttgatgtaatcaaaggctttgcccgcttcgttgatgccaaaacgctggagtgcgatcccttttatatattttctgcattgttattctttattccattcgccttaatgatggctgaaatgggagctgcttatcgcaaagaagaaggcggtatctattcctggatgaataatagtgtcggaccacgttttgccttcattggtacgtttatgtggttttcctcttatatcatctggatggtgagtacctccgcgaaagtttgggtaccgttctcaacattcctctatggtagcgacatgacccagcactggcgtattgccggactggagcctacgcaggtggttggtctgctggctgtggcatggatgattctggtcaccgtcgttgcttctaaggggattaataaaattgcccgcattactgcggtgggcggtattgcagtaatgtgtctgaatttagtattgctgttagtaagcattactattttgttattaaatggtgggcatttcgcgcaggatattaatttccttgcatcaccgaacccgggttatcagtccggtctggcaatgctatcgtttgtggtatttgccatttttgcctatggcggaattgaagcggttggtggtctggtcgataaaacggaaaatccagaaaagaactttgccaaaggtattgtttttgccgctattgttatttcaatcggttattcgctggcaatatttttatggggcgtcagcacaaactggcagcaggtattaagtaatggttccgttaacctcggcaatattacctatgtgctgatgaagagccttgggatgacgctgggtaatgcactgcatttgtcacctgaagcgtcattgtcgctgggcgtatggtttgcgcgtattactggactttcgatgttcctcgcctataccggtgcgttctttacgctttgctattcaccgttgaaagccatcatccaggggacgccgaaagcattgtggccggaaccgatgacgcgcctgaatgcgatggggatgccgtctatcgccatgtggatgcagtgcgggttggttactgtcttcatcctgctggtttcgtttggtggcggtaccgcatcggcgttctttaacaagctgacgctgatggcgaacgtgtctatgacgcttccttacctgttcctcgcgctggctttcccgttctttaaagcacgtcaggatctcgacagaccgtttgtgattttcaaaacgcatttgtcggcaatgattgcgacagtggttgtcgtactggtggtgacatttgcgaacgtcttcaccatcattcaacctgtggttgaagccggagactgggatatggtatcagctcggtacctgcaacatatcgtcgtgcggcacttctcctttcaacgcgtgagagttgaaatcgcagtacgggcatttctgcacgcaccacgggatgtgaatgtagagactcagcggagcgtccagcagcagtttcaacgcctgaccacggtgggaaatggcgctcttttcttcgcgggtcagttcggcggcggttttcccttcggaaggtacgaagaagattggatcataaccaaagccaccagtgcccgctggttcacgagtaatcacgcccggccagctaccgtggcataccagcggagtgggatcttccgcgtgacgcagatataccagcacgcagtggaaacgcgcctgacgttggtcgtccggtacgtctttcattgtttccagcagtttttgcagattcttttgatcggtcgcgtcttcaccggaataacgcgcggagtaaatgcccggcgcgccgccaagcacatctaccgccagaccagagtcgtcggcaattgccggactggtgaaggcgtggacgtgctgcgtaaccatctcaaacagagcatgggctttgacaccaacatggaaggcggcttcctggcgcgtcgtcgccacctacaggcgctggaacaggcagcggaacatctacaacagggcaaagcgcaactgttgggagcctgggcaggtgaactgctggcggaagagttgcgtctggcacagcagaacttaagcgaaatcaccggggaatttacttcagacgacctgctggggcggattttctccagcttctgtattgaggcaattattaaatccggtatgaacccgttcctgctggatagcgaagatgtttttatcgatttactgaccgacagcggcaccggggcggtgacgcagagcatgcaggctgcgatgatgcgcggcgacgaagcctacagcggcagtcagacgaacaatgacaacgcggcgcatgagctggaaagtcaggccgctacttcagttactaatggcgcacatatttatcctttcaaaacttctcacataggcgagctggctaccgtgaatcctggaaccgatctcaccgtcgttgatgccagtggcaaacagccgatcgttctgttgcagggttatcaaatgcagggcagtgaaaacacgctctacctggcggcaggtcaacggctggcgctagccacattaagtgaagaaggtatcaaggcgctcactgtaaacggggaatggcaggctgacgaatacggcaatcaatggcgtcaggcgtctttacagggtgcgcttaccgatcccgcattagcggaccgtaaaccgctatggcaatacgctgaaaaacttgacgatacctattgcgctggttgtcatgcccctattgccgccgaccattacaccgtcaatgcgtggccgtccattgccaaaggaatgggggcacgaaccagcatgagcgaaaacgaactggacattttaacgcggtatttccagtacaacgccaaagatattaccgagaaacacggtattgccgctggagcgctggtggtgacatcggcagcaccgctccccgcatgggcagaagagaagggcggtaaaatcctcaccgcgggacgttggggagcgatgaacgtagaagtgaaggacggcaagattgtttcttcaacaggcgcgctggcgaaaaccataccgaattccttacagtctacggcggcggatcaggtacacaccacggcgcgtattcagcatccgatggtgagaaaaagctatctcgataatccactgcaaccggcgaaaggtcgtggcgaagatacctatgtacaggtgagctgggaacaggcattaaaactgattcatgagcaacatgatcgtattcgtaaagctaacggaccatcggccatttttgccggatcttacggctggcgctcttctggcgtgttgcataaagcgcaaaccttactgcaacgttatatgaacctggcgggcggttattccgggcatagcggcgattattcaaccggggcagcacaggtgatcatgccgcatgtggtcggttctgtagaggtgtatgaacagcagacctcctggccgctgattctggaaaacagccaggttgtggtgctgtggggaatgaacccgctgaataccttaaaaattgcctggagcagtaccgatgagcaagggctggaatacttccatcagctgaaaaaatctggcaaaccagtgattgccattgatcctatccgctccgaaaccatcgaattctttgacgataatgccacctggatcgcgccgaatatgggcaccgacgtggcactgatgttagggattgcgcataccctgatgacacaaggcaaacacgataaagtgttccttgaaaaatacactaccgggtatccgcagtttgaagagtatctgacaggtaagagcgataatacgccgaagagcgcggtctgggcggcggaaattactggcgtaccggaagcgcagatagtcaaactcgctgaactgatggcggcgaatcgcacaatgctgatggcaggctggggaattcagcgccagcaatatggtgaacagaaacacgcgggattcatacagcggccagccatccgtcatccatatcaccacgtcaaaggtgcgttcaccgaatacgtgcgcaacaaccgtcttccggagactgtcatacgcgtaaaacagccagcgctggcgcgatttagccccgacatagccccactgttcgtccatttccgcgcagacgatgacgtcactgcccggctgtatgcgcgagaagcgatcgaccgtctgcgtgacacctcttcttctcaccagcgtatttccgtggtggaagtgatgggccgttattgtggagatctgacgttggctgcggccattgccggtggctgtgaattcgttgtggttccggaagttgaattcagccgtgaagacctggtaaacgaaatcaaagcgggtatcgcgaaaggtaaaaaacacgcgatcgtggcgattaccgaacatatgtgtgatgttgacgaactggcgcatttcatcgagaaagaaaccggtcgtgaaacccgcgcaactgtgctgggccacatccagcgcggtggttctccggtgccttacgaccgtattctggcttcccgtatgggcgcttacgctatcgatctgctgctggcaggttacggcggtcgttgtgtaggtatccagaacgaacagctggttcaccacgacatcatcgacgctatcgaaaacatgaagcgtccgttcaaagaagtgataaaggaatccaaagttgaagagcccaggaaacgggaaactgtatccataatgctgaccaaatatgcagcctataacacctttcaccactgtgaacagtgccgccagtacatggacttcacctctgcctcccagaacgaactggcgctgcacagcaagaaagagatcgacgagtatttcgcgcatgtctggcaaaccatgcaggcatgtatcgatcgcgggatgaacaccgaaggtgtactgccaggcccgctgcgcgtgccacgtcgtgcgtctgccctgcgccggatgctggtttccagcgataaactgtctaacgatccgatgaatgtcattgactgggtaaacatgtttgcgctggcagttaacgaagaaaacgccgccggtggtcgtgtggtaactgcgccaaccaacggtgcctgcggtatcgttccggcagtgctggcttactatgaccactttattgaatcgaactgctgggcggtagcccggaacagggatgtgatgcgcgatggtcgcattgagcaagacggcacgccgcgtgaaatctacgaagagccgaaaaacctgtttgttgccggcttcattggcgaaatcaatatgtttaacgccactgtcatcgaacgtctagacgagcagcgcgtacgcgccaacgttgaaggccgcgaatgtaatatctacgttaacttcgccgttgaaccggggcaaaaactgcatgttctgctgcgcccggaagacttacgtgttgaagagattaacgacgacaaccacgctgaagggctgattggttacgttcgcgagcgtaactacaaaggcatgacgctggagtcggttgttgaactggaaaatggcaagatggtgatggtcagcgaattcttcaatgaagacgatcctgactttgaccactctctcgaccaaaaaatggccattaattgggtagaaagctgggaggtcgtactggctgatgaagaacacaaaatatgttggacttttatcagagctcctatgaattttcacgtttggtttcgatctcaaaaacctggtttcccaatggttcaacagagccggatagttcccgctttcgtcacacaacaaatggtgtttccagactggaaggtcagcttccttttcaccttcacgcaccctggtcatttcaaacttgttcgccggcctgaccagatccacatcctgcggttcggtactcatttcgacgatttgacgataggcctctttacgctcatctttcaacgacttgatttgcggtgtgtactcggccagccacgccttcgccagtctatcggcctcgccatcgaagtaatcctgcacctccatcaccagccccatgccagcaacggtaacacgagcctccatgattgcttccagatattcctctgcatcctcttctcgatccgcaaccttatcggccagatattcgacatagctgtccctcctgttcagctactgacggggtggtgcgtaacggcaaaagcactgccggacatcagcgctatctctgctctcactgccgtaaacatggcaactgcagttcactttacaccgcttctcaaccggaacacttggattcagtgtggttcactgggccggcccatgggtaccctcaaaaacccggcggtagaagaaaataaaaaggcacagcttgagcgtgataaacagcttagcgaacagcaaaaacaagcggcgttggcgaaagaatataaagctcaggtgaagcagcttattgaaatgaaccgaatcaccattgccaatggcgatattggttttaacttcactgacggcaatctgattaagaagatttttgtcgataagctcacacaggcgcagttgattaatggtcgtctggcgattgcccgcttgttggtcgataacaatagcgaaggtgaatacgccattattcccgccagcgttgccgataaaattgctcagcgcgatgccagcagtatagtgttgcacagcgcgctcagcgccgaagagcaggatgaagacgacccgtatgccgacttcaaagtgcctgatgatttgatgtggcctacggtttatgggcgaagtgtagaccggataaggcgttcacgccgcatccggcagtcgtgcgccatgcctgatgcgaagctttgcgcgtcttatcaggcctacggcttacgggcgaagttttattggcgtggtagcatatgttgccgagcagtgctcgagcgtaaccgcgaacagccgatgacccgcaccaaagaactggcggaagtcgtggctgctgcaacgccggtgaaagataagtttaaacatcccgcgacccgtaccttccaggcggtgcgcatttgggtaaacagtgaactggaggagatagagcaggcgctaaaaagctcgctcaacgtgctggccccgggtgggcggctttcgatcatcagcttccactcgctggaagaccgtattgtgaaacgttttatgcgtgaaaacagccgcggtccgcaagttccggcagggttaccgatgactgaagagcagctcaaaaaactgggtggccgtcagctgcgagcactaggcaagttaatgccgggcgaagaagaggtggctgagaaccctcgtgcccgtagttcagttctgcgtattgcagagaggacgaatgcatga

SEQ ID NO: 29093 - DNA, 1176 bp, Homo sapiens
  SIMILAR (199)..(882): 891254mologous to Escherichia coli hypothetical protein,accession number U70214,Smith-Waterman Score=1047.
atgcgtctgcagcgtctgagactaccactatgtgctgcttgtagacacatcggtgacgtgatcgtatatagtgcgtacgtctgtgagcatcggtgtatgcgactgctagctacgcgacgccactatgtggtcactctaacgactcatcttcgccgtcgactattcttgaccgaggtgaacgcaagatatgtctgcatctacgatgatgaggtcagtgtcatgcgattgacgaagagctgcacgacagatcacgtctctcagtcagcattcgcgctcatctaccatgagcgtaaagaggcctatcgtcaaatcgtcgaaatgagtaccgaaccgcaggatgtggatctggtcaggccggcgaacaagtttgaaatgaccagggtgcgtgaaggtgaaaaggaagctgaccttccagtctggaaacaccatttgttgtgtgacgaaagcgggaactatccggctctgttgaaccattgggaaaccaaggtttttgagatcgaaaccaaacgtgaaggatttgctttctggtatcgtaatccacagtacacagggcagtcgtcactgggaatcgcttatgttgaagctgaacagtacaagattgttcgtcccgatttcctgttctttgccgaacaggatggcaaaatggttgtggacctggtagatccacatagcctacatctggctgatgctttgcccaaactggaaggacttgcgctatatgccgaacatcattctgatgcttacaggcgaatcgaatctgtcgccgaagtaaagggtaaattacgagtgttagatttgaaacggcaggatgtgcaggatgctgttgctaccgctgaaaatgcagaaacgttatttagtagcggacttgctgatgactatcagtaatctatagaaaattgcgtaacgaaactgcattttagtaattttttgaaacaatacaaataaggccttctcactgagaaggccattaccgacttacagttcgatttggctacagccgaagttacggtctccttcaccaaacactttgctttcaactttggtcaggtagtccagtcgggttaacagcgcctggtagttctgctggaagtcagtactattggtgtctagcacataaatacagttttcaggaaaatggtccagaccagggcgatctccgggtacggagatcgaatt

SEQ ID NO: 29094 - DNA, 2487 bp, Homo sapiens; identical to SEQ ID NO: 18301
  SIMILAR (1738)..(2256): 931254mologous to Escherichia coli RhsC protein precursor,accession number D90709,Smith-Waterman Score=921.

SEQ ID NO: 29095 - DNA, 1082 bp, Homo sapiens
  SIMILAR (722)..(943): 1001254mologous to Escherichia coli OrfX in,accession number X68873,Smith-Waterman Score=378.
ttagaaacgacctaactgctttaactcatcattggtcaggcgactggcgttgataacgctggtccctacaaagcctcctgctggctgtaagagctttcctttctcctttgaagcagtcacagacactagaattccttttcccctgaagacctcatgtgacaggtgtcctattgtgggactgcggttgaccacaggtacctgccagttctctccaaattctttccagtgcaggcttccattgttattaaattccctcgggaggcattcgtcctgcactaagtaagtagctcggtacactgtggcggcaatgcgtcgggacggctggctggtgtcgggcagcttataaatgtcagttacatcctttcccacaggggttaacatgggtcgtgcatgcaatgtcaacatgtgcgtaggtgcagtgttgcacaccaataaggcaccggtgcagccaatgccaatatacagcacgcataagggtggtatgcgtgtacccgaaatgcgggatcgggcaagggagttggtagcagtgtaggtaaagcgtgcgtaagaacgtagcctacggtgctggcgcactagaaggcgtaattctggggtactgggcggcacttttttggacctcttgacgagcctcaacgaaagcaacgcggaatttgacttcttcaccgtttcgatcatcagcacttcagcgaactcaacagtttcgccagttgcgatgtcagcagaacaggcacagatgatccgtaccgccatcgaacagggtaacggtcgccatcttctggaaccggttctggaagcaatgaacgcttgtggatctcttgaatggacgcgtcagcgtgccgaggaagaagcagacaaagccatcgcagcgttacaggtgctcccggacaccccttggcgagaagcactcatcggcctcgcgcacatcgctgttcaacgcgatcgttaatcccctcccctcatcccgcgcagcgcgcgggatggttccagtaagttccataaaaacacttattcagctctataacacctgaaaaatagggatgtgcatctttatatattctgaatattcacactctttacaggag

SEQ ID NO: 29096 - DNA, 352 bp, Homo sapiens
  SIMILAR (29)..(166): 631254mologous to Escherichia coli ATP:glycerol 3- phosphotransferase (EC 2.1.7.30),accession number M18393,Smith- Waterman Score=136.
tacttattaccagtaggacctgcaggacactggctgctttatgctgatgaacactggcgagaaagcggtgaatcagaaaacggcctgctgaccaccatcgcctgcgcccgactggcgaatgaactatgcgttggaaggtgcggtgtttatggcaggcgcatccattcatggctgcgcgatgaaatgaagttgattaacgacgcctacgattccgaattttcgccaccaaagtgcaaaacaccaatggtgtgtatgtggttccggcattaccgggctggagtttgctatggacgagaacttgccatcgaattttcccgcgtcaccgaatcagcggcgctgctggctacaaatg

SEQ ID NO: 29097 - DNA, 1773 bp, Homo sapiens
  SIMILAR (489)..(46): 971254mologous to Escherichia coli ModC,accession number U27192,Smith-Waterman Score=730.
ttaccgccgacttccagttccacttccacctggccgttgtcgtgcataactattaacaacttttgcccgcaatacgttacgaatgctggtttgctgcggcggttgtaaaaccagagaaacatcggaagcctgaatgcggatacgtagcgcagcttgcagcggttcgtccagcttattgacccacaaatgctgatcgcccagcgccagcgcggtcatcgcgtaatgcggatgatgctcaagcaccgtcactttcagaatgctactttgttgctctttcggcagccacggattcatcacgctactgccccacacttcctccagcgcgccaaaggctttcacctgaccggtttccagtaccatcactctgtctgccagatggaggatctcatccagcgaatggctgacatacaacatcggaatggtgatttcccgtgtcagccggtgcagataaggcaacagttcgcggttacgcggaatatccagcgacgcccagcggttcatccagcaacagcaatttccggtgcctgtcaagcaaggcccgaccaatcgccacgcgcttgtttttcgactccggacaggctgcctgctaaacgggtcaagcaaccggttcaatggcctaaaggcgtccccagcgttaaggtttaatagtgcaccgccggagttaccgcggttaatggaagcatctgtctggataaagttttccagaccttcaagattcaacccgctgcggccgacgcgcaatttatcggagtcggcaatagcgatttgcgttaatttgctcgggttttgaatttgtaacagggcgatatcgctctggtcatcgctaccaatcagttttgcatcaaactcgcgcccatcattgagctgaatactgattttctgtgcctgattaatcacatggttgttggtcagcacatagcctttactggcgttgatgatgacaccggagcctaaaccttcgaagggttgtgcaggttgatccggtaaatcatcaccaaaaaactgtttgaattcttccgggattttctggccctgactggccgttcctttcacccggacgctcaccactggcggaagcactttttccagcactggagccagaatcgctgcgcgataaatcttcacaatttcttcgtgagttgcctggatcgggttagtaaagccacaggcatctttcagggcattagtcgccaataccgcgaaatcttcttctttcacgttcaggtcgcgtaggcctgccgggatatccactttcttcgccagttcacggatggcgttaatgcaggcttcagcaccttccgcgtcgtttttacctgtcacgttcacgcccattgcagcggcacagtcacgcagacgtgcagcggcgactttgctgttgaatacctgaacgtgcggcagcaaaacggcgttacatacaccgtgtggcaggttgtagaaaccgcccagctggtgcgccatcgcatgaacataacccagagaagcattattgaacgccataccgggcgaggaactgggcataagccattgcttcacgcgctttcgcattactgccatcttcaacggctgatagttgcattgccattcatgatgatcctctggcattcgtgcattcagccattcaccattcacccattcaactggaattttggttgaatgccggaattgtgtccacaaattgtggatggatagttggttggctggctggatggctggctggatggctggctggatggatggtgaatggctggcggcggttcggttgctttgaagcat

SEQ ID NO: 29098 - DNA, 978 bp, Homo sapiens; identical to SEQ ID NO: 28853
  SIMILAR (364)..(975): 991254mologous to Escherichia coli K12 putative LACI-type transcriptional regulator,accession number AE000482,Smith-Waterman Score=1005.

SEQ ID NO: 29099 - DNA, 2424 bp, Homo sapiens
  SIMILAR (637)..(1332): 911254mologous to Escherichia coli GlpX protein,accession number Z11767,Smith-Waterman Score=1044.
atggcaaagaaccgtagccgtcgtctgcgtaaaaaaatgcacatcgacgaattccaggaattaggattttcggtggcatggcgattcccggaaggtacatcggaagaacagattgataaaaccgttgatgattttattaacgaggttatcgaaccgaacaaactggcctttgacggcagcggttatctggcctgggaaggtctgatctgcatgcaggaaatcggcaaatgcaccgaagaacatcaggcgattgtgcgtaagtggctggaagagcgcaaactggatgagtacacaatcatcatcatcatcatcatccacatcatcatcaatcatcatcattataatcaactcatcatcatcattacaatgtcagccctgtgcgtcaaaatatttagctcattatttcacggtcagcagcatcgcggcgtattcaaccccagtggtatccacccaagagccatgggctaccagacaccacccgcaccaccaacaaacagacaggcgacgcccagcgacaagaaaatcgccacgccaataccacaacgaaaccaacagacaataaccaacacggataaccacgaaaccaccgcgcacgtaccacacggacgcgccaccacccgcgccaacccgcgtcacgaatcagcggcgctggctggctacaaatggttaggacgcggcgataaaaacaccgcggacggcgcggcggtaaacgccatgcgtattatgctcaaccaggtcaacattgacggcaccatcgtcattggtgaaggtgaaatcgacgaagcaccgatgctctacattggtgaaaaagtcggtactggtcgcggcgacgcggtagatattgctgttgatccgattgaaggcacgcgcatgacggcgatgggccaggctaacgcgctggcggtgctggcagtaggcgataaaggctgcttcctcaatgcgccggatatgtatatggagaagctgattgtcgggccgggagccaaaggcaccattgatctgaacctgccgctggcggataacctgcgcaatgtagcggcggcgctcggcaaaccgttgagcgaactgacggtaacgattctggctaaaccacgccacgatgccgttatcgctgaaatgcagcaactcggcgtacgcgtatttgctattccggacggcgacgttgcggcctcaattctcacctgtatgccagacagcgaagttgacgtgctgtacggtattggtggcgcgccggaaggcgtagtttctgcggcggagctggcacgctgcaaagcgatgggcatcgaagccggtaaagtattgcgcctgggcgatatggcgcgcagcgataacgtcatcttctctgccaccggtattaccaaaggcgatctgctggaaggcattagccgcaaaggcaatatcgcgactaccgaaacgctgctgatccgcggcaagtcacgcaccattcgccgcattcagtccatccactatctggatcgcaaagacccggaaatgcagtccggcattgatgccgtgcttcatgtactggattgggtgccggttcgtcttgcgggtgtggtatatgccttgatcggtcatggtggagacgccgaaggcagcggtttcaatggcgaagaaaacctcgttcgtggtcgtggtggtgattgcactactgacgatttacggggcgttggtgtaaagattattgccctcaccctgtacgggtataccgaaatcgccattcctggggtcatcagcataatcaccagtaccgccgccataaaaagtaggcagactcagataccagcggataagcagagcaggcttcaccggtcatccagaaagcagctggacgatatacgcacggtcacattgtgctatctggcagtgtggatataccactatatcgtatatgtactacgaaacaccccggagcacgacccacgacatgacgtataccgtctgactatccgcgatctactgactcactacctgggcccacaacacgggctacgccgacctactacagctgacgacttacccgtccacatacccacagtgcaaacagatccaggcaaaataccggcccgaaataatcacgggcaacccgaaatcacaaagcaacaagaaagaccccccaaaccaagcaacaactcccccaaagcacctggcacgcacggccccgcactgcacacatccaacatgggccacaataccataaaaagagcgctactgcgccagagccccaggcccacgcgccggccccgcgcagaaccaaagctccaccccacaacacaacgacacccaacaccaagacgaacacaaaacaaccaccaaaagggccaccacaagaccacagaccactacaccgcgccacacaccgtgaacaacccccccacagaacaactcccccccaagacgcagagaaaaacaacccaggactaa

SEQ ID NO: 29100 - DNA, 3587 bp, Homo sapiens
  SIMILAR (3353)..(1950): 821254mologous to Escherichia coli RtoA protein,accession number D90778,Smith-Waterman Score=1950.
aatcgcgcccgccgccagccgattaacaaccagctttttcatatacatatcgggcgcatgtaacaggctatctcgaggggcgaaagccatgaccgccagcgcattgctctgccccatcgccaccatccgcgtgccttcaatgggatcaaccgcgatatcgacttctggcccatcgcctttgcccacctcttcgccaatccacagcatcggcgcatggtcaatttctccttcgccgataaccactcgtccacgaaaagcgacgtcgtttaatgcctggcgcatcgcggtgaccgccaggccatcaattttatttttgtcgccacatccggtttgcggccaggcagccaacgctgcctgttccgtaacgcgaaataatggccacgccagggacatcattgcgcggcctccccgatatcaacgccaaattgtgccagcagatatttctcggcctgttcattccagatgccgtgcgtttcctcaaccagccgcgcccactctttaaacagcggatcgcttttgcctttttcggcgaaatcggcaatggcagtgagcggcatggtcacgccgttataaatgagttttttaccgccagggatatccggcagattgagcacggtttctggcaccgcatccaggccaccgatatgggtcaccataaacgacggctgtaactgcccagtggcgctaagggcaatcgcctctttcatgtcgtccgttgaaccgccagatgtaccgacgacgtgcgtgctgttgtaatggacgttgtagaaattaaacggcactttgaagtttttatccgtcggcccggcaaagaagttcagacagccatcttccgccagtaattcatcagccatctcaacgacagcaggcaccgccgcataaacaaaaatgtcatcgaacccggcatctcctgtcagcgcccgcagcatctggacaggatcgctcatccctttggtattcacatacaccagctcaatgcctttactggccgccagttccaccggcagcagcttctgtacctgcgccagacgtttgtcgtcgatatcgaccaccaccacccgcgacggttgtatgccgccgttaatggcgtaatcgatagcgccaatgcccatcggacctgcacaagccagcagtgcaatattgccgccagttaacgccagtggtccagtaaggtttgtcgtgtcttcttgctgctgtttgtgttctgctgttttttgtgctgtgcctcttctcgtctcttcttcctgctgtctcgttgtgttttctcttgttgcgtgttgtgttcgtgtctgcgttccgtgtcctcgtttcctcttgcggggcacgtcgatagctattttgcggtgctggtgcgcgttggcctggcggcactcgtttttctgccgtttctgcgtacccgtggcaatagcctgaaaacggtcggcctgtatatgctggtgggcgcgatgcagcttggcgtgatgtatatgctgagtttccgcgcttatctctacctgacggtttccgagctgctgctgttcaccgtgctgacgccgctctacatcacgctgatttatgacatcatgagtaagcgccgtctgcgctggggctatgcctttagcgccttgctggcggtgattggtgccgggattattcgctatgatcaggtcaccgaccatttctggactggcttgctgctggtgcaactctccaatatcacttttgccattggcatggtgggttacaaacgcctgatggaaactcgcccgatgccacagcataacgcctttgcgtggttctatcttggcgcgtttctggtggcagtgattgcatggttcttgctgggaaatgcgcagaaaatgccgcaaaccacgctgcaatggggcattctggtgtttcttggcgtggtggcttccgggattggctactttatgtggaactgtaaggcatacccccatagcgacactgtttccatccagcgtcacgttattatcactgccgtaaacgttgatacccacggatggatcgaagaaatattccgccgcagtgtctgcggttttatccttatcaaccagaacgttaccagtgatattcactgtattcgcatcgccagaaacgtttatgcccgtcgctttctgcccgaccacttttagatcttttgccgccagcgtcacgctgttattgttgccattaagatctaccccggtcgagaaatcgccaacctgcatactgcctgccagcgaaaccttcccactgttggttgtgatgctgaaccctgtcgcttcattgctaacgttaacatcacccgtattggatactgttgccccctcaccgttgatgagcacgccaatcgatccagtatcggaaacaacaatatctcctttgttgttaaccgtgccgttgtcaccaatgttctcaacaccatgcgcaccgcctgtaacagtcaggctaccatccagatttacaatgccgatattgcccgcgattttggtacccgtggaatcttttccatcaacagtggtttttccactgttattcgcggtggcgtcgttaccgttgatctgagtgccggtgccgccattggtgatagtgctctcgccttcgttattgacgatggcctggtcgccgtcaatcgatgactccggatcggtgacgctcatggtgcccttgttatccaccgttgcgctgtcgccggtgatatctataccgtgaccgccgccgctgacatccagatcgccgtcctgaataacttttccgttattaccgttgatttccgtaccggtggaatccttgccgtcaacggtggttttgccgttgttgtttgccgtggcgtcatcaccattaatctgggtgccggtgccaccgttggtgatggtgctctcgccttcgttattgacgatggccttgtcaccgtcgatctggatacccatggactccggatcggtgacggtcatggtgcccttgttatccaccgtcgcgctgtcaccggtgatatcaataccgtgaccgccgccgctgacatccagatcgccgtcctgaatcactttcccgttattaccgttgatttccgtaccggtggaatctttaccgtcaacggtggttttgccattgttgtttactgtggcattatcacccgtaataacaagctcaccgttgtgattatattgccacttcgttgcgccatctgcgctcaccccttcaagggcaacagtgttattcgcttcatcaatctgccaaagattaatcgttgccttacgaccattgctatcttgcagagatatagtcccgtcagcattctcggtataagtaaaaactgaatcgcgaatagttaacgttttttccgtgttgtaggacagttcggctccgttctggtttggttcaggatcaggtatcggttctggcgtaggctctgggtccggcgttggctcaggcgtcggctccgggtttggtgttggatcaggtttcacttccggcaaagaccctgttccagaatctacaggcggcgtatcggaggaagatccggaaccaccgccatcacaaccggctaacagggttgcgctcaaaatagccgctaaaagcgatttcttatatttaaatttcttattcat

SEQ ID NO: 29101 - DNA, 3252 bp, Homo sapiens
  SIMILAR (949)..(1632): 971254mologous to Escherichia coli ATP:glycerol 3- phosphotransferase (EC 2.1.7.30),accession number M18393,Smith- Waterman Score=1154.
atgactcgaattgatgactatgggtcggtgttattactaatctacgctgataatgaaaagcagaattttggccagctcttcattgcttttaacaaggtgttctgcatgttttatcgcagccatttgcgggataaccttgccggatttctcagcgtcaaccatcagcttcagacccgttgcgccgatatccgccgggttctgggcaaccgtcgcggtcatttgtccggcttccaccattttgcgggcttccggaatgccatctgtaccgacgaccagcacttttcccgtttttccggcctgcaaaataagccacatcccaaggtcattgaatatcctcgtctcgggggcacagaggtatctggggaaagccttgcctgggtggacattcatgacttcaagcccatgaggaaagcctgtgataaaagagaccagggggtggccaactattatcccttacttggcttcgtccatgctacgatgtcgcctatcacagcgagtaaaggctatgtgctgaccaacaaccatgtgattaatcaggcacagaaaatcagtattcagctcaatgatgggcgcgagtttgatgcaaaactgattggtagcgatgaccagagcgatatcgccctgttacaaattcaaaacccgagcaaattaacgcaaatcgctattgccgactccgataaattgcgcgtcggtgattttgccgtagcggtcggtaacccatttggccttgggcaaaccgccacctctggcattgtttccgcattaggccgcagcgggttgaatcttgaaggtctggaaaactttatccagacagatgcttccattaaccgcggtaactccggcggtgcactattaaaccttaacgggcgtattggacgccgtgatttctggatttggataggcctgtggttcgcaggcatgctggtgcttttctcactggcggaccctggtcagttgtgcgtgaaagaagggatggcgaagaacacctatggcactggctgctttatgctgatgaacactggcgagaaagcggtgaaatcagaaaacggcctgctgaccaccatcgcctgcggcccgactggcgaagtgaactatgcgttggaaggtgcggtgtttatggcaggcgcatccattcagtggctgcgcgatgaaatgaagttgattaacgacgcctacgattccgaatatttcgccaccaaagtgcaaaacaccaatggtgtgtatgtggttccggcatttaccgggctgggtgcgccgtactgggacccgtatgcgcgcggggcgattttcggtctgactcgtggggtgaacgctaaccacattatacgcgcgacgctggagtctattgcttatcagacgcgtgacgtgctggaagcgatgcaggccgactctggtatccgtctgcacgccctgcgcgtggatggtggcgcagtagcaaacaatttcctgatgcagttccagtccgatattctcggcacccgcgttgagcgcccgggaatgcgcgaagtcaccgcattgggtgcggcctatctcgcaggccttgggggtggcttctggcagaacctcgacgagctgcaagagaaagcggtgattgagcgcgagttccgtccaggcatcgaaaccactgagcagtttgctatgagacgagaacttgccatcgaattttcccgcgtcaccgaatcagcggcgctggctggctacaaatggttaggacgcggcgataaaaacaccgcggacggcgcggcggtaaacgccatgcgtattatgctcaaccaggtcaacattgacggcaccatcgtcattggtgaaggtgaaatcgacgaagcaccgatgctctacattggtgaaaaagtcggtactggtcgcggcgacgcggtagatattgctgttgatccgattgaaggcacgcgcatgacggcgatgggccaggctaacgcgctggcggtgctggcagtaggcgataaaggctgcttcctcaatgcgccggatatgtatatggagaagctgattgtcgggccgggagccaaaggcaccattgatctgaacctgccgctggcggataacctgcgcaatgtagcggcggcgctcggcaaaccgttgagcgaactgactgttcatgagaagcagccctctaggtaccgagctgatgatggaaaagttgaaggccctaagctttcggggttgaacctttggctcaacgcatcgctgcgcttacacacccggcctatcaacgtcgtcgtttcactgatcttacggaggtgcccgctctgtggggactcccgtttggacttttctgcggcgctttgtcgtcctctgtggttgctggttggtggcatcggcccggctgtagcccacaatagaaacaggaaatatggagagatcttggtactgggaggagcaagaagacaggagaaggacttcctgcgacaggctggattggaggtacttgtgcggaccctactgcccaaggcgttggagtcactgtggatccagttacaccttccagatccagttactcctggtgccaggcagagtcacatatgtgatcggtaccgagctgatttggtggtgttcgtgtttggatctggtggtgcaggggcgcgctgtgtctgccgtgccctgcgccatggccagtacaccgtcgtttatggtgacccatatcggtgcctggattcggtgccagaaaccgtgctcaatctgccggatatccctggcggtaaaaaactcatttataacggcgtgaccatgccgctcactgccattgccgattttgccgaaaaaggcaaaaccgatccgctgtttaaagagttggcgcggctggcagcgttggctgcctggccgcaaaccggatgtggcgacaaaaataaaattgatggcctggcggtcaccgcgatgcgccaggcattaaacgacgtcgcttttcgtggacgagtggttatcggcgaaggagaaattgaccatgcgccgatgctgtggattggcgaagaggtgggcaaaggcgatgggccagaagtcgatatcgcggttgatcccattgaaggcacgcggatggtggcgatggggcagagcaatgcgctggcggtcatggctttcgcccctcgagatagcctgttacatgcgcccgatatgtatatgaaaaagctggttgttaatcggctggcggcgggcgcgattgatctgtctttgcctctgacggacaacctgcgcaacgtggcgaaagcgttaggcaaaccgctggataagctgcgcatg

SEQ ID NO: 29102 - DNA, 2760 bp, Homo sapiens; identical to SEQ ID NO: 24920
  SIMILAR (2571)..(2759): 1001254mologous to Escherichia coli D-serine dehydratase (EC 4.2.1.14),accession number D90866,Smith-Waterman Score=348.

SEQ ID NO: 29103 - DNA, 966 bp, Homo sapiens
  SIMILAR (415)..(723): 961254mologous to Escherichia coli ORF_o131; overlaps o678, other starts possible,accession number U18997,Smith-Waterman Score= 514.
atgctgctgatttttccaaaaaaaacccacaaggcattggaagcaaagaatttccgagctgcaatagaatatgggaagcaagattttgaagttgaggacgtaagacttgatttcaagaagcacatgtcaatgagttataagggctctgtgtatcggacccaagaccctggtggtgtgggttcaggaggagatctcctcatccattggtttcaaagatctgtgggagaagtgtggtttcccaggcaaggatcactctcaggtcgacctgcaggacagcaagtcgacgatgggcgtcaatgcttgttcgctggcaaatcatttctcacaaatgcgcaggttcaagggtttgaaatcacgggtaataccggaagcctgacggctaacccggattgcgtgattaacaggaacttatcatggctacagtacaacagaggactgcggtttatcgccgctaacgtgaacgagcgtggcggcgagatcgatctgataatgcgtgaaggccggaccaccatttttgtcgaggtacgctatcgccgctctgcgctttatggcggcgcggcagccagtgtgacccgcagcaaacaacacaaattattacagactgcccgcttgtggctcgcgcgtcataatgggagttttgatactgtggattgccggttcgatgtggtagccttcaccgggaatgaggttgagtggattaaggatgcctttaatgaccactcataattaaggtttaaggattagcgtgcaagaaagaattaaagcttgcttcactgaaagcattcaaactcaaattgcggcggcagaggcgcttccggatgccatctcccgtgcagccatgacgctggttcagtctctgctcaatggcaacaaaatcctctgttgtggtaatggaacttccgctgccaatgcacagcattttgctgccagcatgatcatccgtttcgcaacccagcggcccagctt

SEQ ID NO: 29104 - DNA, 338 bp, Homo sapiens
  SIMILAR (17)..(337): 1001254mologous to bacteriophage lambda E (capsid component;341),accession number J02459,Smith-Waterman Score=555.
ttttacgggammttttatgtcgatgtacacaaccgcccaactgctggcggcaaatgagcagaaatttaagtttgatccgctgtttctgcgtctctttttccgtgagagctatcccttcaccacggagaaagtctatctctcacaaattccgggactggtaaacatggcgctgtacgtttcgccgattgtttccggtgaggttatccgttcccgtggcggctccacctctgaatttacgccgggatatgtcaagccgaagcatgaagtgaatccgcagatgaccctgcgtcgcctgccggatgaagatccgcagaatctggcggaccccgcttaccgcc

SEQ ID NO: 29105 - DNA, 1208 bp, Homo sapiens; identical to SEQ ID NO: 13150
  SIMILAR (1)..(486): 941254mologous to Escherichia coli Protease II (EC 3.4.21.83) (Oligopeptidase B),accession number D90827,Smith-Waterman Score= 814.

SEQ ID NO: 29106 - DNA, 1866 bp, Homo sapiens
  SIMILAR (1114)..(1713): 991254mologous to Escherichia coli K12 putative synthetase/amidase,accession number AE000385,Smith-Waterman Score= 1077.
atggaggtggacattactcacaagtttgtttatattgtgttaatctttaaccacgagaattcaagtgccagtagttcatcaccttcgatgaaagccattctcggcgcggcgaaaaagcccgtccaggtatggtcggcggcggatattggttttaacgcagaggcagcctggtcagaacaacaggttgccgcgccgaaacagcgcgaacgtcagcgcatcgtgattgaaggcgacggcgaagaacagatcgccgcatttgctgaaaatcttcgcaaagctttagctaatcaaatcaacacctttgtcctcaatgatgccgacggcgcacaggcaatccagctcggcgctaatcatgtctggaaattaaacggcaaaccggacgatcggatgatcgaagattacgccggtgtcatggctgacactattcgccaacacggcgcatacggcttggtgctgctgccaaacaccccggcggtgtctaacgatgccagcaccgtcagcgtacaggcgggtaaagcgacagtgaaacacatggtttacggtggtctggcgattggcgaagaacgcattgccacgcggtatgcggtactgaccatcagcagcggcacgttcgatgcggctcagccagacgcgtcacgcactggcgaaacgcacaccgtggagtggcaggctccggctgtggcgattacccgcacggcaacccaggcgcgccagagcaacagcgtcgatctcgacaaagcccgtatggtggtcagcgtcggtcgcggtattggcagcaaagagaacattgcgctggcagaacagctttgcaaggcgatagactttttcacattaatctttgccagaaaaccaggcgcaggcccaccaatccgccggaggttcttgaagccgctgatgggcgggtacatgatggggcgtctgatgggcggcggcgccggatttgcacagcagcccctgttcttctttaaaaaaccagccagtccggcttacgggaaatataccgacgcgacgggtaaaaactatggcgcagcccagccaggccgcaccatgaccgtaccgaagaccggaatgggaccaaaaccggcgaccaccactaccgttacccgtggcggagtcagtattaccgagcgcccggactggcgtgagaaagcccacgaatacggtttcaattttcacaccatgtacggcgagccgtactggtgtgaagatgcttactacaagttgaccctcgcccaggttgaaaagctggaagaagtcaccgccgaactgcaccagatgtgcctgaaagtggtggaaaaagtgatcgccagcgatgagctgatgaccaaattccgcattccaaaacacacctggagttttgtgcgccagtcatggctgacgcaccagccatcgctttattcgcgtcttgatctggcgtgggatggcactggtgaacctaaacttctggaaaataacgccgatacgccaacgtcactatacgaggcggcgttctttcagtggatctggctggaagatcagcttaacgccggtaacttgccggagggcagcgaccagtttaacagtctgcaagaaaaactgatcgatcgcttcgttgagctgcgtgaacagtatggcttccagttgctgcatctcacctgctgtcgcgacacggtggaagatcgcggaaccattcagtatttgcaggactgcgcaacggaagctgaattccagaccatgcaaaggagaggccaagtagagcaagaaaggcaccagtgggagtcatgctggggcaacgggcagagagtccatcaggaggctgggcctccactgcctctgctggctcatgggaagctggaattcatgctctctatagcccctgccatatga

SEQ ID NO: 29107 - DNA, 2836 bp, Homo sapiens
  SIMILAR (2012)..(2752): 971254mologous to Escherichia coli Chemotaxis protein methyltransferase (EC 2.1.1.80),accession number D90830,Smith- Waterman Score=1273.
ctagtacacagcatcactgaccgccatcataagaaatctgatataaaaaactgtggcgtgtatggtacggattagaggggaaaatgtcagcacatttgcgaaatgaatcaaaaagcccgcaggaagggtgctgggcgttagtgtcagcagcacaaccagcacggagcactctgcgtgacgcactacagctgcggcgttggaaccgagcagataagtggtgatatccggtcgatgggaagcaatgatgatcatatgagcggggatcttcttcgccaattccagaatgcggtctttgggcgagccttcctcaacatggacatgcactctgtcggttggcagtttaaattttttaatgatctcttccagttgcgatttggcttccgctttcaggtcatccattgccggtaattctgcggaatacgctaaacccagagaggcatagtagggcagtgaaggtattaccgtcaggaaatgaacctctgcatcatcaatctttgcctcttcctcaacgtggctaatcacgcgttgagttaattctgaatcggaaatatcgatagggacaagaatcgttctgttcataaaacctcctgtttcagtatccgcataaagtgtaacgccagatgacactttccgtgtaatgacggagttcacattttcaatgtttcgccgattgtttccggtgaggttatccgttcccgtggcggctccacctctgaatttacgccgggatatgtcaagccgaagcatgaagtgaatccgcagatgaccctgcgagcaaatagaaaatgcctgcaacggcagcggccgagccaacgttgatctttatccggatgcgcttccgggctttggcaaatagccgcgtgtgattgccgcaataccgacggaataaacgccgaaaggggaaaaaaccagtgccagcaatccagtaaatacaattaatgggcgaaacaggagccgaatatccagctgctttcattgctgcgatacccggtgcgtttttgcgattgccattggtcaccagaaaaaggggggagtgcaacgcttcaggctggggaccgggttgtgacgtgacgtggcgttggtggttacctggggaccgggacgggacgttgacgtgactgactggttggttaccatcccacgccagatcatagacgcgaataaacgcgatggctggtgcgtcagccatgactggcgcacaaaactccagggtgtgttttggaatgcggaatttggtcatcagctcatcgctggcgatcactttttccaccactttcaggcacatctggtgcagttcggcggtgacttcttccagcttttcaacctgggcgagggtcaacttgtagtaagcatcttcacaccagtacggctcgccgtacatggtgtgaaaattgaaaccgtattcgtgggctttctcacgccagtccgggcgctcggtaatactgacggttgcactacgctgcatagtgctttgtttggcaacagattcaccaaaaccgccacgggtaacggtagtggtggtcgccggttttggtgccattgccgtcttcggtacggtcatggtgcggcctggctgggctgcgccatagtttttacccgtcgcgtcggtatatttaccgtaagccggactggctgggtttttcgaggagaacagcggctgctgtgcaaatcccgcgccgccgcccatcagacgccccatcatgtaaccggccatcagcggcatccagaaactcccgctggattgctgggcctgcgcctggttttctggtgccatgccagcctgggctggtgcctgctggcactgaccttcaccaaattcagcaacacagtcttgccggacattatgggagaaattgcctctgcgtcggaagaacaacagcgggggattgagcaggttgcacaggctgtcagccagatggatcaggtgactcagcagaacgcctcgctggtagaagaagcggcggtggcaacggaacaactggcgaatcaggccgaccatctttcgtcgcgtgtggcggtatttacccataaacgcgacatggtttacaaccgactggttcgtcgtttgcgttcgctgggactgacggatttcggtcattatctgaacttgctggaatctaatcagcacagcggtgagtggcaggcgtttatcaattcgctgaccacgaatctgacggcatttttccgtgaggcacatcatttccctctgctcgcggatcacgcacgtcgccgttctggcgagtatcgcgtatggagcgcggcggcttcgaccggcgaagagccgtacagcattgcgatgacgctggctgacacattgggcaccgcgcccggacgctggaaagtgtttgccagtgatatcgacaccgaagtgctggaaaaagccagaagcggtatctatcgccatgaagagttgaaaaacctgacgccgcagcaactgcaacggtatttcatgcgagggacggggccgcatgaagggctggtacgcgtgcgtcaggagctggcgaactatgttgattttgccccgctgaatctactggcgaaacagtacaccgtgccggggccgtttgatgcgatcttctgtcgtaacgtcatgatctacttcgatcaaactacccagcaggagattttgcgccgctttgttccgctccttaaacccgacggattgctgtttgcgggtcactctgaaaactttagccaccttgagcgccgcttcacgctgcgtggtcagacggtgtatgcgctaagtaaggattaacgatgagcaaaatcagggtgttatctgtcgataattcggcaccaatgcgccagatctccgggtcggacgattgaattgtag

SEQ ID NO: 29108 - DNA, 1271 bp, Homo sapiens
  SIMILAR (686)..(724): 921254mologous to Escherichia coli K12 putative EC 2.1 enzymes,accession number AE000230,Smith-Waterman Score=59.
atgaaatcggtacgttaccttatcggcctcttcgcgtttattgcctgctattacctgttaccgatcagcacgcgtctgctctggcaacccgatgaaacgcgttatgcggaaatcagtcgagaaatgctggcatccggcgactggattgtgccccatctgttagggctacgttatttcgaaaaacccattgccggatactggattaacagcattgggcaatggctatttggcgcgaataactttggtgtgcgggcaggcgttatctttgcgaccctgttaactgccgcgctggtgacctggtttactctgcgcttatggcgcgataaacgtctggctctactcgccacagtaatttatctctcattgtttattgtctatgccatcggcacttatgccgtgctcgatccgtttattgcattctggctggtggcgggaatgtgcagcttctggctggcaatgcaggcacagacgtggaaaggcaaaagcgcaggatttttactgctgggaatcacctgcggcatgggggtgatgaccaaaggttttctcgcccttgccgtgccggtattaagcgtgctgccatgggtagcgacgcaaaaacgctggaaagatctctttatttacggctggctggcggttatcaagtgcgtactgacggttctcccttggggactggcgatacgcaggggatattcacgccggagcacgtttgccgctgttaagtgcgggctggcgcagttatatggcgatccacccgcctggccaacgccaacgcgcggcgtcagtgaaatccgcctggcgctacgttttaaatcgaatgattcgctgctgcgccactttaaggatacctccacgctgtatctggaaattgtggattatcccggcgaatggttgctcgacctgccgatgctggcgcaggactatttaagctggtcgcgccagatgacgggcttactcaatggtcagcgcggagaatggtcggcgaaatggcgaatgatgagcgaagggctggacccgctagcgcctgccgacgaaaaccggctggcggacattgccgccgcgtggaccgattatctccaccactgtaaagagcaggggctgcactttattcagcctgggcgctttgtcttgccgggagatatggcaggtgcgcccgcgctgcaattcttcccgtggccggatgtcgatacctggggcgagtccaaactggcgcaggccgataagcataccaatgccggaatgctgcgcgacgctttaattattactgcgagaag

SEQ ID NO: 29109 - DNA, 807 bp, Homo sapiens
  SIMILAR (524)..(553): 901254mologous to Escherichia coli K12 putative EC 2.1 enzymes,accession number AE000230,Smith-Waterman Score=57.
ggctggcgcagttatatggcgatccacccgcctggccaacgccaacgcgcggcgtcagtgaaatccgcctggcgctacgttttaaatcgaatgattcgctgctgcgccactttaaggatacctccacgctgtatctggaaattgtggattatcccggcgaatggttgctcgacctgccgatgctggcgcaggactatttaagctggtcgcgccagatgacgggcttactcaatggtcagcgcggagaatggtcggcgaaatggcgaatgatgagcgaagggctggacccgctagcgcctgccgacgaaaaccggctggcggacattgccgccgcgtggaccgattatctccaccactgtaaagagcaggggctgcactttattcagcctgggcgctttgtcttgccgggagatatggcaggtgcgcccgcgctgcaattcttcccgtggccggatgtcgatacctggggcgagtccaaactggcgcaggccgataagcataccaatgccggaatgctgcgcgacgctttaattattactgcgagaagattgtgctggtggattgctgcaactctcaacagtgggcacagcatttatgatatgcgctggcctgacgcactgatcaaattttcatacgggcacgtactgtccagcgttgttttattacgccgcgcgcgcaatctgcataaagcggcacaacaagtggcgaccttacacggcggtaaattcccggaaacctttgaggaagttgcagcactgccgggcgtcgggcgttccaccgcaggcgcgattctctcgctttctctgg

SEQ ID NO: 29110 - DNA, 1866 bp, Homo sapiens
  SIMILAR (910)..(1863): 991254mologous to Escherichia coli K12 putative EC 2.1 enzymes,accession number AE000230,Smith-Waterman Score=1692.
atggatgatttggcgctccgacgtttccctgggagtaagatttgtggcaccgacacaccgaaaaatatcacgaaccatatgccatttttgatgattactattgtggtgcgatatggtcagccaccgtattacaggagcaaggtgttgcagccctggccccgaatttcagctccctatgaccagcacagtgaaactactgctgccgatgtgttgcgtcatatcaatcatccgttcgcattgacactgcttatacgtgtagccgggcaaactaaacgctgtcacgatcggatgacgaaagccattgctgcgttcccacatgcagcaatggcggcactgacggaacttcttgggcaaaaagaagagaacagttggcgcattatgctaatgacaatgcttatctcacaaccagcactggcagaacagagcacttcgacgacacaaatcctggctctatcttggacaagacagacaatccagtacatcaaccttttggcgaaatatatctggtattcaaaacacatcacggttagccatgaagaaagtactaccaacctgttggcaaggatgggttttcaacgacggatcgctgggttacctgggttagtaaactcacttgcacgctatccacaagaagccttgcccatcacgaattacttcgcagcgagtgagctggctcctgccgtcgcccgtgccttcaacaaactgaaaacgctacgcgaaaacgcccgtagctggctgttgaaatacccggaacatgcccttaccggcctgctgcctgcggcgctcggcaaagccggtgaagcacaggataacgcccgcgctgccttgcgtatgcttaccgaaaacggtcatcagccattactgcaagaaatcgcccgacgttataaccagccggaagtaaccgatgcggactatttaagctggtcgcgccagatgacccgcttactcaatggtcagcgcggagaatggtcggcgaaatggcgaatgatgagcgaagggctggacccgctagcgcctgccgacgaaaaccggctggcggacattgccgccgcgtggaccgattatctccaccactgtaaagagcaggggctgcactttattcagcctgggcgctttgtcttgccgggagatatggcaggtgcgcccgcgctgcaattcttcccgtggccggatgtcgatacctggggcgagtccaaactggcgcaggccgataagcataccaatgccggaatgctgcgcgagcgctttaattattactgcgagaaggtggtgaaggggttctataagaatcattttctgcgctttgaccgccagattgtgctggtggattgcctgcaacctctcaacagtgggccacaggcatttaatgatatgcgtctggcactgacgcagctgatgcaaagttttcactacgggcagcgtaccctgttccggcgtttgttttcgccggttatcgataagctattgtttgctgccactaaagcggaccatgtgaccatcgatcagcacgctaatatggtttcattactgcaacaactgattcaggatgcctggcaaaatgcggcgttcgaagggatcagcatggactgcctggggctggcgtcagttcaggcgaccaccagcggcattattgatgttaacggtgagaaaatcccggcgctgcgtggtaatcgacttagcgatggcgcaccgctcactgtttatcctggcgaagttcccgcacgtttgcctggtcaggcgttctgggataagcaaggcttccagtttgaggcatttcgtccgcaggtgatggatgtcgacaaaccactaccgcatattcgtcttgatgctgcgctggaatttttaataggagataaattgcgatga

SEQ ID NO: 29111 - DNA, 813 bp, Homo sapiens
  SIMILAR (1)..(408): 401254mologous to Escherichia coli L-fuculose isomerase,accession number U29581,Smith-Waterman Score=175.
atgaagccacactgggaaatctctcagcaagggctgacgcttgcctcgccgctaccgaatggtgcccggcgatccacgaaacttccgtggcggcggttactcttcccgcttccttaccgaaggcggcgtccgttcaccatgactcgtgtcaacatcatcaaaggcctgggaccggtacgcaaatcgcggaaggctggagcgtggaattgccgaaggatgtgcatgactcctcaacaaacgcaccaactcaacctggccaaccacctggtttgcacccgcctcaccggtaaagggccgtttacggatgtgtactcggtaatggcgactggggcgctaaccatgggtgaaatccgcctggcctacgttttaaatcgaatgattcgctgctacgccactttaaggatacctcacgctgtatctggaaattgtggattatcccggcgaatggttgctcgactgccgatgctggcgcaggactatttaagctggtcgcgccagatgacgggttactcaatggtcagcgcggagaatggtgatggtgtcgacaaaccactaccgcatattcgtcttgatgctgcgctggaggtatcgaggaagccggaacgaccgcccagatacggcaaacccgccatctcccccgacgccgttggccggattcattcaatcgccagactggccacgaccaggcttgggcagttaatagagcctagagcgaaagggctcgcggcgaccccggagttcggcgcgcttttccctaatccacgtttagcggccatgcctcgtgacaagttggctgaacttgagccgcgctag

SEQ ID NO: 29112 - DNA, 549 bp, Homo sapiens
  SIMILAR (220)..(501): 931254mologous to Escherichia coli K12 putative EC 2.1 enzymes,accession number AE000230,Smith-Waterman Score=469.
tccatccaaaacaaatgctgtttagcgcagtatcaatggtcttcagagcagcacaggacagcaatgaagcgacttaaaaatgaactcaatgcgctggtgaatcggggtgtcgacagacatctgcgcctcgctgtaaccggacttagccgcagcggcaaaacagcgtttatcaccgcgatggttaatcagttgcttaatattcacgccggagcacgtttgccgctgttaagtgcgccaacgcgcggcgtcagtgaaatccgcctggcgctacgttttaaatcgaatgattcgctgctacgccactttaaggatacctccacgctgtatctggaaattgtggattatcccggcgaatggttgctcgaactgccgatgctggcgcaggactatttaagctggtcgcgccagatgacgggcttactcaatggtcagcgcggagaatggtcggcgaaatggcgaatgatgagcgaaggtctggacccgctagcgcctgccgacgattatccggtctggcggacagttgccgcacggcgtgggatcctgagttaa

SEQ ID NO: 29113 - DNA, 2691 bp, Homo sapiens; identical to SEQ ID NO: 24290
  SIMILAR (700)..(1479): 901254mologous to Escherichia coli K12 putative EC 2.1 enzymes,accession number AE000230,Smith-Waterman Score=1255.

SEQ ID NO: 29114 - DNA, 1215 bp, Homo sapiens
  SIMILAR (1)..(978): 951254mologous to Escherichia coli K12 putative EC 2.1 enzymes,accession number AE000230,Smith-Waterman Score=1711.
atggttaatcagttgcttaatattcacgccggagcacgtatgccgttgttaagtgcgcgtgactttggcattccgcgcttcacctatgacgaagggctggcgcagttatatggcgatccacccgcctggccaacgccaacgcgcggcgtcagtgaaatccgcctggcgctacgttttaaatcgaatgattcgctgctacgccactttaaggatacctccacgctgtatctggaaattgtggattatcccggcgaatggttgctcgacctgccgatgctggcgcaggactatttaagctggtcgcgccagatgacgggcttactcaatggtcagcgcggagaatggtcggcgaaatggcgaatgatgagcgaagggctggacccgctagcgcctgccgacgaaaaccggctggcggacattgccgccgcgtggaccgattatctccaccactgtaaagagcaggggctgcactttattcagcctgggcgctttgtcttgccgggagatatggcaggtgcgcccgcgctgcaattcttcccgtggccggatgtcgatacctggggcgagtccaaactggcgcaggccgataagcataccaatgccggaatgctgcgcgagcgctttaattattactgcgagaaggtggtgaaggggttctataagaatcattttctgcgctttgaccgccagattgtgctggtggattgcctgcaacctctcaacagtgggccacaggcatttaatgatatgcgtctggcactgacgcagctgatgcaaagttttcactacgggcagcgtaccctgttccggcgtttgttttcgccggttatcgataagctattgtttgctgccactaaagcggaccatgtgaccatcgatcagcacgctaatatggtttcattactgcaacaactgattcaggatgcctggcaaaatgcggcgttcgaagggatcagcatggactgcctggggctggctgaagccctgaagcttgctgaacgcatcggtgttactgccgcagcccgtgaactcagcctgtatgaatcacaactctacaactggcgcagtaaacagcaaaatcagcagacgtcttctgaacgtgaactggagatgtctaccgagattgcacgtctcaaacgccagctggcagaacgggatgaagagctggctatcctccaaaaggccgcgacatacttcgcgaagcgcctgaaatga

SEQ ID NO: 29115 - DNA, 2331 bp, Homo sapiens
  SIMILAR (331)..(1209): 1001254mologous to Escherichia coli K12 putative EC 2.1 enzymes,accession number AE000230,Smith-Waterman Score=1566.
atgcggatgaatatgtctgactttgccactttctttgccgtggcccgtaatcaaagctttcgtgcagcgggcgatgagttaggcttatcctcgtccgccattagccatagtattaatacactggaacaacgtcttaaaattcgcttattcaatcggacaacccgaagcgtatcgttaacggaagcgggttctaatctctatgaacgattgcgcccagctttcgacgaaattcagatcatgttagatgagatgaatgattttcgtctgacaccgacaggaacgctcaaaatcaatgccgcccgggtagctgcacagcagcacaggacagcaatgaagcgacttaaaaatgaactcaatgcgctggtgaatcggggtgtcgacagacatctgcgcctcgctgtaaccggacttagccgcagcggcaaaacagcgtttatcaccgcgatggttaatcagttgcttaatattcacgccggagcacgtttgccgctgttaagtgcggtgcgtgaagagcgcctgctgggcgtgaaacgcattccccagcgtgactttggcattccgcgcttcacctatgacgaagggctggcgcagttatatggcgatccacccgcctggccaacgccaacgcgcggcgtcagtgaaatccgcctggcgctacgttttaaatcgaatgattcgctgctacgccactttaaggatacctccacgctgtatctggaaattgtggattatcccggcgaatggttgctcgacctgccgatgctggcgcaggactatttaagctggtcgcgccagatgacgggcttactcaatggtcagcgcggagaatggtcggcgaaatggcgaatgatgagcgaagggctggacccgctagcgcctgccgacgaaaaccggctggcggacattgccgccgcgtggaccgattatctccaccactgtaaagagcaggggctgcactttattcagcctgggcgctttgtcttgccgggagatatggcaggtgcgcccgcgctgcaattcttcccgtggccggatgtcgatacctggggcgagtccaaactggcgcaggccgataagcataccaatgccggaatgctgcgcgagcgctttaattattactgcgagaaggtggtgaaggggttctataagaatcattttctgcgctttgaccgccagattgtgctggtggattgcctgcaacctctcaacatcataaattgtgggttgttgttggtgattgtcagcttacttcttcgaggtgaccccaattcatcagtagtatttgctaaagcctcatccaacgcaacatctgctcgacacttacgcgacacagttaccatgccaaccaaccacgcagttacagtcttcccactgacagggccagataacattgtattcgtgtccggtacggttgggccccctctttgttgctgcgtcttcccgagcgcggcttccgcgctccccctcgccctcgggtcccgctccgctgccctgtcctattgtgccactctgcggcttttgcccggtctgggttgcccgactgttcccgccgtgccgccgctccgcgttcggggcggcccggctcgtcccgccctgtggtcgtgtgccttcacttttctccgtttcgtccacctcctcgctagttcaccttccatgctgtccacgccccgtcggtctctggtggtgtggaccttcgctgtcgcgcttctgggtgcctccttggctgaaaggggaaaagcaaaaagcaaaacttataaaaaaatgaaagggtgtcttcagatgtttgttgaagtatggttcggtgcaaccctggtgcagggggagagacagagacaatcgggcacgggggagaaaaactatagtcgtaaacctaaaatcagagaggtgtcacctggccatcaccagttcgttgacagccctacaccctattggctgctgacctttgttgtggagccctgctcagtcacgatagaagatgatccaaggccagaagaaatccaaaaagaaagagaagagtacacggagagaagagaaggggagaaaccaagaaggaaaagcgaaaaagcagaacgagagaagaaggaaacgaagaacagagacgaacaaacgaggaaagagaggcaaaaagagacagaggaaaggagaaagaagaaacacgaggaacgacgaaaagaaaaagaggaaagaaagacaaaaaacgaagagagacaagggagggagagaagaaagaaagaacaaaggaagaaagaacgacagaagaaaagaaaacaacaacaaaatgtacaaaaccaagaaagagaagagaagaaaagcaagagagagagaaaatga

SEQ ID NO: 29116 - DNA, 534 bp, Homo sapiens
  SIMILAR (4)..(477): 1001254mologous to Escherichia coli EMG2,accession number U39483,Smith-Waterman Score=809.
atgaagcataaacagaactatgccggaaggcaaaagcgcgacacaatagaggattacccaacaaaggatgactttatgacaatttgggtggatgccgacgcgtgtcccaatgtaattaaagagattttgtatcgcgcggcggaacgtatgcagatgccgctggtactggtagcaaaccagagtttacgcgtgccgccatcgcgatttattcgtacgctgcgcgtcgcggcaggtttcgacgttgccgataacgaaattgtccggcagtgtgaagcgggcgatttggtgatcaccgcagatatacctttggctgctgaagccatcgagaaaggcgctgcggcgcttaatccgcgcggcgaacgttacacgccagcgaccattcgtgagcgcctgacgatgcgcgattttatggataccttacgtgccagtgggatccagaccggcggaccagatagcctttcacaacgtgaccgccaggcctttgccgcggagctggagaagtggtggctggaagtgcaacgtagtcgtggctaa

SEQ ID NO: 29117 - DNA, 358 bp, Homo sapiens
  SIMILAR (131)..(280): 411254mologous to Homo sapiens 23-MAY-1991 MAGE-51 genomic DNA,accession number Q32361_cd1,Smith-Waterman Score=73.
agagtaggcactacctcatcttcttggaaccaggaagaattgttgtaactgatcattttccctagcagttcacagtagtaccagagggagatttgtagcctagtagtcagaaccacccagaaatgttacctgccaaagcccaggaggactgcagaccttggagaaaggagaggggccatggctttaggggaacttgcgtttgcctctcttggtgtccaggaatgtgaagctcgggtgcacgctgtggtccaaatcctgggggacagtccttgcaactgggtctcctgggattatgcaccgtcagccagtggggaagacgtttcaacaggagccctgggggggctggtccactggtgtt

SEQ ID NO: 29118 - DNA, 3997 bp, Homo sapiens
  SIMILAR (1668)..(703): 951254mologous to Homo sapiens Human homologue of yeast RAD50,accession number W71295,Smith-Waterman Score=1548.
ctattcattaagtggaggtggaacatcacaaaggtcttcagcgtcactgtcttcacgttgagcaggccgaggaggaagaagaggaggggtcggtcttgtcatctcaggggtggcagaggcaggagagaatccgtggataagtggatctgtgcagttcagaacctgctgttcaagggtcaacgtagctggcttaatagtaaacttttcattggctgctttctctttcatacacaatttccccaatttcctactgattactttcacgtgaagcattgttttacgctctgcttttgtgatgatggctgcagaaaggtggccctgcgctgctgagctctccttctggccctctctgccagaaagggactgtctggagccaggagtgcctgaaacacctcctttgacctcagggaaactgcctttttctctgccagcatagtccttatgcaagagctgcttgacaaccttggcgtctacatcaaccagagcatgtgcaagagattcaatgttttctcggtcaagatttgttgttggctcatccaaggcaatgatgccacagttgaggcagaacgtttcagccagggccaggcgaatgatgagtgaggctaatacctgtagaaaatccaagtaactggaactgttaggcattttcgtggttactagaaacctaatactaaaaccctcagacccactgaaaccatctgccttttgtccagcactgcatcgtcctcgcatatccaaggctgtgtctcccttcagcatcaccactcggtagttataattccgccttttatcagaagctgatacattttcatcggcatcagaccgtatttctatgtattcaatatcttgtccacgataggtacttcgccacaggtcacgtataattttattgatttcttccattttcatactgtgaaatttcattattgcttggtcaagagtcttataataaatatccagatccttgttcacaagttctgttgtcctcataacaatcatcatttctctatacttttcctcagcatcccgaaattgtggttctcgaagttctttcttaaaatgaataatttcttcttcataacctttctgtcgccctaatgccaaattatgatttctttttatattgtctatgttctcttccaacttctgatgttcacttttcatttgcaaaacctgcatttgacccatttccttcaaatgttgttttctttcttcttcaacttcttttagttcctcatttctttttcttaaagtaaggttatcttgtagccacctttcttgtatcttctgtgtatcaatatcttgtctcatgagtctcatatcttcatttatcttttctttgtgtttctcgcattcacttagttgagctattactttattaagttcagtttctttttgcttcttatagtcgtctttcccatcttgaatataattctcaatgtctttcatatagccatgaatatttttaaccttctctttaatatcattcagtttatcctgtgctattttgttgcttgtattttttttgttgattaattcttctttttcttgctggaacttttccaatgttgtttccaaagggcttacctgctctttagcatccattttcatttgatcctcataatagctggttttcaaagggaatgcttccagtttttgcccattcagtatgatattggctgtgggtctgtcataaatagctcgtattattttgaaatacattccatcgatacctagtttattgagagcttttagcatgaagcggtgttgaattttatcgaaggccttttctccatctattgggataatcatgtggtttttgtctttggttctgttcatgtgatggattacatttattgatttgcatatgttgaaccagcccttgcatcccaggaataaagccgacttgatcgtggtggataagctttttgacgtgctgctggattcggtttgccagtattttattgaggatttttgcatcgatgttcatcagggatattggcctgaaattttctttttttgttgtgtctctgctaggttttggtatcaggatgatgctggccttataaaatgagttagggaggattccctctttttctattgttaggaatagtttcagaaggaatggtaccagctcctctttgtacctctggtagaattcggctgtgaatctgtctggtcctggacttcttttggttggcaggctattaattactgcctcaatttcagaacttgttgttggtccatttggggatttgacttcttcctttatctctctgtacaaagactgaacttcagtggataattccacagtctgctcctccagttgctgacgacgttgcaaattagtggatatctgaagtttctcagattttagctcatttgttgtactttttagatgttgaatctgttcctgctggtcctgtataagcttacgattcaattcaatcttactagaaactgtgtctaacttgtgctgtttctcttgtttctcctggttgacttgttggacagttcgatctaagtctattccttgtagcttagctgcttgttgtgcaatttttctttcaacatctttaagttccatctggaacctctccataattgtaacatctgtcaggcatactttggcactttcttcttcaggcattattgtacccaagagtgtttcttgttcttctatgtcgttctttaggcgctgtatgtctctattgacattctgcagtttgtttcttaattctggtatttccttctccttcaaatcaattatgctttgcctcatgggcacaagtcccagcatttcatcacgccgcttttcctttttttttagctctgattctgttgacttgagtttatctggagcaagtcgcagtttagactgcaaatcactgatgacttcttgtaactcagcctctgtctgaaaaactctctgacaaacggggcaacatgactggttttcgtctgttagctgagtaatgaactgggagtaaactgctgtggctccagccagcatggctcgctgttttgatgatttttcaatttcctctttaagcctgtctaaatcactttcaaaatcctggctaccacaaacatcaaacagcttgtcttcgtaactggacaactgctcttcctttctttttagttcattatttatatgatttttattctgctcagatgaagctagttccttgttcaatttggcaagtctgtccctggtctgattaatttcttttgatttactatgtagccagtcttcaagctgttttttgttgggaaaatatcccaacagtgaggttaattcatcactgtgcctagattttatttttctgatttgttcatctttgtcagcagcttttatgagctcctggtccagttcaagaatcctgtctgaagatccttccaactgctgtaattcatacttcacatttttcagctcattctgcttcttacttaggatttctgattttaactcaattattcttcccagtccagttttcttatctcttatctcatctatctgtttttgtttcagagtctctttttctgcaaagtcattaagtttgtgaaaatttttaatctgtctttcactgaatggtccacgctcaaagccatccaattctagctgtgttgccaaagactgaattaatgaatctctagctcggatatgttcttgatggcgatctgcttgcagctgtagacgaccctgttcaacaagcagttctgatttttcctgattgagaagcctagattctttatttagtttttccagttcacgatgacagtctaccaatttcctttctttctcccttactgttctctggtgattgtgatataagtcatttagttgctcatcagtcccttgaaaaaccttttccattttctcttccagttcactattatctttctccatttgcttctttcggctatccaaggctttaatttcattgtcaagtttcattattttagagagattatgttcaatttcttttagacgatt

SEQ ID NO: 29119 - DNA, 2049 bp, Homo sapiens
  SIMILAR (1480)..(1680): 651254mologous to Homo sapiens Human secreted protein sequence SEQ ID NO:103,accession number Y87064,Smith-Waterman Score =218.
ggtccctgtgttcatgatgaggactctggcctatcgctcattggaaaacctgcccttcaggctcttttatatcactgccatttttatgaacatttgaatcagatggtaaagcattgttacctaggacggtgtatgtttgatttgaatttttctgcttttgatagaaattcagaaagcaatgatttaaatgccaattcctcctccttcacctgggatggggcagctgaagttagtctagctgaagttcccgcggggacacagggggatcagggagaaagaagcaagcctctcctcgcaaacaaggccagccagctttctcaagagggaatcgacactttggaacaaatatccaattttagagcttggacgaggaaagaacaagatgaacctggaacatcttgctgtgccagaaacattgcagatgctaccctcatacagacatgtgtccaggaactcagagccctgctgccttcatcacctccagctgaacacactcaggctcaggtttcctttctcctggaatacctatcctctttgtccaggcttctgcagtcatgtttattggtggagcctgaccttgtgattcaggatgagcttgtgaaacctcttatcaccaatatcattggaattctcaccatatgtaccaaagatgtattagataaagagttaatatcagctttttatcacacatggacacatttatttaatcttctggccatgctcctgaggaaagctggtgccatcacactcccgtttgttaccgtggccctggccaagcactggacagcggcgattggcttgtctgccacgtgtcctgccctgtatactgccagcttgcaattcctttctgttctcttgaccgaagaagcaaaagggcatctccaggctaagagcaaaacacatttatgctgtagtccaacagtggcttcacttcttgatgactctcaggaaaatcagaaatctctagaacaacttagtgatgtaatccttcagtgctatgaagggaaatcctccaaagatatcctgaaaagagtagctgcaaatgcattgatgtcactgctggctgtcagtagaagagcacagaaacatgctttgaaagcattgccaaaaggaggaaataaacatctaagtaatctgactattctttggttgaagttactcctgaatatatcatctggagaagatgggcaacaaatgattctgaggcttgatggctgtctagacttactaacagagatgagcaaatacaagcacaagagcagccctttattgcctcttcttatctttcataatgtttgcttcagtcctgcaaataaacccaagatcctggctaatgccttgcatcccagggatgaaacggacttgatcttggtgaataagctttttgacgtgctgctggattcagtttgccagtattttattgaggatttttgcatcgatgttcatcggggatattggcctgaaatttcctttttttgtctttgggagttggctggaggtccactcctgcccctgtttgcctgggtatcaccagcagaggctacagaagagcaaagattgctgcctgctccttcctctggaagcttcatcccagagggcaccccccagatgccagctagagctctcctgtatgatgtgtctgtcaacacctgttgggagctcgagcatcccaggtcgacttcagactgctgtgcaggcagtgagaattttaagccagtggatcttagtttgctgggctccatgggtatgggatctgttgagctaggccacttggcaccctggcttcagccccctttccaggggactgaacaactctgtctcactggcattccaggcactactgagcccaggaggactgcagaccttggagaaaggagaggggccatggctttaggggaacttgcgtttgcctctcttggtgtccaggaatgtgaagctcgggtgcacgctgtggtccagatcctgggggacagtccttgcaactgggtctcctgggattatgcaccgtcagccagtggggaagacgtctcagcaggagccttgaggtga

SEQ ID NO: 29120 - DNA, 769 bp, Homo sapiens
  SIMILAR (3)..(569): 1001254mologous to Homo sapiens hypothetical protein,accession number AL117635,Smith-Waterman Score=958.
acgcgtccgcggacgcgtgggtggcttcccagatgccactggagaacaccacggttcagcagatggtttttatgcttctttcaaacctggccttgtcgcatgactgtaaaggagtaattcagaagagtaacttcttacagaacttcctctctctagcattgccaaaaggaggaaataaacatctaagtaatctgactattctttggttgaagttactcctgaatatatcatctggagaagatgggcaacaaatgattctgaggcttgatggctgtctagacttactaacagagatgagcaaatacaagcacaagagcagccctttattgcctcttcttatctttcataatgtttgcttcagtcctgcaaataaacccaagatcctggctaatgaaaaagtcattactgtgcttgctgcctgtctggaaagtgagaatcaaaatgctcagaggattggagcagctgccctttgggctctgatttacaattatcagaaggcaaaaacagctttgaaaagcccatcagtaaaaagaagagtggatgaagcatactccttagcaaagaaaactttcccaaactcagaagcaaaccctctaaatgcctattatttgaaatgtcttgaaaacctcgtgcagctccttaattcttcctgagtgccatgggatgctacaccttgaagctgacagtcatcaacaggggagctaaagttgaagccagctgtgtgtagcagctgttacctgaagacgtgctacctctctacaaagtgttg

SEQ ID NO: 29121 - DNA, 448 bp, Homo sapiens
  SIMILAR (179)..(3): 281254mologous to Human immunodeficiency virus type 1 envelope glycoprotein,accession number AF032550,Smith-Waterman Score=65.
acttttaaaaaatatatgttcatttttagaaaaagtcattactgtgcttgctgcctgtctggaaagtgagaatcaaaatgctcagaggattggagcagctgccctttgggctctgatttacaattatcagaaggtcagttttaaaaatcattgttacacctggggagcaaacaacaaggtataacccagggtataaactcttagggatacatccaaaggtgttcaagagttacaggcaaaagaaaaaaggacaaaatttaaagatccctgttccctttggctggtttcatacaattaggtaaaccatcagttggaaatcttttttatttaatcatttcaacagaatgtcttcagtttaggaagaggatctctggaactcgactttttcctcttaatttaaattgatttactttattattgcaattttagtatagattgtttcttctaa

SEQ ID NO: 29122 - DNA, 1218 bp, Homo sapiens
  SIMILAR (553)..(747): 671254mologous to Homo sapiens Human secreted protein sequence SEQ ID NO:103,accession number Y87064,Smith-Waterman Score =224.
atgggaaacttgcaagaaagtgacaacctcgatagaagtgacacatctgatttaggatggaaaaagtgctatgaagggaaatcctccaaagatatcctgaaaagagtagctgcaaatgcattgatgtcactgctggctgtcagtagaagagcacagaaacatgctttgaaagcattgccaaaaggaggaaataaacatctaagtaatctgactattctttggttgaagttactcctgaatatatcatctggagaagatgggcaacaaatgattctgaggcttgatggctgtctagacttactaacagagatgagcaaatacaagcacaagagcagccctttattgcctcttcttatctttcataatgtttgcttcagtcctgcaaataaacccaagatcctggctaatgccttgcatcccagggatgaaacggacttgatcttggtgaataagctttttgacgtgctgctggattcagtttgccagtattttattgaggatttttgcatcgatgttcatcggggatattggcctgaaatttcctttttttgtctttgggagttggctggaggtccactcctgcccctgtttgcctgggtatcaccagcagaggctacagaagagcaaagattgctgcctgctccttcctctggaagcttcatcccagagggcaccccccagatgccagctagagctctcctgtatgatgtgtctgtcaacacctgttgggaggtgtctcccaaaaaagtcattactgtgcttgctgcctgtctggaaagtgagaatcaaaatgctcagaggattggagcagctgccctttgggctctgatttacaattatcagaagcccaggaggactgcagaccttggagaaaggagaggggccatggctttaggggaacttgcgtttgcctctcttggtgtccaggaatgtgaagctcgggtgcacgctgtggtccagatcctgggggacagtccttgcaactgggtctcctgggattatgcaccgtcagccagtggggaagacgtctcagcaggagccttgagtctttggggctgcaccttgtgtattccccatttcttgaggttgccagagccccaggtctgcttcttgacccgtgatgttcctcggatttgccagagtgatgggaagttacctcatggacatcaggaaggagaaaggctggaaaaggacttcctcagctgtgtttccctttaa

SEQ ID NO: 29123 - DNA, 266 bp, Homo sapiens
  SIMILAR (159)..(266): 561254mologous to Homo sapiens Human secreted protein sequence SEQ ID NO:195,accession number Y87156,Smith-Waterman Score =99.
  misc_feature (1)...(266): n = a,t,c or g
gatgttgatgctattgnnnnnnnnnnnnnnnnnnnnnnnnnnnnnnnnnnnnnnnnnnnnnnnnnnnnnnnnnnnnnnnnnnnnnnnnnnnnnnnnnnnnnnnnnnnnnnnnnnnnnnnnnnnnnnnnnnnnnnnnnnncaaagattgctgcctgttccttcccctggaagcttcatcccagaggggcacccaccaaatgccagccagagctctcctgtatgaggtgtctgttgacccctgctggggggtgtctccccgtcaggag

SEQ ID NO: 29124 - DNA, 3081 bp, Homo sapiens
  SIMILAR (196)..(897): 801254mologous to Escherichia coli low affinity gluconate permease,accession number D84362,Smith-Waterman Score=908.
  misc_feature (1)...(3081): n = a,t,c or g
atgaaggcgcgtatgcacgctttcctggctttaatggtggtgtccatgggggctggccttttttctggtatgccgctcgataaaatcgcagcgacgatggaaaaagggatgggaggcaccctcggcttcctggcggtggttgtcgccctgggagctatgtttggcaagatcttacatgaaaccggcgcagtcgatcagattgccgtcaaaatgctcaaatccttcggtcacagccgcgcgcattatgccatcggccttgcggggctggtctgtgcgctaccgctgttctttgaagtggcgatagttctgctgattagcgttgctttctcaatggcgcgccacaccgcggcggcatttctggtgcctggaccagcgccgatgctgctggcatcgcagatgaatgccgactttggctggatgatcctgattggcctgtgtgcggcaattccgggaatgattattgccgggccgctgtggggtaacttcatcagccgttacgttgagctgcatattcctgacgacatcagcgaaccgcatctcggcgaaggcaaaatgccatctttcggattcagcctgtcgctgatcctgctgccgctggtgctggtagggctgaaaaccattgccgcgcgttttgcgccggaaggatcaactgcttacgaatggtttgagtttatcggtcatccgtttaccgcgattctggttgcttgtctggtggcgatttacggtctggcaatgcgtcagggcatgccaaaagacaaagtgatggagatttgcggtcacgcgctgcaaccggcggggatcattctgctggtgattggtgcgggcggcgtgttcaaacaagtgctggttgactctggcggaaggcccgcccttggccgaaccgttaaccggcatgggcctgccgattgctatcacctgcttcgtcggaatttgctacatggactagccggacgtgaaacgggcggctcggtggatctgctctgggtgaacggcgaaaacttccgcaccttaaaagaggccaatttattacaaacgggctgggcggagactctgcccaactggcgctatgtcgacacacagctgccggtgcgggaagatttttctgtgccgacacaaggtgcggaatcgccctggggcggcgcacaactgacgtttatcgcccgccgcgatgttacgccacagccaccacaaacgccgcaagccttactggagtttgctaaagccaatcccggcacggttacctatccgcgcccaccggactttaccggcacggcgtttcttgaacagttgctgattatgctgacgcccgatcccgccgcattaaaagaagcgccggacgatgcgactttcgcccgtgtcactgctcccttgtggcaatatcttgatgtgctgcatccgtatttgtggcgcgaaggaaaggatttcccgccttcacccgcgcggatggatgctctgctgaaagccggcacattgcgcctgtcgctgacctttaaccccgcgcatgcgcagcaaaaaatcgccagcggcgatttgcctgcaagcagttacagttttggctttcgcgaggggatgattggcaacgtgcatttcgtcaccattcctgccaacgcgaatgccagtgctgcggcgaaggtagttgccaatnttctgctctcacccgatgcgcaactgcgtaaagcagatcccgctgtctgcaaatgctttgacgggacaaccgttctggaaaactactttcattactgcgctctgaaaatgagctgtgtagagctggcccggacgtttgtctttctggctaatcaggggaaagctattcatattgatgaaccagtggtgacgccaatgcaggcgcggcaaattaacgcgctgatggcgaccagtggtatgtaccagaacgcgggggagtttgcctggcgggtggggctaccggcgaaatctggcgttggtggcggtattgtggcgattgttccgcatgaaatggccatcgctgtctggagtccggaactggatgatgcagttagggcgttcggtttattaatgcagtctctcgatccactcttcgcgcgtttatcccgttcaaaatttcgctctcgctttcgtctgggcatgaaagagcgtcagtattgcctggagaaaggcgcgccagtcatcgaacaacatgcggcggattttgtcgctaaacgtcttgctccggcattaccggctaatgacgatgatagtgaacgaattctgcaaagtattagcttggcgaagttcacctctagagtcatcttatctcgaaccgataaatccggcgacaaaacggtctttcggatagtggtacagctccagcggtttcccaacctgcgccacgcgaccggcgtccagcaccacgattttgtcggccagcgtcatcgcttcgacctgatcgtgggtgacgtaaatcattgtgcggcccaggcgtttatgcagacgggagatttcgataccatttgcacacgcatcagcatcgaggttggagagcggttcatcgagcaaaaatacgcttggctcggcaccagcgtggggatagagcgcgtaagactgaaacaccataccaacgccgcgttctgctggcggagtgtcattcatccgtttctcaccgatgaacagggtgcctgtattgtgcatgatgaatttaagactcaggcgttaacccgcttgcaagaagaatacccggatgctgccatactggtgcatccagaatcaccacaagctattgtcgatatggcggatgcggtcggttccaccagtcaactgatcgctgctgcgaaaacattgccacatcagaggcttattgtggcaaccgatcggggtattttctacaaaatgcagcaggcggtgccagataaagagttactggaagcaccaaccgcaggtgagggtgcaacctgccgcagctgcgcgcattgtccgtggatggccatgaatggccttcaggccatcgcagaggcattagaacaggaaggaagcaatcacgaggttcatgttgatgaaaggctgcgagagagggcgctggtgccgctcaatcgtatgctggattttgcggctacactacgtggataa

SEQ ID NO: 29125 - DNA, 2785 bp, Homo sapiens
  SIMILAR (2449)..(1784): 981254mologous to Escherichia coli 37KD protein, similar to YI22-ECOLI,accession number D85613,Smith-Waterman Score=1184.
tcatgctcccacgatggcgatatagggtaagtttttgataatccgtgacgtgcgttcttcaaacaccgaaagcccgctggcatcgatgtcattttcatcacgatgacgcaggtcgtgagttatcgcgatccccagcagcatcaccatgccaataaagatttcgatggattcagggttaagatgtgggaaatagcgcacgactaccacacgggtcatcagtaccaccacggcggcgatcagactttgcttccagccaaactggtagaaaatcgccaccagcgggaacagtgcaaaagctgaaaccaccggcgagcttaattcccccaggctacctaatacatccaccggcagcgcggtcagcagctggtttactggcaacaggcaagtaaggatcaacacgccccagatagcgccaagacccatccgcgccgaggtggatacccaggttgcggagttgcagcgactggagcgtgtgctgcagcgccagctaaccgccacgcaaccgaaattcaagaatatctccccgcatttacagcgcattaaagcgttcaaaaccctcgggtaaattggatccacgcagcactgcagcgaacgggccgaggccgacggcgaccacgaacagcatggcgaagaccatttcgttaatggcgcggcaggcgtccatcaggcggcgaacgggctggtaaacccaccacggcaccaggttttcggcgctcatcaggccaaaggggatggagagaaccaccgccagcgcggtgccccagacggcgatttgcagcgtgacggccatttcggtgaggtaatcctgccactggctgaaatcgggcgggaagaagtcggcggcgaacgtcgccatgttgccgccgtctttgatcagcgtaagcggggccatttccgcgccctgccacgagacgaccaacacggcgagtacaacggcccagctcagaagcgagaaccagctgcgcttgggtggggcgatggtgatggtttgcatgtttggctccggtctgtaggccggataaggtgcttgcaccgcatccggcatcaacgccgaactcatcgcgcttagcgcgttgttcaggcggtccaggtcatccagctgcgcctgaatctcggtggtttttgccagcttgtcctgctcattcagtcctttattgcttttcacgccctgcatctctttaaacagcgcgagctggcgaatcggcaccagttgcaggtcgctggaagcgcggaatggcgcccagcccaggcgttccagcaccgctttttcttccggcgttttgccgtagttcataaagaagtcgtagatcttgtctttggtggtttcggaaagattcttgcgccagacgatcggatcgcctgggatcagcggcgacttccagatcaccttcagttctttcagcttctctggcgcggaggttttcagcttgtcgaggttttcggtgttgttggtggcaacatccacctgcttgcctgaccgtcctttgattaaatcacatgtcattacacactgcccataatgcaactccgaatacacgaagataacggcatgtacatctgcccggaatgtgcctacgaatggaacgacgcagaacctgcacaggaaagcgacgagctgatcgttaaagatgctaacggcaatctgctggctgacggcgacagcgttaccatcattaaagatctgaaggtgaaaggtagctcttcgatgctggtgttcgccggtatttaacgtcgcattcagacccgcagaaaccagaatgagatttttcagttcgcgatgataatagccaatatgcggatgccattcgttataatgctcgaacgcctctgcaaggttctttgctgccgttaacccgtctggtttgggcatgatactgatgtagtcacgctttatcgttttcacgaagctctctgctattccgttactctccggactccgcaccgccgtgttcttcggttcaagtcccaacatccgggcgaactggcgtgtttcattagcccggtagcatgaaccattatccgtcagccactccactggagacgacggaagatcgttgccgaagcggcgttccaccgctcccagcatgacgtcctgtactgtttcactgttgaagccgccggtagtgaccgcccagtgcagtgcctcacgatcacagcagtccagcgcgaacgtgacacgcagtctctctccgttatcacagcagaactcgaacccgtcagagcaccatcgctgattgctttctttcacggccactctgcctgtatgtgcccgtttcgatggcggtacagcaggttttcgctcaagcaacagcgcattctggcgcatgatccggtaaacacgtttggcattgatcgcaggcataccatcaagttctgcctgtctgcgaagcagcgcccatacccgacgataaccatacgttggcagctctccgataacatggtgtatacgagaagcacatggatcaggattgctgggcgtctttcttgccggaggaacggttgttctggcggccgatcccagcgccacgctcggatcgcgtggagtgtgtggattcacttccgctgacggcggtcgggaaagtcgataaaaaacaattacgtcagtggctggcgtcacgcgcatcagccagggctcaaaggaggagtccacttgcagaagccaggaagccacaatatgtgcaccaaggtatggacaacgcaaggacagctcttcagaaaccagagcaagcacgggcacacacagaggttcattggacttaacttccagtgtctgggcagcctccat

SEQ ID NO: 29126 - DNA, 1144 bp, Homo sapiens
  SIMILAR (645)..(382): 1001254mologous to Escherichia coli phnE protein,accession number J05260,Smith-Waterman Score=434.
ataatttttgcagcgtttcgttgctgatctcccgtgtggcgcgcaggtggtaaagttcagcacgttcagaacgcaatgccgccagacggaagcgacgctcaaggttctcttcctgcacggaactttcaacgtcgttacgtccatcggcgcgacgacgcaggttaccaatgacgcgagaactgacctccgtaagcagctggttatcgatattctcttcggtatccgccgccagacgctcctccattttctggatcgccacaatcgccacttctgccgttgccgctcgcgcaatacgttcctctttcaattgttgcgaatgatccgcgacttcaatgatttcgagctcgttacccgctatctcttgatagcgttttgggtatgcaaccgttgagagaggaaatccagcaggctgaccgtgacgatgataagcaccatcagggcgcaggtttgttggaactggaaaccgcgaatcgcttcccacagggtgacgccgatcccgcctgcgccgaccatgccgacgacggtcgccgagcggacgttggattcgaagcgatagagggagtaggagatcagcagtggcatcacctgtggcagcacgccgtagaggatctcttcgagcttgttggcaccggtggcgcgaatgccgggccgggctcaatcgcttccaccgcttcggaaagcagcttggagagcacgccggtggtgtggataaacagcgccagcacgccagcacgccagcgaacgggccgaggccgacggcgaccacgaacagcatggcgaagaccatttcgttaatggcgcggcaggcgtccatcaggcggcgaacgggctggtaaacccaccacggcaccaggttttcggcgctcatcaggccaaaggggatggagagaaccaccgccagcgcggtgccccagacggcgatttgcagcgtgacggccatttcggtgaggtaatcctgccactggctgaaatcgggcgggaagaagtcggcggcgaacgtcgccatgttgccgccgtctttgatcagcgtaagcggggccatttccgcgccctgccacgagacgaccaacacggcgagtacaacggcccagctcagaagcgagaaccagctgcgcttgggtggggcgatggtgatggtttgcat

SEQ ID NO: 29127 - DNA, 2460 bp, Homo sapiens
  SIMILAR (514)..(1368): 871254mologous to Escherichia coli PrkA protein,accession number D90821,Smith-Waterman Score=1289.
atggatgctctgctgaaagccggcacattgcgcctgtcgctgacctttaaccccgcgcatgcgcagcaaaaaatcgccagcggcgatttgcctgcaagcagttacagttttggctttcgcgaggggatgattggcaacgtgcatttcgtcaccattcctgccaacgcgaatgccagtgctgcggcgaaggtagttgccaatttcctgctctcacccgatgcgcaactgcgtaaagcagatcccgctgtctggggcgatccttctgttctcgatccgcaaaaactgcctgacgggcagcgcgaatcattgcaatcaagaatgccgcaggatctgccgccggtactggctgaaccgcacgcaggttgggtaaatgcgctggaacaagaatggctacaccgttacgctctcacgctgatatcgcctgctttgtcgttgacacactggcaggcgttatttgccgatccacagttaccgcaggcattactggcaacgctggtgtcgacaaacatcgcggcggtcggggccttgttgattgccctgctggtgattgttggcgctgtgggccgtggccgaattggggccgttttttggccccggttgcccgggtttgtccccattccccctttggaagacgcgattgaacagattgtctcttatctgaaacacgcggctcaggcgctggaagagaagaaacaaatcctgtatctgctggggcctgtgggtgggggtaaatcatcgcttgctgagcgactgaaatcattaatgcagctcgtaccgatttatgtattgagcgcgaacggtgagcgtagcccggtcaacgatcatccgttctgtcttttcaatccgcaggaagatgcgcagattctggaaaaagagtatggcattcctcgccgttatctcggcaccatcatgtcgccgtgggcggcaaaacgcctgcatgaatttggtggcgatatcactaagttccgggtagtgaaggtctggccgtcaattctgcaacaaattgctatcgccaaaacggaacccggcgatgagaacaaccaggacatctccgcgctggttgggaaagtcgatattcgtaaactcgaacactacgcgcagaatgacccggacgcctacggctattccggtgcgctgtgccgcgccaatcaggggatcatggaattcgttgagatgtttaaagcaccgattaaagtgctgcatcccttgttaaccgccactcaggaaggtaactacaacgggacggaaggtatctccgccctgccgttcaacgggattattctcgcacactcgaacgagtccgaatgggtcactttccgtaataacaaaaacaacgaaaccttcctcgatcgtgtttacatcgtgaagccgactctagaggatcccccctgtaaagcgtgttcgacccagtgccccatcaaaattgatgtgccggagtttcgctctcgttttctgcagctctatcacacccgttatttacgcccgctgcgcgaccacctcgtcgctacggtcgagagctacgcgccgctgatggcacgcgcgccgaaaacctttaacttcttcattaaccagccgctggtgcgcaaactctcggaaaaacatatcggcatggttgatttgccgctgctgtcggtcccctcgctacaacaacaaatggtggggcatcgctcggcaaacatgacgctggaacagcttgaatctctcaatgcagagcagaaagcgcgcacagtgttggtggtgcaggacccctttaccagctattacgatgcgcaagtggtggcggattttgtccgtctggtcgaaaaattaggtttccagcctgtgttactgccattttcgccaaatggcaaagcccagcatattaaaggttttcttaatcgttttgcgaagacggcgaaaaagacggcggatttcctcaaccgtatggcgaagctgggtatgccaatggtgggcgtcgatcagatatcaatgcctcgcttatcagataaagtgcttacgcaaccgttgagagaggaaatccagcaggctgaccgtgacgatgataagcaccatcagggcgcaggtttgttggaactggaaaccgcgaatcgcttcccacagggtgacgccgatcccgcctgcgccgaccatgccgacgacggtcgccgagcggacgttggattcgaagcgatagagggagtaggagatcagcagtggcatcacctgtggcagcacgccgtagaggatctcttcgagcttgttggcaccggtggcgcgaatgccttccaccgggccgggctcaatcgcttccaccgcttcggaaagcagcttggagagcacgccggtggtgtggataaacagcgccagcacgccagcacgccagcgaacgggccgaggccgacggcgaccacgaacagcatggcgaagaccatttcgttaatggcgcggcaggcgtccatcaggcggcgaacgggctggtaa

SEQ ID NO: 29128 - DNA, 292 bp, Homo sapiens
gcacgccatctggtgcgtttaatgccggtgctgcgcttgcgtgatgcccgttttatgcgccgtattcgtaacggcacggtgccaaatgtccctaatgtggaagtcaccgcgcgccactcgatttcctcgcccattcgtcagggactttccgcaatggtacagctgcttgagcattatttctctgagcagggggccggacaggcgcgatatcgtttaatgcggcggcgagccagcaatgagcaacgaagctggcgctatctggatatcatcaaccggatgattgaccgacctg

SEQ ID NO: 29129 - DNA, 440 bp, Homo sapiens
attcgtcagggactttccgcaatggtacagctgcttgagcattatttctctgagcagggggccggacaggcgcgatatcgtttaatgcggcggcgagccagcaatgagcaacgaagctggcgctatctggatatcatcaaccggatgattgaccgacctgttgcctggcatctgttgaatcttctgccattgcagcgcattgccaccaccaactcgggtgagttgctttcgttaacgccggtagagcatgtttgccgactggtacgtgagtcctcgcgcgttgccgcctggcgtctggggccgagtggcttgagtaccgaagatagccgacgcatatcctttcacattcgttttaaccgtccgtcatcgctgtttgcacgctgctggttgctggtggaaggggaaacggaaacctgggttatcaatgaactggcgcgtca

SEQ ID NO: 29130 - DNA, 864 bp, Homo sapiens
  SIMILAR (648)..(76): 991254mologous to Escherichia coli possibly rffE; (UDP-GlcNAc -2-epimerase),accession number M87049,Smith-Waterman Score=987.
tcaatggaccctgacttccatctcaacataatgcagcccagacagggcctgacagaaataacctgtcggagctcggtacccattcgagcagttggtgataagcgtcggcagaccataggtccgcagccaggcgcgcaccagatggtcgctgctggcttttgacgcggaataagggctgctcggcgcatacggcgtggtttcggtgaagaaatcatccgtcgagtgcaggtcaccatatacttcgtcagtggagatatgatgaaaacggaacgctgattttttatcttccgtcagcgcattccagtaagcccgcgccgcttcaagcaatgtataagtcccgacaatgttggtttcaataaacgctgccgggccgtcaatagaacggtcaacatggctttcggctgccagatgcatgacacagtctggctgatgctcagtgaatacgcgtgccagttctgcccgatcgcagatatcaactttctcaaaggcaaagcgctcgctttgcgcgaccggtgccagcgacatcaggtttccggcgtaggtcagcttatcgaccactaccaccgcgtcgctcgtttcgttgatgatataacgcaccagcgccgagccaataaacccggcaccacctgttatcagaatttttctcatcagcgccagactctgctgatggacattgtcgccattgataactttgaactgactatgatcgaccagcatcaccagcacgtctgccgttgccagcgcctcgtcaagctgcgccagagtacaaagcccggtcagttttttcggcaactggtggatgttaggctcaacaaccagagtttcgccgctatgccactgggcgatcagttcagccgatttcat

SEQ ID NO: 29131 - DNA, 696 bp, Homo sapiens
cgtccccgccggaagatacaccgggcgagaccttcatctgcatattatttgcctttccgcgaatcgctgccagcccgacatcgggttcgccgttatcgcccgctggaagcgtgctgaacgccatgcaccgatggctatcaccgtattttttatcgtctgaaaggggagagtgcgaaagacggcagcgtgatgacactgcgcagttttctcgataaagacggacatccgattgatgtcgaggatattaacgatcaggcacgccatctggtgcgtttaatgccggtgctgcgcttgcgtgatgcccgttttatgcgccgtattcgtaacggcacggtgccaaatgtccctaatgtggaagtcaccgcgcgccagctcgatttcctcgcccgtgagttatcctcacatccgcaaaatctctctgatgggcagattcgtcagggactttccgcaatggtacagctgcttgagcattatttctctgagcagggggccggacaggcgcgatatcgtttaatgcggcggcgagccagcaatgagcaacgaagctggcgctatctggatatcatcaaccggatgattgaccgacctggtgggcgctcgtatcgggttattttgctcggcctatttgctactttgttgcaggcaaaaggcacattgcgactggataaagacgcccgtccattgttgctgatcgaa

SEQ ID NO: 29132 - DNA, 1406 bp, Homo sapiens
  SIMILAR (12)..(515): 791254mologous to Escherichia coli similar to P. putida sugar metabolism enzymes,accession number L10328,Smith-Waterman Score= 652.
gagcatcgctcatgcagtggcaaactaaactcccgctgatcgccattttgcgcggtattacgcccgacgaggcgctggcgcatgttggcgcggtgattgacgccgggttcgacgcggttgaaatcccgctgaattccccacaatgggagcaaagcattcccgccatcgttgatgcgtacggcgacaaggcgttgattggcgcaggtacggtactgaaacctgaacaggtcgatgcgctcgccaggatgggctgtcagctcatcgttacgcccaatatccatagtgaagtgatccgccgtgcggtgggctacggcatgaccgtctgccccggctgcgcgacggcgaccgaagcctttaccgcgctcgaagcgggcgcgcaggcgctgaaaatatttccgtcatcggcttttggtccgcaatacatcaaagcgttaaaagcggtattgccatcggacatcgcagtctttgccgttggcggcgtgacgccagaaaacctggcgcagtggatagacgcagtccctaatgtggaagtcaccgcgcgccagctcgatttcctcgcccgtgagttatcctcacatccgcaaaatctctctgatgggcagattcgtcagggactttccgcaatggtacagctgcttgagcattatttctctgagcagggggccggacaggcgcgatatcgtttaatgcggcggcgagccagcaatgagcaacgaagctggcgctatctggatatcatcaaccggatgattgaccgacctggtgggcgctcgtatcgggttattttgctcggcctatttgctactttgttgcaggcaaaaggcacattgcgactggataaagacgcccgtccattgttgctgatcgaagatccagaaacccgtttacaccccattatgctttcagttgcctggcatctgttgaatcttctgccattgcagcgcattgccaccaccaactcgggtgagttgctttcgttaacgccggtagagcatgtttgccgactggtacgtgagtcctcgcgcgttgccgcctggcgtctggggccgagtggcttgagtaccgaagatagccgacgcatatcctttcacattcgttttaaccgtccgtcatcgctgtttgcacgctgctggttgctggtggaaggggaaacggaaacctgggttatcaatgaactggcgcgtcagtgcggacatcattttgatgccgaagggatcaaggtcattgagtttgcccagtccgggctaaagccactggttaaatttgcccgccgaatgttacatcctgcatatggaaggaagaagtacaaagtcttaccagcagtcttgagaattctggtcagttttaaacacattggtgcacagtccctttcttttaactttttagggcagccagagggttcttag

SEQ ID NO: 29133 - DNA, 2161 bp, Homo sapiens
  SIMILAR (1031)..(1627): 1001254mologous to Escherichia coli Formate dehydrogenase, nitrate-inducible, major subunit (EC 1.2.1.2) (Formate dehydrogenase-N a subunit),accession number D90788,Smith-Waterman Score=1075.
ggggggcaacggggccagagctttcatgcctgcaggtccgggtcgtcgtgaacatacaaagcatatgctgcgtctgcggcgggaagggcagatcaccggtaaacaggtgccggaaattattctactcaactctcacgatggaaccagttcgtatcagatgttgccgggactatttcgtgcggtttgtcagaacgggctcgtctgcggtgagtcgtttggcgaggtgcgggtgccacacaagggggacgtggtgagtcaggtgattgaaggcgcgtatgaggtgctggggatttttgaccgggtggaggagaaacgggatgccatgcagtcgttgctgttgccacccccggcacagcaggcactggcaaaagccgccctcacataccgctttggtgaagaccaccagccgcgtattcaggagaacctgattaagggcgggctcagtggccgtaatgccaaaggaggacggtcacatacccgtgccgttcgccgtatcgacggggacgtgaaacttaaccgggcactgtgggcagaacgccgccatgaccggctggctgtcaggctgtcactgataatcagccgtctggtggcaggggaaacgctgagtgtgcgtaacgttgccgctgagtttggtgtgtcggtgcgcacgctgcggcgtgagttttctccggatattgccattatcgccattgttgtcatcgtcatcattctgaacaaaaccggggtgtccgacagtctcgcggccctgacccttgccactgttgccgcactgctgacgggaggtggcgcacggttgcttccagatgtcgcgctgacaaccttcggtgggcggtcctgtccgtctacgtatcgctttgatactctccccacgccgctgcaggatgagagcaatgacctttggaccacctatcagcggattcaagaaaacctgattaagggcggactcagtgggcgtaatgctaaaggcggacgaactcatactcgtgccgtgcgtggcattgacggggatgtgaagcttaaccgtgcgctcgcaccggatcgcacaaccaccttcctgtacgcgctgggctggacgcagcacactgtgggtgcgcagaacatccgtactatggcgatgatccagttgctgctcggtaacatgggtatggccggtggcggcgtgaacgcattgcgtggtcactccaacattcagggcttgactgacttaggcctgctctctaccagcctgccaggttatctgacgctgccgtcagaaaaacaggttgatttgcagtcgtatctggaagcgaacacgccgaaagcgacgctggctgatcaggtgaactactggagcaactatccgaagttcttcgttagcctgatgaaatctttctatggcgatgccgcgcagaaagagaacaactggggctatgactggctgccgaagtgggaccagacctacgacgtcatcaagtatttcaacatgatggatgaaggcaaagtcaccggttatttctgccagggctttaacccggttgcgtccttcccggacaaaaacaaagtggtgagctgcctgagcaagctgaagtacatggtggttatcgatccgctggtgactgaaacctctaccttctggcagaaccacggcaggaaatgcctgaactgggaggaggacttcattaggcttgcatgcctgcaggtccgttttcatcatatctccactgacgaatcatatggtgacctgcactcgacggatgatttcttcaccgaaaccacgccgtatgcgccgagcagcccttattccgcgtcaaaagccagcagcgaccatctggtgcgcgcctggctgcggacctatggtctgccgacgcttatcaccaactgctcgaataactacggcccttaccactttccggaaaaactgatcccgctgatgatcctcaacgcgctggcgcgtaaatcgctgccggtatatggcaacgggcagcaaatccgtgactggctgtatgtggaagatcacgcccgcgcgctgtattgcgtggcgaccaccgggaaagtcggtgaaacctataatattggtggtcacaacgagcgtaagaatctcgatgttgtggaaaccatttgcgagctgctggaagaactggctccgaacaagccgcacgggtggcgcactatcgtgacctga

SEQ ID NO: 29134 - DNA, 683 bp, Homo sapiens
  SIMILAR (607)..(2): 981254mologous to Escherichia coli possibly rffE; (UDP-GlcNAc -2-epimerase),accession number M87049,Smith-Waterman Score=1042.
tcgggatccggttttccggaaagtggtaagggccgtatttattcgagcagttggtgataagcgtcggcagaccataggtccgcagccaggcgcgcaccagatggtcgctgctggcttttgacgcggaataagggctgctcggcgcatacggcgtggtttcggtgaagaaatcatccgtcgagtgcaggtcaccatatacttcgtcagtggagatatgatgaaaacggaacgctgattttttatcttccgtcagcgcattccagtaagcccgcgccgcttcaagcaatgtataagtcccgacaatgttggtttcaataaacgctgccgggccgtcaatagaacggtcaacatggctttcggctgccagatgcatgacacagtctggctgatgctcagtgaatacgcgtgccagttctgcccgatcgcagatatcaactttctcaaaggcaaagcgctcgctttgcgcgaccggtgccagcgacatcaggtttccggcgtaggtcagcttatcgaccactaccaccgcgtcgctcgtttcgttgatgatataacgcaccagcgccgagccaataaacccggcaccacctgttatcagaatttttctcatcagcgccagactcctttggcatcgacgacatactgctgatggacattgtcgccattgataactttgaactgactat

SEQ ID NO: 29135 - DNA, 2160 bp, Homo sapiens
  SIMILAR (1216)..(1644): 1001254mologous to Escherichia coli putative,accession number L31628,Smith-Waterman Score=792.
atggagcttgctgcgctgcggtctgaaaatccgcagccggatgaaaagccgctcggcgaaacgctgaaagatcttttttctcgcccggtattgccggaaatgaccgacgtgcatttgccgcttaacctgaacattgaagagtttatgggcgagcagctgcacgtgactggcgacacggacatataccgtgagcaccatgctgctgaaatgagcaacattgacggcaatactaaactggacgccctggatatcgattccagtcaagggatcgtcgacgccagcggcacggcgcacctgtcagacaactggccggtggacatcactctcaacagtacactgatcgtggagccgttgaaaggtgacaaagtgaagctgaaaatgggcggcgcgctgcgcgaacagctggagattggcgttaatctttccggtccagtggatatggatttacgcgcccatacacgactggcggaagccggattgtcgctcaacgtggaagtgaacagcaaacagctttactgtccgctcactgtatgtcgtcgatgccaaaggagtctggcgctgatgagaaaaattctgataacaggtggtgccgggtttattggctcggcgctggtgcgttatatcatcaacgaaacgagcgacgcggtggtagtggtcgataagctgacctacgccggaaacctgatgtcgctggcaccggtcgcgcaaagcgagcgctttgcctttgagaaagttgatatctgcgatcgggcagaactggcacgcgtattcactgagcatcagccagactgtgtcatgcatctggcagccgaaagccatgttgaccgttctattgacggcccggcagcgtttattgaaaccaacattgtcgggacttatacattgcttgaagcggcgcgggcttactggaatgcgctgacggaagataaaaaatcagcgttccgttttcatcatatctccactgacgaattgcttcaggatacgattaactttatcaaaagtttcctgatattccgcttcttcctggctatcggcgacaattccaccgcccgcagagcagaaaatttgtccgttaatggcagtcagcgtgcggatagtaatactggtatccatgttgccgcaaaagctcaaatagccaatgctgccgcaccaggcattgcgtcgctgcggttccagttcgtcgataatttccatagcccgtactttcggagccccgtgggtgaagtcttcaacagcatctgggactgcaaacaactgattgaagagcaactcatcgattatatccgcaccacgctgacccatgcaggcggaattaccggtatgcgccggattgccgattttgcttcgctgtatcaggtacgtactggctcacacggtccttccgatttgtcaccagtctgcatggctgcggcgctgcactttgatctgtgggtccccaatttcggtgtccaggaatacatgggttattccgaacaaatgctcgaagtcttcccgcacaactggactttcgataacggctatatgcatccgggagacaaaccgggtcttggtatcgaattcgatgaaaagctggcggcgaaatatccctatgaacctgcttatctaccagtcgcacgtctggaagatggcacgctgtggaactggcggttgatcaggcccagtatatacaactcaagtcaaatgcagctagttttacactttggcccagttcagcagttggaagtttttgcagaagtattgaaaagtggatcaaccacccaggcgtcggtgatgctggcgttgtcgcaatcaacagtgagcgcagccttgaccgacctggaagggcatcttggcgtgcaactgtttgatcgcgtggggaaaagactggttgttaatgaacacaggcggctgctctatccggcaaactctatctgccaagtctcatcctgccattgtcaccacacccaggaccaagtggacatcacttctcacccggacaaccacaacagcctgctaactggtttctctgtctcctcccctgcatccctctgccctggatttcacacaccagcccacatgacaaacatgatctcatatcagggacttgttcgcaccttccataacgctgtagccaccagaacagatattgcggaacgacaaagagaaacagaaccagattga

SEQ ID NO: 29136 - DNA, 2265 bp, Homo sapiens; identical to SEQ ID NO: 17647
  SIMILAR (1155)..(754): 981254mologous to Escherichia coli similar to,accession number D90890,Smith-Waterman Score=661.

SEQ ID NO: 29137 - DNA, 1626 bp, Homo sapiens
  SIMILAR (1626)..(985): 951254mologous to Escherichia coli No definition line found,accession number U00039,Smith-Waterman Score=1077.
tcaaggtgagtgtgttaccgacttcgttgtgcacttaatggtcacgcccattttttcaatacgggcgatctctgcatccagcactgattgcggtaaccggaattgcggaataccgttacgcaaccagccaccggggtgcgcttctttctcataaatcgtgacgtcataaccctggtttgtcagtgtcacactggcctgcaatccggcaggacctgcgccaataatcgcgactttgccgagcgttttagtaccgggctgataaattcccattccggtttgttgttcaaaatcagtaacaaaacgctgtaagcggccgatatcaatgggagcatcaacaccggcacgggtacaaccgctttggcataatttctccgtcgggcacactctggcacaaacggcaccgagggcattattttcgcgaattgtcgtcgcagcgccttccttaggcagccaaccggtgggaataaataacgcagtaataaaaccccaggcaataaaagcaccaatattggggatgaccattgcagtcaaaaagcccccaaaagcctggacctttgcacgagcagacttgttttccataatattatccactttccggaaaaactgatcccgctgatgatcctcaacgcgctggcgggtaaatcgctgccggtatatggcaacgggcagcaaatccgtgactggctgtatgtggaagatcacgcccgcgcgctgtattgcgtggcgaccaccgggaaagtcggtgaaacctataatattggtggtcacaacgagcgtaagaatctcgatgttgtggaaaccatttgcgagctgctggaagaactggctccgaacaagccgcacggcgtggcgcactatcgtgacctgatcacctttgtcgctgaccgtccggggcatgatctgcgttatgccattgatgcttcgaaaattgcccgtgaacttggctgctgccgcaggaaacgcggcgtatcgaagcaactgttgccgatttacgataagactgcccgcgttatgggtgcgcgcaatgacgtcttccaccggctgttgaccccacagcgcgtcttcgtcgtccagcgtcaggaaggcgatatccgtgcattccagcatttgttggtacacctgctgtgtctcttctttgctggcccacaggcgcggacgatagttattgtcgaaaatcacttttccgccgttggcgcggcattcgcgcagcagggaaagcagcttttcgcggctggtcgggcttaagatcgccaggctaatcccgctcaggtagagataatcgaaattcgccagctcttcgcaaatcgccgcagactgctcactctccagccagaatttggcggcggcttcgttccgccagtagtagaacgtacgctcgccggtgctgtcggtttcaatgtagtaaaggcccggcagacggttttccatccgttgggtcagggaagtatcaacgttctcgccgtgccaggcgtccagcatctgctggctaaaactgtccgttcccagcgccgttacgtaatgaacggttaatgccgcaggatcgagggcgatatagacggaagtgttcagggtatcgccgccgaaaccgcgcttaacgtccgcgcctttctcggaaagctcaatcat

SEQ ID NO: 29138 - DNA, 1247 bp, Homo sapiens
  SIMILAR (1247)..(726): 981254mologous to Escherichia coli galactoside binding protein,accession number M59444,Smith-Waterman Score=878.
ttctgtacaagcatgctgtgaagacgcaggcacagctgtaactcccctacagatgaaggtgcttcccacacatggacacagacactcagcctctcagacaagtgtcggcaggggaccgtctctggcagattaagccttcggaaatcagattgtacaccaattagccacgcgagttgttcctcatcctcgctgcatgggcactgagtgagtgtcgccgttcggctcagaatgacggactttagtaggacagtggggaaagatgtgcagaggtttgatgctggcctgggttggactcttgagcgtctgctgtctgcacatgcggcattccgtgtcgcattgaaagccggcgacatggcgatactggccagtagaccacccaccgttacaccgaattccatgcgtcttctgggacgtttatatcgctctggcgtgtatgggcgatgatattcgagccgtatctgatcgataacccagaacggtttgtgatcgttcacttcgcgcgcggtacggataagccgcgcctgctgggggttctgtgccacgataaaccacggatcaacagcaatgcagtgaccgcccacgccagggccaggctgaagaatattaacgcgagggtgacgattcgccaggcgaatcagttcccagacgttaatcccctgatcggcacaaatcagcgacaattcattagcaaaagcgatattcacatcgcggaagctgttttcggtgaggtaagtggtacgtgcttctgcatccggatggcccggttcacctttcagcagtacgaactgaatctgaccgtctttgttcagatcccaaccctgattcgccgcccagtgtttagcaatcaaatcgccttgaataatgccggactctttggagtcagtgccaacgtagtaggctttgtcgtagctatccagcgccttacgagacgggtctttgttgaagaaaaccaccggcacgttttgcccacgcgctttctcaatcaccgtacccgcagctgccgggtcaaccaggttgattgccagtgccttcacccctttcgccagcaatacgtcgatctgatcggtctgcttggactggtcattctgagaatcattcatcagcagctgaacatctggcgcggctttcgcatcttgctcaatagccttgcgcactacagacataaagttatcgtcgtacttatagattgttacaccaatgcgagtatcagcagcgtgtgcagcggcaccgaataacatgctggccat

SEQ ID NO: 29139 - DNA, 2104 bp, Homo sapiens
  SIMILAR (1422)..(2096): 971254mologous to Escherichia coli hemN,accession number D16509,Smith-Waterman Score=1143.
gtctaccctcgcacaacaatggcaggctggcgacagcatctggtcacgcccggctattcgtgtcttcgcaacctacgccaagtgggatgagaaatggggttacgactacaccggtaacgctgataacaacgcgaacttcggcaaagccgttcctgctgatttcaacggcggcagcttcggtcgtggcgacagcgacgagtggaccttcggtgcccagatggaaatctggtgctcgtatctcctcgcgctcagacagtgtcaggccgacatccatagcgctggctgcatctgccacggtgtagttctggtcaacgaccagtgtttgccgccagtaaagtgctggggccgctgtggagcaaagtctccattttgcgctatcacatttcgggtccgctggacgatccgcaaatcaacgaagtgttgcgccaaccgcgcctacaaacggaacataaccgtaggtcggataaggcgtttacgccgcatccggcagccgttgcctgatgcgacgctgtgcgtcttatcaggcctacaaacggaacataaccgtaggtggccaaattcagtgtgccacttcagccctgattcgactttttacaatgacttatctggacgcatgaagaacgtcaggctaatgttcaacggtatacacagggacaatggattctccaaacgacccacagacttgaactacacgcgtaaaccactcgtcctggctttccagacggcatggtttatcaccgtccgcgttgaaattgtgggttttcgcggtatcaaccgtttgtcgttgatgctggaacaaaacaacgtcctgattggggagaacgcgtggggtaaatccagcttgctggacgccttaactctgctgctatcgccagaatcagatctctaccattttgagcgcgacgatttctggttcccgccgggagatatcaacgggcgagaacatcatctgcatattattttgaccttccgcgaatcgctgccaggccgacatcgggttcgccgttatcggccgctggaagcgtgctggacgccatgcaccgatggctatcaccgtattttttatcgtctggaaggggagagtgcggaagacggcagcgtgatgacactgcgcagttttctcgataaagacggacatccgattgaatgtcgaggaatataaccgatcaaggcacgccatctggtgccgtttaatgcccggtgctgccgcttgcgtgaatgccccgttttaatgcgccgtattcggtaacggcacggtgccaaatgtccctaatgtggaagtcaccgcgcgccagctcgatttcctcgcccggggcggacaggcgcgatatcgtttaatgcggcggcgagccagcaatgagcaacgaagctggcgctatctggatatcatcaaccggatgattgaacgacctgaaacccgttacacgcgtgagattggttttacctccaccaacatcgacctgatttacggcctgccgaaacagacgccggagagtttcgcctttaccctgaaacgtgtggcggagctgaaccccgatcgtctgagtgtctttaactacgcgcatctgccgaccatttttgctgctcagcgcaaaatcaaagatgctgacctgccgagtccgcagcaaaaactcgatatcctgcaggaaaccatcgccttcctgacgcaatcgggctatcagtttatcggtatggatcactttgcccgtccggatgacgagctggcggtggcccagcgtgaaggcgtgctgcatcgtaacttccagggctacaccactcagggcgataccgatctgctggggatgggcgtttccgccatcagcatgattggcgactgctacgcgcagaaccagaaagagttgaagcagtactatcagcaagtggatgaacaaggcaatgcgctgtggcgtggtattgcgctaacgcgtgatgactgtattcgccgcgatgtgattaagtcgctcatctgcaacttccgtctggattacgcccctattaagaaacagggggatttgcacttcgctgattactttgcggaagatctcaagctgctcgccccgttagcaaaagatgggctgggggatgtggatgagaaggaatacag

SEQ ID NO: 29140 - DNA, 2239 bp, Homo sapiens
  SIMILAR (1036)..(650): 991254mologous to Escherichia coli K12 UDP-N-acetyl-D- mannosaminuronic acid dehydrogenase; synthesis of enterobacterial common antigen (ECA),accession number AE000455,Smith-Waterman Score =680.
atgctcaccgggtaccgtgcagttagtcgacataaaagtcagcgttataccgccgatgacgccgaagagatgattggcaaattgaccggaatgccaattccgctcaacagcttgcgccagtggattttaggtttaccgggtgatgcaaccgactacaaactggacgaccagtaccgcctgagcgaaattacctacagccagaatggcaaaaactggaaggttgtttatggtggttatgacaccaaaacgcaacctgcgatgccagccaatatggaactcaccgacggtggtcaacgcatcaagttaaaaatggataactggatacgtgcggatggttaccacacgctgcaaacgctgtttcagtttcttgattacggcgacaccatcagcattgagcttcgtgacgatggggatattcgtctgttaacgcccgttgaaggcgtggaacatgaagataacctgatcgttcgcgcagcgcgattgttgatgaaaactgcggcagacagcgggcgtcttccgacgggaagcggcctcgtcaagttgcgccagagtacaaagcccggtcagttttttcggcaactggtggatgttaggtcaaacaaccagagtttcgccgctatgccactgggcgatcagttcagcgatttcgcatcgccgggctttcgcgcaggtcatcaatattcggtttaaacgccagaccaaagcaggcgattttcagttcactggcgcgtttatcggtagccgccaggcaatcagccaccgccgctttcacctgatcgataacccagaacggtttgtgatcgttcacttcgcgcgcggtacggataagccgcgcctgctgggggttctgtgccacgataaaccacggatcaacagcaatgcagtgaccgcccacgccagggccaggctgaagaatattaacgcgagggtgacgattcgccaggcgaatcagttcccagacgttaatcccctgatcggcacaaatcagcgacatttcattagcaaaagcgatattcacatcgcggaagctgttttcgagccgtcgattatcgccgctgaccggcttaacccgctggtcaacgaattgatcatcatgccagatatcgaaaaacgtctggacgcgtttgtccgtatcgctcacgaagagttgctctatttgctgggaattttaatgaacccggccaacaaagatcatgttttaccattgatcctcaccggcccgaaagagagcgccgactacttccgcgtactggacgagtttgtcgtgcatacgctgggtgaaaacgcgcgccgccattaccgcatcatcattgatgacgccgctgaagtcgctcgtcagatgaaaaaatcgatgccgctggtgaaagaaaatcgccgtgatacaggcgatgcctacagctttaactggtcaatgcgcattgcgccagatttgcaaatgccgtttgagccgtctcacgagaatatggctaatctgaagctttacccggatcaacctgttgaagtgctggctgccgacctgcgccgtgcgttctccggtattgtggcgggtaacgtaaaagaagtcggtattcgcgccattgaagagtttggtccttacaaaatcaacggcgataaagagattatgcgtcgtatggacgacctgctacagggttttgttgcccagcatcccggctcttataacgacctcctgttgatggagctactgccgcacctgctggtggaaggtatgctcatctccgcggtgtccgctgaaagcttaccgtggctacatctctcctgcgtggcgaatatatcgaagcggcagttaatctgcgccgtgccattgccgaagccaccgaaagcgggtctgcttggcaaaaacattatgggaacaggtttcgatttcgaactgttcgtccataccggggcagggcgctacatctgcggggaagaaacagcgttaatcaactccctggaaggacgtcgtgctaacccacgctcgaagccacctttcccggcaacctccggcgcatggggtaaaccgacctgtgtcaacaacgtcgaaaccctgtgtaacgttccggcgatcctcgctaacggcgtggagtggtatcagaacatctcgaaaagtaaagatgctggcaccaagctgatgggcttctccggtcgggtgaaaaatccgggactgtgggaactccgttcggcaacaccgcacgcgagatcctcgaagattacgccggtggtatgcgtgatggtctga

SEQ ID NO: 29141 - DNA, 2895 bp, Homo sapiens
  SIMILAR (256)..(975): 831254mologous to Escherichia coli possibly rffE; (UDP-GlcNAc -2-epimerase),accession number M87049,Smith-Waterman Score=1039.
atggaggacagaaagtgtgagtcacttgcagggatgtatgaaaattacttggcagaaacaagaaaacgccagacaggcgcttcgggaatgtatgtgggagagtttgaaaattcatggtgtttctttcaggctctctcagcacttactgcggctacctctgctctcccgccacctgcacgtctgcagagggatccccgccgaaaagttgagcttaaggcagctatgaagaattatctggtccaaaatgtcagtagtgctgaggttgagaaaccctacctcgagcaaacaccagactgttgccttcaaaccaccatggagttctggacttcttttactgaatcctcactctgttgcacagggctgatagacaacttgtctgagctctccctcacagaagtgacattgcttgaagcggcgcgggctttttgtaatgcgctgacggaagataaaaaatcagcgttccgttttcatcatatctccactgacgaagtatatggtgacctgcactcgacggatgatttcttcaccgaaaccacgccgtatgcgccgagcagcccttattccgcgtcaaaagccagcagcgaccatctggtgcgcgcctggctgcggacatatggtctgccgacgcttatcaccaactgctcgaataactacggcccttaccactttccggaaaaactgatcccgctgatgatcctcaacgcgctggcgggtaaatcgctgccggtatatggcaacgggcagcaaatccgtgactggctgtatgtggaagatcacgcccgcgcgctgtattgcgtggcgaccaccgggaaagtcggtgaaacctataatattggtggtcacaacgagcgtaagaatctcgatgttgtggaaaccatttgcgagctgctggaagaactggctccgaacaagccgcacggcgtggcgcactatcgtgacctgatcaccttcgtcgctgaccgtccggggcatgatccgtcgtcatgccatataatgcctgggagcaacgatttcggggacggcacacgcctgtgtgaccgcttcccactccacttgggttccgtgagcgcgcggagccggaggagtcagggacgtgaggatgccctacttcccgcagcatccggatggcagggtctgcgtcggaaggcccgggagggcgacgccctccactgctgccgcggggtggaatcagatctctaccattttgagcgcgacgatttctggttcccgccgggagatatcaacgggcgagaacatcatctgcatattattttgaccttccgcgaatcgctgccaggccgacatcgggttcgccgttatcggccgctggaagcgtgctggacgccatgcaccgatggctatcaccgtattttttatcgtctggaaggggagagtgcggaagacggcagcgtgatgacactgcgcagttttctcgataaagacggacatccgattgatgtcgaggatattaacgatcaggcacgccatctggtgcgtttaatgccggtgctgcgcttgcgtgatgcccgttttatgcgccgtattcgtaacggcacggtgccaaatgtccctaatgtggaagtcaccgcgcgccagctcgatttcctcgcccgtgagttatcctcacatccgcaaaatctctctgatgggcagattcgtcagggactttccgcaatggtacagctgcttgagcattatttctctgagcagggggccggacaggcgcgatatcgtttaatgcggcggcgagccagcaatgagcaacgaagcgggcgtcaaaggtaccgagctaggcgccacgtcgcgggaaccttcggtcaggctgacgtagttttgcaggaagatggacataccgattgcagagatgagtgcaatcaggcgcttagagttacgccccgggcggcgctggcaatgacgattgcgccgacgaatcccgcagctaccagcagccagccggtatcaatgcccatcatcatcagcgcggcgatgatcataaatgagacagacggtgaacagcagatgctggcgattggtcgtgcgctgatgagcaacccgcgtttgatattgcttgatgagccatcgctcggtcttgcgccgattatcatccagcaaattttcgacaccatcgagcagctgcgcgagcaggggatgactatctttctcgtcgagcagaacgccaaccaggcgctaaagctggcggatcgcggctacgtgctggaaaacggccatgtagtgctttccgatactggtgatgcgctgctggcgaatgaagcggtgagaacgccagactcctttggcatcgacgacatactgctgatggacattgtcgccattgataactttgaactgactatgatcgaccagcatcaccagcacgtctgccgttgccagcgcctagtcaagctgcgccagagtacaaagcccggtcagttttttcgacaattggtgaatgttaggctcaacaaccagagtttcgccgctatgccactgggcgatcagttcagcgatttccatcgccgggctttcgcgcaggtcatcaatattcggtttaaacgccagaccaaagcaggcgattttcagttcactggcgcgtttatcggtagccgccaggcaatcagccaccgccgctttcacctgatcgataacccagaacggtttgtgatcgttcacttcgcgcgcggtacggataagccgcgcctgctgggggttctgtgccacgataaaccacggatcaacagcaatgcagtgaccgcccacgccagggccaggctgaagaatattaacgcgagggtgacgattcgccaggcgaatcagttcccagacgttaatcccctgatcggcccgaatcagcggcgattcctagcaaggggctcctctaatgcgactgcaggatga

SEQ ID NO: 29142 - DNA, 1111 bp, Homo sapiens
  SIMILAR (507)..(1): 951254mologous to Escherichia coli periplasmic protein,accession number D90227,Smith-Waterman Score=818.
cgaactcatcgcgcttagcgcgttgttcaggcggtccaggtcatccagctgcgcttgaatctcggtggtttttgccagcttgtcctgctcattcagtcctttattgcttttcacgccctgcatctctttaaacagcgcgagctggcgaatcggcaccagttgcaggtcgctggaagcgcggaatggcgcccagcccaggcgttccagcaccgctttttcttccggcgttttgccgtagttcataaagaagtcgtagatcttgtctttggtggtttcggaaagattcttgcgccagacgatcggatcgcctgggatcagcggcgacttccagatcaccttcagttctttcagcttctctggcgcggaggttttcagcttgtcgaggttttcggtgttgttggtggcaacatccacctgcttgttggcgacggccagcgcgttggtttcatgcccggcgttgacggtgcgcttgaagtcgctggggatcctgccgcgctgggcgataacgtcatcggcaaaatgctgcacgtcacccatgtcacctttcaacacggcgatttccagacagtcgtcgtggttgatgtgcacatgcagcgtggcgacggagaggtcgtggtgatgatgctgggtggagacaatgcggctggctaagtcgcgtttttcgtgttcatacacatacgacagcaccgcgaaaccttgcgtgccgtgctgctgggtggcctcttgcgccagggcgctacgcagaatgtcgcggatagcttcggaacggttgttataaccacgacgctggctcaggctgtccagcgtctccagtaaatcgtcatcaagcgtgatggtgactcgttgcatttgcgttaaaccttttctgtggtgcgacggcgcacggggaatgcgggtaataccgcgttttgtagcacacgtccggcgtcagaggaaaaggttaatttctctcccaccacctgggtttcgacgatttgtccgttgtccataaccattacccgctggcaaaagcgttctaccaagcgtaagtcgtgggtgatgaacaggcaggcggtgccaaactgttgttgtagctttttcagcaggcgaatgacacccgcctgtaacacga

SEQ ID NO: 29143 - DNA, 3039 bp, Homo sapiens; identical to SEQ ID NO: 25465
  SIMILAR (2587)..(2988): 991254mologous to Escherichia coli rhsA,accession number X78541,Smith-Waterman Score=707.

SEQ ID NO: 29144 - DNA, 1479 bp, Homo sapiens
  SIMILAR (919)..(1464): 971254mologous to Escherichia coli CG Site No. 701,accession number L19201,Smith-Waterman Score=878.
atgaaaggcaccgttgaacgggccgatatgcactacatcatccgtgatttcgaccgtaaacagtttgaagcgcgtaaacgtaaaatgatggagatcgccaaaaaagcgggtgtcattcgcctgctgaaaaagctacaacaacagtttggcaccgcctgcctgttcatcacccacgacttacgcctggtagaacgcttttgccagcgggtaatggttatggacaacggacaaatcgtcgaaacccaggtggtgggagagaaattaaccttttcctctgacgccggacgtttaacgcaaatgcaacgagtcaccatcacgcttgatgacgatttactggagacgctggacagcctgagccagcgtcgtggttataacaaccgttccgaagctatccgcgacattctgcgtagcgccctggcgcaagaggccacccagcagcacggcacgcaaggtttcgcggtgctgtcgtatgtgtatgaacacgaaaaacgcgacttagccagccgcattgtctccacccagcatcatcaccacgaccttatttgtgcgaaaaccgatggttgtaacgaggctcgctggttctcgctgacgacgcgcaatgttaaaagaaggaaagcggctggcggacatcgccaaaaaacagccgctgaccctgctctactcagcaaaaaacaccacgcagaaccatgcgctggtgctggccgactggctaccgcggcaatggaagacggcgatgcactgattttcatgaacttccgtgctgaccgcgcgcgtgaaatcactcgtgctttcgtgaacgctgatttcgatggcttcgcgcgtaagaaagtggttaatgaagatctcggtaccgtaccgtgctctatttcgaaaacgaccacgagaagacgttccgtgcaccgaaagcgtatccggagcgacgggcgctcgcatatcctttctgtgacggcccagcgtatgccggacggcatgatcctgctggagatggctccgatggataaccagcgccgcttaagtcaggaacagctacagcacgcccagcaggttgctgcccgtgatttagtgcgcggcctggcacatgagattaaaaatccgcttggcggtttacgtggcgcggcgcagctgctcagcaaagcgttacctgacccatcactactcgaatataccaaagtgattatcgaacaggcggaccggctgcgaaatctggtcgaccgtctgttggggccgcagctgcccggtacgcgcgttaccgaaagtattcacaaagtggctgaacgcgtggtaacgctggtgtcgatggaactgccggacaacgtgcggttgattcgtgattacgatcccagcctaccggaactggcgcacgacccggatcaaattgaacaggtcttgctgaatattgtgcgcaatgcgctacaggcgctggggccggaaggcggtgaaatcaccaggttgcgtttggtgtttctttcacgcgcttag

SEQ ID NO: 29145 - DNA, 1833 bp, Homo sapiens
  SIMILAR (1545)..(751): 981254mologous to Escherichia coli glucose-specific enzyme II of phosphotransferase system,accession number J02618,Smith- Waterman Score=1328.
ttaagcccccacgtaattccctgagagataccactcttcacctgatgcagcccgcttactgcttttccgtaaacaccgttcacgacgcgccagaaaattgtttcgttctggctgggagtggctttcacggaatgccgccatccacaccgttgcagcacgacggtataagcccctggactccagttcttccgcctggcggtgcaggcacaaaatcacccgcgggtcgttagtgccgacatagaaattgcgcacaggtcccctgaatcctgccgggatctggctgtattccacattgtcgtaactggctttgaagtacgggtcttcgcgtttttctgtgtacgtgctgacggacggcgataaccgcagggaaagctcatcccatttttcccgcaccttcgacgggctgagcacgttacggcaccaaaacggatcgcggctgacgcggctgtacatctcgcacatttgtttgtgagtacgaccatcctgcacacacatcacgcgaatttcgtttgcccaggctgtccagttcggttctttgggacgaaccacctcgccgtcacattcggcggcctgctcgtacagggcgatgatttttttccagagccactgtgcgcaggtcaaatcatcctgcgttccccactggcgctttttagggctgaatacaaccgcatcaggatggcgagttaaaaaatcctgttcatccgtctgcgtgtccggttgcgaagcgtccggacgagaaggttttttatggatgtactcatccatctcggttttcaggttatcggatttagtaccgaaaatcgcttgaacaccagaaccagcaaccactacgcccgctgcgcccagttttttcaggccggcctgatccactttagacacatcagcaacgctgacgcgcagacgggtaatacatgcgtcgaggttagtaatgttttctttaccaccaaatgcagcaaccagagccggtgccatttcgctggtacctgtcgcttttgcatcttcagtcgcgtcttcacgacccggcgttttcagatccagtgctttaatcagcacgcggaagatggtgtagtaaacaatcgcataaccgataccgacgatcgggaacagccacagtttgctgctgttaccagacagaacgatgaagtcgatcagaccgtgcgagaacgacgtaccgtcacgcatccccagaagaatacagattgggaatgccaggcctgccagaatcgcgtggatgatgtacaggatcggcgcaacgaacatgaaggagaactcgatcggctcggtgataccggtcaggaacgaggtcagcgccgcaaagatcataataccgcccactttcgcgcggttttctggtttagcagagtgccagatagcaattgcggcacgtggcagaccgtacattttgaacaggaagccaccagacagtttacccgcagtccggtcacccgccatataacgcggaatgtcgccgtggaaaacctgacctgctgcgttggtgtattcaccaatctgcatctggaaaggtacgttccagatgtggttcagccaaacggtaccaggcaacgttcgatgaaaccgtaaattggcaacgccactaccgggtttcttgtagcagcccactgagagcaagtcaccatcctggatgatgatctctccaacatgccagcctctctcttggacctcaactccagcagctttcacctcctccctactcaagatacaccatgacgacactctgaccttgacattgttgttggattgttggatttttgcacaataatagactgaggtcaggagtttgagaccagcctggccaacatggcgaaaccccat

SEQ ID NO: 29146 - DNA, 1656 bp, Homo sapiens; identical to SEQ ID NO: 25461
  SIMILAR (571)..(867): 981254mologous to Escherichia coli PUTATIVE MALATE OXIDOREDUCTASE (NAD) (EC 1.1.1.38) (MALIC ENZYME),accession number D90874,Smith-Waterman Score=496.

SEQ ID NO: 29147 - DNA, 614 bp, Homo sapiens
  SIMILAR (614)..(3): 1001254mologous to Escherichia coli tdcC,accession number M23638,Smith-Waterman Score=1025.
atgctgatagtgttcagtttacccagcgacactttagttttgtcgcctttataaccaaacttcaggaccaggccattcagaccttccagcgttcccagatagtgaccgaagaaagatttgaagatagccacgagtgcgatgatggaagccgcatattccagtgtaatcgcgaacgttgttttggtaccggtcatggacgcaaagtggttagccagataagaaagcactggaatattctgcgctttggcttccgccatgttggccggagacagagtaaacaggcagctaaaggcaaagaacatcaccactgcaaccatcagcatgctggcacgagaaatgatttgggaacatttacgttcggtgaagtcgcgaccgaagtctttctcatactcttcacgcttagaaaccacgaaggaagagacgattggcgagaagttaaaggagaaaaccatgatggaaatccccagccagacagtgatcaggataccgtcatgaccggttaacgacagcgaaccgaggtcaacctggtcgataactgcagagttccagtaagggatcagcgacaaagaaatcagcaccaggctggcgataaacggccataccaggtagctcat

SEQ ID NO: 29148 - DNA, 648 bp, Homo sapiens
  SIMILAR (648)..(481): 1001254mologous to Escherichia coli fructose 1,6-biphosphate aldolase (AA 1-359),accession number X14436,Smith-Waterman Score= 282.
caccgggtcgcacaggatgccgctccagctgcggctcccgtcatccaggacaacatggtggcagccaggcgaaagtaaacccgttttcagaacgcgatatcgatgtggcgcggcaaaattatctggcgcaggaagtactcggtaccacgagacggcaaatctccgggatgtacattttctggctgttacgggcaaacataatatgctgcaggcgcgcttcgacatccacttggtcaggtaggttgattccatatcagtgaccatttccagcatctccagaagctgtcggaccagactttccagtgactgttctttggcaagggattgcgagacgcgggcgataatctgatctgacacggaacaactccaggatacggcgggtaaatgctgattatttaatctttgcaggcatgataaaacatcatcaacaaagatgaaacaagacgtaatatgttttgagtgaatgtaataaaaatagtgcggcgctttaactttagcagcggtttccagtacggcgttgatggagtcagtaccgacgcagtttactgctggcagtgcgaagttgttttcttttgctacctggaaaactttctgtacgtcatcaccagtgattacgccaggttttacgaaatcaaaaatcttagacat

SEQ ID NO: 29149 - DNA, 1548 bp, Homo sapiens; identical to SEQ ID NO: 8879
  SIMILAR (721)..(1386): 961254mologous to Escherichia coli UNKNOWN PROTEIN FROM 2D- PAGE (SPOT M92) (FRAGMENT),accession number D90883,Smith-Waterman Score=1099.

SEQ ID NO: 29150 - DNA, 1120 bp, Homo sapiens
  SIMILAR (1)..(408): 1001254mologous to Escherichia coli K12 putative transcriptional regulator LYSR-type,accession number AE000403,Smith -Waterman Score=713.
atgccaatggtggtgtgcgccgcgaaaagctatctcacacaatacggcataccggaaaaacccgccgatttgagtagtcattcatggcttgaatacagcgtgcggcccgacaatgaatttgaactgatcgcaccggaagggatctcgactcgcctgatcccacaaggaagatttgtgactaatgatccgatgacgctggtgcgctggctgacggcgggtgccgggatcgcctacgtgccgctgatgtgggtgatcaacgagatcaatcgtggggagctggagatcctgctgccgcgttaccagtcagatccacgcccggtttatgcgttatataccgaaaaagataagctgccgctgaaggtacaggtcgtgatcaactcgctgacggattattttgttgaggtcggggcgaggggaccgttcgtgcacgtagaaagattaattatcctctctgaaaatagtgaaattattacgcagtaccgccaacagtcaggttatcgactttcaacgttggctgggccacgacaagcgggcaactttgttattatggaagctggaggcggccggctcccctctaagaccactgagtgttcaggtgacaacccctcaggaggtggcagaaacggataatcatgccgataactcatataacgcagggctgtttatcgtgaattcactctataccgctgaaggtgtaatggataaacactcgctgtggcagcgttatgtcccgctggtgcgtcacgaagcattgcgcctgcaggttcgactgcccgcgagcgtggaacttgacgatctgctacaggcgggcggcattgggttacttaatgccgtcgaacgctatgacgccctacaaggaacggcatttacaacttacgcagtgcagcgtatccgtggcgctatgctggatgaacttcgcagccgtgactgggtgccgcgcagcgtgcgacgcaacgcgcgtgaagtggcacaggcaatagggcaactggagcaggaacttggccgcaaagccacggaaactgaggtagcggaacgtttagggatcgatattgccgattatcgccaatgttgctcgacaccattacgccagtcttctctacatgaacctcagaggcttcag

SEQ ID NO: 29151 - DNA, 2352 bp, Homo sapiens
  SIMILAR (1390)..(2328): 741254mologous to Escherichia coli No definition line found,accession number U00039,Smith-Waterman Score=1037.
atggtactggatttaatgttacctggtgaagatggcttgtcgatttgccgacgtcttcgtagtcagagcaacccgatgccgatcattatggtgacggcgaaaggggaagaagtggaccgtatcgtaggcctggagattggcgctgacgactacattccaaaaccgtttaacccgcgtgaactgctggcccgtatccgtgcggtgctgcgtcgtcaggcgaacgaactgccatgcgcaccgtcacaggaagaggcggtaattgctttcggtaagttcaaacttaacctcggtacgcgcgaaatgttccgcgaagacgagccgatgccgctcaccagcggtgagtttgcggtactgaaggcactggtcagccatccgcgtgagccgctctcccgcgataagctgatgaaccttgcccgtggtcgtgaatattccgcaatggaacgctccatcgacgtgcagatttctttgtcgctgatcccttactggaactctgcagttatcgaccaggttgacctcggttcgctgtcgttaaccggtcatgacggtatcctgatcactgtctggctggggatttccatcatggttttctcctttaacttctcgccaatcgtctcttccttcgtggtttctaagcgtgaagagtatgagaaagacttcggtcgcgacttcaccgaacgggcgaggggaccgttcgtgcacgtagaaagattaattatccttctgaaaatagtgaaattattacgcagtaccgccaacagtcaggttatcgactttcaacgttggctggcccacgccaaccggcaaactttgcccttctttaccgcagacacccacgccgttatccagtttcaggtcgttgccaaccatcgaaatctgctgcatggtttcgataccggaaccaatcaacttcggtgcatagataccgtactcaacggattcaataatttcctgcggggtcgatttacccggcagcatataggtgttggtcatacgcggcatgggcagatgggcgtaggattcacggcgaccgttgccagtcggcgtcatccccatcaaacgcgcgttgagtttatcctgcatgtagcctttcagaaatgccgttctcaatcagcacgttgtactggcctggcgtaccttcgtaatcattcgcaaccgaccttcgggattgaacattgtgcattattaaacaccggacacaattttaaggcccaagtttccgactgtgcacttaaactgaagtgcacagcggtgaaatggctttcaaaacggaccaacggttatgtaaaaacaccgggcaactggccaaatatatcggcttgtgcccctgtggacacaccgcaaagaattacaacgcctatccctgtgtttttgcatgataccacggttttccgggtgactggtgtggtgattgaagtgacggataagaaaaatacgctgattaaaaaaggtgaggtgctatttcgactggacccgacgcgttatcaggcgcgggtggatcggctgatggcggatatcgttaccgcagaacataaacagcgggcgttgggcgcagagttagatgagatggcggcgaatactcagcaggcaaaggccacgcgggataaattcgctaaagagtatcagcgttacgcacgtggcagccaggcgaaagtaaacccgttttcagaacgcgatatcgatgtggcgcggcaaaattatctggcgcaggaagccttcgtgaagtcatcggcggcggaacaaaaacagatccagagccagctggatagcctggtgttgggtgaacattctcaaaatcgcagcctgaaagcacaggtcgtggaagcaaaatataacctttatcagacgatagtgcgtgcgcccagcaatggttatgtgacccaggtactgattcgtccgggtacctatgccgcgtcgctgccgctacgtccggtgatggtgtttatacccgatcagaaacgacaaatcgtggcgcagttccgtcagaactccttgctgcgactggctcctggcgacgatgcggaagtggtgtttaatgctctgccagttcttcagctggcctacgcagtcatccatccacgccccgccgcgcttgttttcacgggcatacagatcgaggtagaagctaccgcgcagttcgttattttcgtcatacagttcgaccgcatcccacggcacaccgctgataccggaaacaccagcggtttcgatgcgggtcagcatatggtgcaggccgtgaccgaactcgtggaagagggtgatcacttcgtcgtgagtgaacagcgccggtttaccatttaccgggcggttgaattgcggatcgtcctgtggcatatgagcgaaggcttggattaa

SEQ ID NO: 29152 - DNA, 747 bp, Homo sapiens
  SIMILAR (427)..(302): 601254mologous to Escherichia coli protease III precursor,accession number M17095,Smith-Waterman Score=124.
atgaacgaggacaaaggttttcgaagccttttgcaccgtgccgtccaatttgatatcgccaaacggattcttgggcttaacagcagcgcacgaagcgcgagagatgttgctgctcttgatccattacgttttgagatcgttaagcacagcggacatctggtcgaggatctctgcagacgtgtcatacgatcagttactctgcaagtcttgctgcgcttcgttgacagcgcatcggcaattttgccggtgtccatttttagttcaccgttacgatcgccagttttaacgcttcgacaccgcagggacgtaatgaatgataatgccctttgcgcgtcggtgactaccggcacggtgatttccggttttttgctctctttttcggcacgcgaccaaaggtgtccgccgccatttttgccaactccggcacggtttattactgtaaataaccgccttcatcaaattggcggaatagtactctcgtggaaatctttcagcgcctgctgcaccggattaccaggtttgtccttaaagtttcgaggttaccaccagaaaactttgaaccggggtgtgccggttcatggtttctgcgctgacctgtgccatgcgcatcccgtcacgcgtagcgccatggttaattcagcgttcaccggattacgctcacgttcggcatattcttgtcgagcaacggtccggcattgcatcggccagggggctaccgacaggcaagcggtgtctcaattccgatga

SEQ ID NO: 29153 - DNA, 1229 bp, Homo sapiens
  SIMILAR (314)..(727): 971254mologous to Escherichia coli Flagella synthesis protein FlgN ,accession number D90743,Smith-Waterman Score=692.
aatgaggaataacccatgagtattgatcgcacttcgcctctgaagcctgtaagcaccgttcaaccgcgcgaaaccactgacgcgccggtaacgaacagccgggcggcaaaaacaaccgcctccaccagcaccagtgtgacgttaagcgacgcgcaagcaaaactgatgcaacccggcagcagtgatatcaatcttgaacgtgtcgaagcgttaaaactggcgattcgtaacggtgaactaaaaatggaccccggcaaaattgccgatgcgttgatcaacgaagcgcagcaagactcgccgcccaactgatcgtatgacacgtcttgcaaagaacctcgaccagatgtccgctgtgcttaacgatctcaaaacggtaatggatcaagagcagcaacatctctctatggggcagatcaacggcagccagttgcaatggattacagaacaaaaaagctcactgctggcgacgctggattacctcgaacagttacgcaggaaagaacccaatacagcaaatagcgttgatattagtcaacgctggcaggaaattactgtgaaaacgcagcaactacgccaaatgaatcaacataacggctggttactggaaggacagattgagcgcaatcaacaggcgctggaaatgttgaaaccgcatcaggaaccgacgctatatggggcgaacggtcagacctcaacaacccatcgcggcggtcaaaagatttcgatctgaagattatctccggcctgcactgcagcccggaatgcattgttacaccgtccggcgggcaaattctgtaactttgaagcccagtaccgccagtgcagcgaagtacgcggcaatccccgccagcacgaccgccattaaacgcagtaaacgccagggcatggtacccaatgaccactccggcatgatatgtaacatacctaaaagcacgccagacatcaccagtaccgccaccaccagacgcaacagaaacgccatccagccgggttgcgggcgcatcaaacgcggtaaatttaccgtactggaacagcgaaacggtcaacggaccggaaagaatgcccaacgcaaccgcactcggcagcgccaacaggaaacaaagacgcaacccccagtccatcaaacggttgtattcatcatgattgccactggcaaaacttttcgacagcgacggggatcctctagatcgacctacaagcagcacctccagagatttagctatatctag

SEQ ID NO: 29154 - DNA, 2469 bp, Homo sapiens; identical to SEQ ID NO: 8874
  SIMILAR (1444)..(2088): 991254mologous to Escherichia coli elongation factor Tu,accession number J01717,Smith-Waterman Score=1087.

SEQ ID NO: 29155 - DNA, 1698 bp, Homo sapiens
  SIMILAR (58)..(375): 951254mologous to Escherichia coli similar to E. coli GlpR repressor,accession number L19201,Smith-Waterman Score=511.
  misc_feature (1)...(1698): n = a,t,c or g
atgagagcaacacagatcgagagagagccggcgtacggcaacgcagcacggtacagccgggatattcgtaaattaaggaagcaaggcctgattacgcgccatcacggtggcgcgggtcgggtttcaagcgtcgttaatacggcgttcgagcagtgtgaggtttcgcaaaccgaggaaaaaaaagcgatagcagaagcggtggcagactatattcctgatggttcaacaatatttatcaccattggtacgactgttgagcatgttgcccgggcgttacttaaccataatcatttgcggataatcaccaacagcctgcgtgtggcgcatattctttaccacaacccgcgctttgaagtgatggtgcccggcgcgactggcgagcgggaatccgcgcagacacaagaaggcagacacagtgtagctacagcagagcagaaagcaacagttacaacaacgacagagcactgctctaccaccaacctacagaagcggattaaagcggacaccgacggacgaagcgagagctgtaacgacatgcgtcggtaccttgcacacacggcgaacgaacaagaacacgagcagccaaacggccatagtgccgtaggacaaaccgtcgccaatgaaacgacaggatccccaatttcaacggggagtgagcaagaactgcgacgtaaactcgcggcaccgattatgggcaaaaatggcccagaagagattgatgctacggcagaagattacgagcgcgatattgcctggtgccatgaacatggctatctcgatgacagccgatttgttgcgcgctttatcgccagccgtagccgcaaagggcgcatcgcgtgtgaaggtatttcggtattcggcgaggtgttatggcaaggcaatgatgccgatgccgctcagctcgagcagcttgtcgggcagcccgtgcgggtttccgcgctggcgcggttttcatttgctgaacgtcatgcngttgtcgaacgctttgccgcactgctggaagcaataaagccgattaaccgcgattattgccagagaaacggcacaagttgtagcacctcggcggcacacagaccaccaggccagtcagaggacacgagggacacgccaggacgacggaaagcgacaacggcgcagcagagggaggagcacagacgcgagcagagcacgcacacgcagcgacaggtcgatcgggcggcgagcgcggcccatggcgcagaggatacccccataatagaagtggcgctggtggcgttggcgaatctggcggcggtgcggttgtacggcgaaatcgagttctggttcgcgatgatcaaagtcaccacgattatcgtgatgattgtcatcggcctgggcgtgattttctttggctttggcaatggcgggcagtcgattggagcgaacgagcgagtaaggcacatccattacccaaagttagcgcgagaaaggcgtgtacttgtaactgtcactgctcgttgctttcacgactggcttcattggaagtccgcggctcgtcgccagacagacgacaagatgaggcgaggacgacgagcccacaacgaagcgcgagatactcacaccacacgagactggacagcagcactcgagtccccaaacccactacgagagagcgccggacgtgtaaaagaaacaggctctggctcgcgggctcgacagaatgacaagcgtcacagataa

SEQ ID NO: 29156 - DNA, 1447 bp, Homo sapiens
  SIMILAR (175)..(831): 981254mologous to Escherichia coli dihydrodipicolinate synthase (EC 4.2.1.52),accession number D90876,Smith-Waterman Score =1090.
accagataatgttgcgatgacagtgtcaaactggttattcctttaaggggtgagttgttcttaaggaaagcataaaaaaaacatgcatacaacaatcagaacggttctgtctgcttgcttttaatgccataccaaacgtaccattgagacacttgtttgcacagaggatggcccatgttcacgggaagtattgtcgcgattgttactccgatggatgaccaaggtaatgtctgtcgggctagcttgaaaaaactgattgattatcatgtcgccagcggtacttcggcgatcgtttctgttggcaccactggcgagtccgctaccttaaatcatgacgaacatgctgatgtggtgatgatgacgctggatctggctgatgggcgcattccggtaattgccgggaccggcgctaacgctactgcggaagccattagcctgacgcagcgcttcaatgacagtggtatcgtcggctgcctgacggtaaccccttactacaatcgtccgtcgcaagaaggtttgtatcagcatttcaaagccatcgctgagcatactgacctgccgcaaattctgtataatgtgccgtcccgtactggctgcgatctgctcccggaaacggtgggccgtctggcgaaagtaaaaaatattatcggaatcaaagaggcaacagggaacttaacgcgtgtaaaccagatcaaagagctggtttcagatgattttgttctgctgagcggcgatgatgcgagcgcgctggacttcatgcaattgggcggtcatggggttatttccgttacggctaacgtcgcagcgcgtgatatgctccagatgagcaaacgtgggtccgctgataaatctgccgggatcatatctcccgccgccagttttataatatcgccgggcaccagctggtcgatcgatggttcccctcccgttttagtggccccaaccgagtatgtggtaaccagtcatccgccttgtttaaaagagttgatgctacggcagaaggattacgagcgcgttattgcctggtgccatgaacatggctatctcgatgacagccgatttgttgcgcgctttatcgccagccgtagccgcaaaggttatggacctgcgcgtattcgccaggaactgaatcagaaagggatttccccgcgaagcgacagaaaaagcgaagccggaatgtgacatcgactgtaagggacatcaggtagttgccagcagctccctggtaccccataacgacccaactttgttgtttaccaacgccgggatgaaccagttcaaggatgtgttccttgggctcgacaagcgtaattattcccgcgctaccacttcccaacgctgcgtgcgtgcgggtggtaaacacaacgacctggaaacgtcagtacgccggtaccgagctgattcactcgctttgttcaccgtcttgtgctcttggaggcctttttga

SEQ ID NO: 29157 - DNA, 170 bp, Homo sapiens
  SIMILAR (89)..(169): 551254mologous to Rattus norvegicus Grb2-associated binder 2,accession number AF230367,Smith-Waterman Score=82.
cttcctccggcaagtacacccggcatggtggagggaatgccagccggcctgctgagtccatgcatgagggagtctgttctttcctgagctttctatgcaccaagacctcagccagggacatgaggtccagctgccccctgtcaaccgcagcctcaagcctaaccagaagg

SEQ ID NO: 29158 - DNA, 3249 bp, Homo sapiens
  SIMILAR (1684)..(2643): 611254mologous to Homo sapiens Gab2,accession number AB018413,Smith-Waterman Score=967.
atgaagattagcaatgaggaaactcttcagagttttaaggcctggaggaaacgctggtttatcctgcggaggggccagactagcagtgacccagatgttctggaatactacaagaatgatggctccaagaagcccctgcgcaccatcaacctgaacctctgtgagcagctggatgttgatgtgactctgaacttcaacaagaaggagattcagaagggctatatgtttgacatcaagaccagtgagcgtaccttttacctggtggctgagaccagggaggacatgaatgagtgggtccagagcatctgtcagatctgtggcttcaggcaggaggaaagcacagcagctgtgttcatccttggtgccgtggctgcttggccccctagcatagacccttgctcctccactggtagagcattcatcttgcaggtcttttggagctacaaggccattgattctgttagcagacatcccactcaccaggagacctgcatgggagctcatcttggagtgcacatagctctgagcccagctgctcccatcagcacctcccccaagaacaagaacccacatctgagcccccggtgtctcactgtgtgccgcccacctggcccatccctgcacctccggggtgtctccgctcgcaccagcacgccagccagagagcagaacatgcaagaatggaaacgactaactcaaaggctgatgggtacacagtgcttcgtgttggtgcccttcatactttcacatgcacgtggaacacctggggagcttgctgagatgcttgttttcatcagcgaacctaggtcagacccctctgctgcagctctactggagtttgctggaggtccactccagactctgtatcaccggcagatatcaccagtggagtatcaccagtggagactacagaacagcaaagatggatgcctgttccttgctctggaagcttcatcccagagcagcacctgccagatgccagctggagctctcctgtatgaggtgtctgtcgatgcctgctgggagatccttccgggctcactcagatggaaggctttgcataaggctttcctggcactcttgaccaccaccagggagggctcatccagatctgtctgcagccgtgtgctcatcccacctgattgtggtggagcaaatccaggtggcatatccaccagagagctgaaaactccaaaagaccaagtgaaaggcaccaaagacaaatacaaacacgaggatcctgcatcttcccctgctctcctgtctgctggtgaagcacagcatgctctagagacgtgttcagttatggaggcccatgctgttggcttggtcttgtgtgtggagaggaatagaaagggagaaggaatgcagaggcccaggaaggaaggctgtgaagctcggtggcccatgttggcagaggagagcgcccacacagaacgtagaacccagttccaaaaccactctcataaagccgaaggctgtagagttgcagagcaagatggacccttggaaatcactgtgacgctgggtcgtgtctggggtgatcaggaaggcacacagagcttatcggtggcagcgctggaaactgccacagctccctcctcattcattgattctctttttactacttgccttatctcccaaaacttacgttttaataattcaaaactttttctttttccgaggagtgccagcttctcccagggttctgaggccccattcatcatgaggagaaacacagccatgcaaaatcttgcccagcacagtggatacagtgttgatggggtcagcggtcacatccatggcttccatagcctttccaagcccagccagcacaatgcagaattcagaggcagcacccacagaatcccctggagcctggcctcccatggccacaccagaggcagcctcacaggctctgaggcggataatgagggtgtgtaccccttcaaggcacccagaagcaccctgttccaggagtttgggggccacctggtgaacaatagtggtgttccggccaccccactctcagtgcaccagattcctaggacagtcacgttagacaagaacctctatgccatggtggtggccactcctgggcccatagcctcccttcccctgcccaaggcaagtcaggcagaagcatgtcagtggggcagccctcagcagagacctttagtcagtgaaagtagcaggtggtctgttgctgctgccatccccaggcggaatacccttcctgcagtagacaacagccgatgtcaccaagcttcctccggcaagtacacccagcatggtggagggaatgccagccggcctgctgagtccatgcatgagggagtctgttctttcctgccaggaagaacgcttgtgggcctgtcagacagcattgcttctgagggcagctgtgtgcccatgaacccaggctcccctaccctgccggctgtgaagcaagcaggcgatgattcccagggtgtctgcatccctgtgggctcatgtcttgttcgctttgacctgcttggctccccactcacagagctttctatgcaccaagacctcagccagggacatgaggtccagctgccccctgtcaaccgcagcctcaagcctaaccagaaggaccaggaagaagagctagagctcaggttccaggctgccatgacctcaccctgtggccttggcccagcacggggttcaaggaaggagtgggataactgggtggggatcagtcctgtgggtctggccacagggaaccagacccagcgagtggcgctggagcctcagcacctcatggtgtctacctgcttccatgccaacccaacaccgcccaacctgagaaacaacagggtcatcaatgagctctccttcaagccacctgtcacagagccctggtctgggaccagccacacctttgactccagctcctcccaacaccccatctccacgcagagcatcaccaacacagactcagaagacagtggagagaggtatcttttcccgcagaacccggcatctgcatttcctgtttccggtggcaccagcagttcagccccgccgaggagcactggtaacatccactacgcggccctggacttccagccgagcaagccatccataggctctgtcacgtccggcaagaaggtggactatgtccaggtggatctggagaagacccaggccctgcagaagaccatgcatgaacagatgtgcctgcggcagtcctcagagcctcccaggggcgccaagctgtga

SEQ ID NO: 29159 - DNA, 983 bp, Homo sapiens; identical to SEQ ID NO: 25230
  SIMILAR (516)..(385): 651254mologous to Escherichia coli EXTRAGENIC SUPPRESSOR PROTEIN SUHB,accession number D90883,Smith-Waterman Score=131.

SEQ ID NO: 29160 - DNA, 1713 bp, Homo sapiens; identical to SEQ ID NO: 6415
  SIMILAR (688)..(876): 661254mologous to Rattus norvegicus farnesoid X activated receptor,accession number U18374,Smith-Waterman Score=198.

SEQ ID NO: 29161 - DNA, 1860 bp, Homo sapiens
  SIMILAR (1)..(708): 971254mologous to Escherichia coli acetyl-CoA acetyltransferase (thiolase),accession number X97452,Smith-Waterman Score=1139.
atgccggaaacggcagagaatgtagctgaactgttaaaaatctcacgagaagatcaagatagttttgcgctacgcagtcagcaacgtacggcaaaagcgcaatcctcaggcattctggctgaggagattgttccggttgtgttgaaaaacaagaaaggtgttgtaacagaaatacaacatgatgagcatctgcgcccggaaacgacgctggaacagttacgtgggttaaaagcaccatttcgtgccaatggggtgattaccgcaggcaatgcttccggggtgaatgacggagccgctgcgttgattattgccagtgaacagatggcagcagcgcaaggactgacaccgcgggcgcgtatcgtagccatggcaaccgccggggtggaaccgcgcctgatggggcttggtccggtgcctgcaactcgccgggtgctggaacgcgcagggctgagtattcacgatatggacgtgattgaactgaacgaagcgttcgcggcccaggcgttgggtgtactacgcgaattggggctgcctgatgatgccccacatgttaaccccaacggaggcgctatcgccttaggccatccgttgggaatgagtggtgcccgcctggcactggctgccagccatgagctgcatcggcgtaacggtcgttacgcattgtgcaccatgtgcatcggtgtcgctatttgtttagctgacatgttacctgaccttacgatgttagagcgaatgatcgcagcggcaaacgcgggtgcacaggtctgtcttatttgcaatttggttgacgttgcacaagtatgctaccaacggctaaaggagctaaataacacgcaagtagatatagatttgtttcatgcgcgctttacgctgaacgatcgtcgtgaaaaagagaatcgagttattagcaatttcggcaaaaatgggaagcgaaatgttggacggatacttgtcgcaacccaggtcgtggaacaatcactcgacgttgattttgattggttaattactcagcattgtcctgcagatttgcttttccaacgattgggccgtttacatcgccatcatcgcaaatatcgtcccgctggttttgagattcctgttgccaccattttgctgcctgatggcgagggttacggacgacatgagcatatttatgcaacagtcatgtggcggacgcagcaacatattgaggagcttaatggagcatccttatttttccctgatgcttaccggcaatggctggatagcatttacgatgatgcggaaatggatgagccagaatgggtcggcaatggcatggataaatttgaaagcgccgagtgtgaaaaaaggttcaaggctcgcaaggtcctgcagtgggctgaagaatatagcttgcaggataacgatgaaaccattctttgcgtagcgcaggaaattggacgccactggcagcgtcgggcgctccagcctgtaccacctgatgagccactgtttatggcactacttttttccatgttgcgggttcccgatccattgcgggatgcgcatcagcgggacagacaattgcgtcagtctatcaaacgtctggtaaaccattttcgtgagctgggaaatgttcgtttttatgatgaacaggggttatgtgatcagctttatacccacctcgcccaggcgttaaatcgcagtttgtttgccatcggtatgataataccctgccggaagagttcgccagactgtaccccacgcctggtgcgcaccacccgcgcggcgctggccggatttgaaagtgaatacggcgtccatctttctgatgaggaaagtggtctggtcgcggtgattttcggagcccggcctaatgcaggaaaacgatctgcatga

SEQ ID NO: 29162 - DNA, 3192 bp, Homo sapiens
  SIMILAR (2083)..(2634): 1001254mologous to Escherichia coli acriflavine resistance protein,accession number M96848,Smith-Waterman Score=930.
atgctgatccctaccggaaccagcgtcggtctgaccagcgtcagccttggcgtgatccgtgcaatggaacgcaaaggcgttcgtctgagcgttttcaaacctatcgctcagccgcgtaccggtggcgatgcgcccgatcagactacgactatcgtgcgtgcgaactcttccaccacgacggccgctgaaccgctgaaaatgagctacgttgaaggtctgctttccagcaatcagaaagatgtgctgatggaagagatcgtcgcaaactaccacgctaacaccaaagacgctgaagtcgttctggttgaaggtctggtcccgacacgtaagcaccagtttgcccagtctctgaactacgaaatcgctaaaacgctgaatgcggaaatcgtcttcgttatgtctcagggcactgacaccccggaacagctgaaagagcgtatcgaactgacccgcaacagcttcggcggtgccaaaaacaccaacatcaccggcgttatcgttaacaaactgaacgcaccggttgatgaacagggtcgtactcgcccatcgcgcctgtcactggaccgtggtgatttgcttcttcctggtggcgctatgggacgcattttgcacccgttcttcggcattgcgattttcgtcgcactgatgtttatgtttgtgcgttttgtgcatcacaacatcccggataagaaagatattccgtggctgttgaacattgtcgaagtattgaaaggcaatgagcataaagtggcggatgtcggtaagtacaacgccgggcaaaagatgatgttctggtcgatcatgagcatgattttcgtgctgctggtgaccggggtgattatctggcgtccgtactttgcgcagtacttcccgatgcaggttgttcgctacagcctgctgatccacgcggctgcgggtatcatcctgatccacgccatcctgatccatatgtatatggcattttgggtgaaaggatcgattaaagggatgatcgaagggaagcattgtcctgcagatttgcttttccaacgattgggccgtttacatcgccatcatcgcaaatatcgtcccgctggttttgagattcctgttgccaccattttgctgcctgatggcgagggttacggacgacatgagcatatttatagcaacgttagagtcatgtggcggacgcagcaacatattgaggagcttaatggagcatccttatttttccctgatgcttaccggcaatggctggatagcatttacgatgatgcggaaatggatgagccagaatgggtcggcaatggcatggataaatttgaaagcgccgagtgtgaaaaaaggttcaaggctcgcaaggtcctgcagtgggctgaagaatatagcttgcaggataacgatgaaaccattcttgcggtaagtaatctggaaggtggtatttgcttcgaaattacccagatctggcgcatcagctgcgccgaccagccaggctttaaagttcagagtctgcttcgctttgcctttattagtggcagtatctttcacgattttctggtcaatacccatgccgcttttgtaagagttatcgagccgtacaacggtctgggcgatctgcaaaatcgtctgttgcgccatgtttcccccgcttttggcgaagatccgttacgcgtattgcgcgtggcgcgttttgctgcgcgttatgcccacctcggttttcgtattgccgatgaaactctggcgttgatgcgcgagatgacccatgcgggtgaactggaacacctgacgcctgaacgggtatggaaagagacggaaagcgccctcaccatccgcaatccacaggtgttcttccaggtactgcgcgattgcggcgcactgcgcgttttattcccggaaattgacgcactgtttggcgttccggcccctgccaagtggcatccggaaatcgatacgggtattcataccttaatgacgctctcaatggcggcgatgctgagtccgcaggtcgatgtccgtttcgcaactttatgccacgatctcggtaaagggctgacgccgccagaactctggccgcgtcatcatggtcatggcccggcgggtgttcaagcggatgccaaattccgtatgctgccagaagatgtcgataaactttatgtccgcagcgccaacggcgaaatggtgccattctcggcctttaccacttcacattgggtgtatggctctccgcgactggaacgctacaacggtctgccgtcaatggagattcagggggaagccgcgccaggaaccagttccggcgatgccatggcgttgatggaaaaccttgcgtcaaaattacctgcgggcattggttatgactggacgggtatgtcgtatcaggaacgcttatcgggaaaccaggctcccgctctggtagcaatttcctttgtggttgttttcctgtgccttgctgcactctatgaaagctggtcaattcctgtctcggttatgttggtagtgccgttagggattgtcggcgtgctgctggcggcgacactctttaatcaaaaaaatgacgtctactttatggtgggcttgctaacgacaattggcttgtcggccaaaaacgctattttgatcgttgagttcgctaaagatctcatggagaaagaggatgcgcagaaatatctcgccattgcagatgaactgttcggtgctgactgggcagatgcgcgtcactaccgctttggcgcttccagcctgctggcaagcctgctgaaagcgctgggtcacggcgacgaaattattcgtaaaaaacgtgatggtcatgcgctgagcgatgaagaaattcgtttctttatcaacggtattcgcgacaacactatctccgaagggcagattgccgccctcgcgatgaccattttcttccacgatatgacaatgcctgagcgtgtctcgctgaccatggcgatgcgagattcaggaaccgttctcgactggaaaagcctgcatctgaatggcccgattgttgataaacactccaccggtggcgtcggcgatgtgacttcgctgatgttggggccgatggtcgcagcctgcggcggctatattccgatgatctctggtcgcggcctcggtcatactggcggtacgctcgacaaactggaatccatccctggcttcgacattttcccggatgacaaccgtttccgcgaacttaaaccatcgtga

SEQ ID NO: 29163 - DNA, 1347 bp, Homo sapiens
  SIMILAR (487)..(1179): 981254mologous to Escherichia coli K12 putative PTS system enzyme I,accession number AE000218,Smith-Waterman Score=1168.
atggggcatttccggctcttttcttatccttacgctcggtaccagtcagcttttaaggaagaggcaccgggcagtgacgtcatcgtctgcgcggaaatggacgaacagtggggctatgtcggggctaaatcgcgccagcgctggctgttttacgcgtatgacagtctccggaagacggttgttgcgcacgtattcggtgaacgcactatggcgacgctggggcgtcttatgagcctgctgtcaccctttgacgtggtgatatggatgacggatggctggccgctgtatgaatcccgcctgaagggaaagctgcacgaccttgcgagccttgaaccttttttcacactcggcgctttcaaatttatccatgccattgccgacccattctggctcatccatttccgcatcatcgtaaatgctatccagccattgccggtgacggagcgtctctgtcccggaccgccccggtctgagaaggtggggagtgcgaaagggccagaagctgaagaggcactgatcgctttccgtcagctggctgaagataactttggtgaaacggaggaagtcgctccacctactctgcgtcccgttccgcctgtttcgggtaaagccttttattatcaaccagttttatgtacggtacaggcaaaatcaaccctgaccgtggaagaagaacaagatcgattacgccaggctattgacttcacgttattagatctgatgacgttaacagcgaaagcagaagccagcgggcttgacgatattgccgcaatcttttctggtcaccatacactgttagatgatccggaactgctggcggcggcaagcgaactccttcagcatgaacattgcacggcagaatatgcctggcagcaagttcttaaagaacttagccagcaataccagcaactggatgatgaatatctacaagctcgctatattgatgtggacgatcttctgcatcgcaccctggtccacctgacccaaacgaaagaagaactcccgcagtttaactcgccaactattctactggcggagaacatttatccttccacagtactgcaactggatccggcggttgtaaaaggtatctgccttagcgccggaagtccggtatcccacagcgccctaatcgcccgtgaactggggattggctggatttgccagcaggatagtcgccataaaggagtaaatattacacgtcattcaaaggtcaccaacatccgccaatatcagtgctggcagcaaacatttttgggtaaggcgcctactccggttcaggggcactctttcgtcgtatttacagcgcacgcatgtgccgaaaagagggcgaatgttgaatgctaa

SEQ ID NO: 29164 - DNA, 1233 bp, Homo sapiens; identical to SEQ ID NO: 25233
  SIMILAR (631)..(1047): 991254mologous to unidentified bacterium transposase,accession number Z78058,Smith-Waterman Score=732.
  misc_feature (1)...(1233): n = a,t,c or g

SEQ ID NO: 29165 - DNA, 1575 bp, Homo sapiens; identical to SEQ ID NO: 19187
  SIMILAR (793)..(1572): 991254mologous to Escherichia coli similar to ~start codon is not identified yet,accession number D90869,Smith-Waterman Score= 1348.

SEQ ID NO: 29166 - DNA, 3594 bp, Homo sapiens; identical to SEQ ID NO: 2758
  SIMILAR (160)..(636): 851254mologous to Mus musculus retinoid X receptor interacting protein No.6,accession number U09416,Smith-Waterman Score=711.

SEQ ID NO: 29167 - DNA, 846 bp, Homo sapiens
  SIMILAR (1)..(654): 921254mologous to unidentified bacterium transposase,accession number Z78058,Smith-Waterman Score=1032.
atgaattactctcacgataactggtcagcaattctggcccatattggtaagcccgaagaactggatacttcggcacgtaatgccggggctctaacccgccgccgcgaaattcgtgatgctgcaactctgctacgtctggggctggcttacggccccggggggatgtcattacgtgaagtcactgcatgggctcagctccatgacgttgcaacattatctgacgtggctctcctgaagcggctgcggaatgccgccgactggtttggcatacttgccgcacaaacacttgctgtacgcgccgcagttacgggttgtacaagcggaaagagattgcgtcttgtcgatggaacagcaatcagtgcgcccgggggggcagcgctgaatggcgactacatatgggatatgatcctcatacctttcactgattttgagctaaccgacagcagagacgctgaacggctggaccgatttgcgcaaacggcagacgagatacgcattgctgaccggggattcggttcgcgtcccgaatgtatccgctcacttgcttttggagaagctgattatatcgtccgggttcactggcgaggattgcgctggttaactgcagaaggaatgcgctttgacatgatgggttttctgcgcgggctggattgcgaagtgccggatccgaaaagaagaactaactcgttgtggagaataacaaaaatggtcatctggagcttacaggtggccattcgtgggacagtatccctgacagcctacaaaacgcaattgaagaacgcgaggcatcgtcttaacgaggcaccgaggcgtcgcattcttcagatggttcaacccttaagttag

SEQ ID NO: 29168 - DNA, 3205 bp, Homo sapiens
  SIMILAR (923)..(1540): 851254mologous to unidentified bacterium transposase,accession number Z78058,Smith-Waterman Score=907.
tcccggacatccctgggatggggaacatcctgcggatgcccaacagaacacggtggacaacaccaccaaatgttccgggtgtcggacattccagggctggacagcgctctctgatatgctgcctggtcaggggctgctgcacgtcgtgcccattcctgaagctatggcgtacgtactgttacgtccgctgcttgatgatgtgccggaggatgaactgtgcggcgtagcgcccggaagagtattgccggtatcagagcaatggcatccactgttgattgaggcgttaaccagcattccaaaactcgaagccggagactccgtctggtggcactgcgacgtcatccattccgttgcccccgttgaaaatcaacaaggttggggcaacgtgatgtacattcctgcggcaccgatgtgcgagaaaaatcttggcttcacgcccaaggggaaggccgcactggaaaaaggcgcatcgccgggcgacttcccgcgcgaggactatgaaacaaactgggaaggacgctttacgcttgccgacctcaacattcacggtcagccagctcccgagtggatgtggggttgggagcggctcttatcagaccaggataaaactcagggaagcgccttcagctgcaccgcaacattccaggacgctcagaagcaattattacaggcgaggttcattcacctctcaggcctgtgggaacaacaggacgggctgtggctttcgaactggctgtcgctgaaaggccagatcggaggacctgctctgactgaaccacttcgcctttcagtgaacagagggacttggccaccgaagctccgagacgcccggaggcgcagcgctggacgcgctgacaggcgagcgcccacgcctgagggctccaggagccccccgctctctgaggccccgaagctgagctccgaagaactggatacttgcattgaggaagcagcaaacaaaggcatggaagaaactacaacaacagaaggagcaggatctactgcagagaggagctgcacttacggccccgtggggatgtcattacgtgaagtcactgcatgggctcagctccatgacgttgcaacattatctgacgtggctctcctgaagcggctgcggaatgccgccgactggtttggcatacttgccgcacaaacacttgctgtacgcgccgcagttacgggttgtacaagcggaaagagattgcgtcttgtcgatggaacagcaatcagtgcgcccggtggcggcagcgctgaatggcgactacatatgggatatgatcctcatacctgtcagttcactgattttgagctaaccgacagcagagacgctgaacggctggaccgatttgcgcaaacggcagacgagatacgcattgctgaccggggattcggttcgcgtcccgaatgtatccgctcacttgcttttggagaagctgaatatatcgtccgggttcactggcgaggattgcgctgggttactgcagaaggaatgcgctttgacatgatgggttttctgcgcgggctggattgcgaaaaagtaaaccttggtctggataataatacctggggcggtggtttttccaaatattgtctggttcctggtgaaattctcaaaattcatcgtcatgcgttgtgggaaatccctgatggtgttgattatgaggacgcagccgtacttgaccctatctgtaatgcctacaaatccatcgcgcagcaatcgaaattccttcctggtcaggatgtggtcgtcatcggcactggcccactcgggctgttctccgtacaaatggcgcgaattatgggggcggtaaatatcgtcgtcgttggtctgcaagaagatgtggcggtccgcttcccggttgcaaaagaactgggtgcgacggcagtagtaaatggttctaccgaagatgtggtggcgcgctgccagcaaatttgtggcaaagacaatctgggactggtgattgaatgctccggtgccaatatcgcactgaaacaagccatcgaaatgctccgcccgaacggggaagtgatggcgggcgcgatcggcgtcacgcttggcttcctgctggtgcaaattatcaacaccattctgagttacttcgtgatgattaaaccggttcttggttccagttatcgccagtacatcctgagtttatggctgccgttttatctctcgctgccgacgctggtggtcagttatgcgctgggcattgtgctgaaagggcaactggcgctggggatgctgctggcggtgcaaatagccacgggggtgctggcgtttgtggtgatgattgtgctgtcgcgccatccgctggtggtggaagtgaagcgtcagttttgtcgcagcgaaaaaatgaaaatgcttttacgggcgggcaccagacggcgtgggctctactctctctcggaaatggatgacccacaatgggtcggcaatggcatggataaatttgaaagcgccgagtgtgaaaaaaggttcaaggctcgcaaggtcctgcagtgggctgaagaatatagcttgcaggataacgatgaaaccattcttgcggtaacgagggatggggaaatgagcctgccattattgccttatgtacaaacgtcttcaggtaaacaactgctcgatggccaggtctacgaggacctaagtcatgaacagcagtatgaggcgcttgcacttaatcgcgtcaatgtacccttcacctggaaacgtagtttttctgaagtagtagatgaagatgggttactttggctggaagggaaacagaatctggatggatgggtctggcagggccgtgaccgtgaaaccggcgaagtgaaatttacggccagccgtgcggatctggtgtttggttctaactccgtcctgcgtgcggtggcggaagtttacgccagtagcgatgcccacgagaagtttgttaaagacttcgtggcggcatgggtgaaagtgaactcggcgctggtgtcgatcaatccgcaaaacggtgccgttatggcgctggtcggtggctttgatttcaatcagagcaagtttaaccgcgccacccaggcactgcgtcagcaccctatagctgtttccactccctctggccttctcacagttgcacttgctggtcacttgcactacaccgtgaactcctcaagggcatggactcttcctgtggaacactgtgttcccagtgcccagtgcctggcacacgaataa

SEQ ID NO: 29169 - DNA, 634 bp, Homo sapiens
  SIMILAR (1)..(465): 921254mologous to Escherichia coli K12 bacteriophage lambda lysozyme homolog,accession number AE000161,Smith-Waterman Score= 752.
atgcctccatcattacgaaaagccgttgctgctgctattggtggcggagcaattgctatagcatcagtgttaatcactggcccaagtggtaacgatggtctggaaggtgtcagctacataccatacaaagatattgttggtgtatggactgtatgtcacggacacaccggaaaagacatcatgctcggtaaaacgtataccaaagcagaatgcaaagcactcttgaataaagaccttgccactgtcgccagacaaattaacccgtatatcaaagtcgatataccggaaacaacgcgcggcgctctttactcattcgtttacaacgtgggtgctggcaattttagaacatcgacgcttcttcgcaaaataaaccaggtcgatatcaaaggcgcatgtgatcagctgcgtcgctggacatacgctggcggccgcaccacaaccgcattacttcacgcgagagacgtattcaccagagcgggtatccactttgatgacttcgccgatttgtacaaacagcggaactttaaccacagcgccagtagacagggtagccggtttgccaccagtacctgcggtatcacctttcaggcccggatcggtatcaacgatttccagttcaacgaagttcggcgga

SEQ ID NO: 29170 - DNA, 1428 bp, Homo sapiens; identical to SEQ ID NO: 24995
  SIMILAR (505)..(1386): 941254mologous to Escherichia coli protein AraJ precursor,accession number U73857,Smith-Waterman Score=1397.

SEQ ID NO: 29171 - DNA, 2610 bp, Homo sapiens
  SIMILAR (2178)..(1045): 391254mologous to Escherichia coli O157:H7 minor tail protein precursor H,accession number AP000400,Smith-Waterman Score=690.
tcattgatttttcctctgtagtgaagcaaccgcgcatccgccaaaatccagttcattgtttgcgccgaatctcaggcggcaggccgttaccgttcccgggcaaaaatccagcgaaggatcgtctaccggattattgtctttgtcaaaataaccattttgcccgttgtatccgcagcctttccctgttttataccaccccctttgcgcccaatagcatacgctttgtgtgagtcgagacgggatcatgatgccgtccatatcgtaaggtgatgtgagatcgaaccgcgcaacgcttttatcaacatagttcggacgctcgatatagtataccagtttacggtaagctccatcagcgattgagccatcggagttaataagctcacgctgagttatccagatagtcaccttagcttgcattagtccgttatatgcacgaatcatcgcagatactcgactatcaatgtttgccaccgttaattgtggttttgttgcctttccggaactgtcaaacgagatcccggatataccgaacggtcgcgccccgtatttctcgccacggaatgtaatttccttcggcggtagcgttccagtttgctgggcctgcatgatttcttctggagtgtactggatattctcaccgtggaatcggtacacctgagcgccgaacttactaccatcaacttcgatgagagtgattatctctcccggatatagtgattgaaggcagttgtgaaacaggctctttccgctttcttcatcataaagttttttgttttcgctcattgatttttcctcttgtttaccgtccggcggcgtccatgcgaacggcttaatgcggtgagagtcacagaagtcgtaaacagcaatgaaatcttccccggcatagacaactgaatactcgcgtcgagtggtgttaaatccagacgatgcaagctgcatgtagcccgtaccaaactggattgagcggtcattgttggtagtggtaagggagccgccgcccccttgaacctccattccactaacgtcaacgaccgttccacctcctgaatggtttaccacctttggagccgagtttgatgcgttgaatccagatgttgccacgctacccgctccagagttgatgtaatcagtggttattttagccagttccgcttgtcgttccatttcgcgcgtgctaagaccgcgtgacgcgttaagctgttccgtcgccgccgtcatctcattgacaaacttcagtgacttgtcggtaagtgcgttcaattgctgttgcttaacaatctgatctccaatctcagccttctgtttggcaagctcgataactttctcctgacttgccagtaatgctttttcttccgcagataattgacgttttgaactagcctcgcgaagaaccgcgatcgtagcctcggtagtaaacaacgcctttctctgtgcggaaagtttttgcccgatctccttgtgctcctgcaataccttaagttgagccttgagtgaaattaactccttgtcgaattgctctgtcggtgagcgtacaattttcgactgcttatttcgttctcggtttcgcttctcgatctcttctgcttctttccttattgcttccttagtttcctcgctgtactgcttttcaagagtgcgacgctgcttcatcgcttcaacgtatcccatctcgcctttttctacgcgagcgttaatagcatcaagctctgaagccaactgatcgtagttgtcgcgagaactttttacaatattctcctgctccttcagtacatcagcgccgaagtcactcattccaggcagtgactgagttgcctttatggctgaggcgataaagtttgagatgtactcatcacccttcgcaagaatcattttaacttgaatcactgtgccctgaacaacgtcgataatcaggtttagcgccccaagtgtatgatcaccaacccatccccacgcgtccgaagcccattgtttaatatcgctccacattttttccaggggtgtggagttatccgcgatcgacttcattcgcttttccattacgtcggcgaataatttcgttgcttcagatactgcttcgggttcacccttcgtgcggcttaacgtgtcgatataggtcagtttacctttttcaaggaagttatattgttcggttaagatctccagacctgtgaccggatccgtttgcgagttttgtccaacgtcagcaatggatttggggttggtgaatgtgccaggtgggttggcaagcaacttcttggggtcgggcgttaattgatggttgcctgaatcgagcggcctggggtggtaacttagctgggaaacttcggcgaaattgcggtgtaaacaaagctgcggcgaaaaacattccccaatgggggtggaagagttgcgttggcttgggtgcgagagttgttgtgtggaggacctgcgaatccagaagagcgtgcagagctcggtaatgaggcaggcagttaaagcctgcagagtcgccgaaaaaaaagggcggattccggagaagaagccaagtataattgggcgtcgagtgtaggggcgtaaaacgagggattgttgccaacgtgtagcttcattgatccttgtgtggcgggccat

SEQ ID NO: 29172 - DNA, 1206 bp, Homo sapiens
  SIMILAR (829)..(1203): 1001254mologous to Rattus norvegicus Kalirin-12a,accession number AF232669,Smith-Waterman Score=677.
atggcgtggcacaaagagcacggcgtagaattacgcgatcgacgattgaattttgaatggtggaaacctgagtatggaattaatctctatcaggattattacaagcaagatggcttcgttgagattccagatcagaataatccgtcattaggtgatatggtaatcatgcagatagggcaaaacgttccggtatggaaccacgcagggatttacctcggtgataatcagatcttgcatcacgccttcggatctcaaactatgaatgatgtaaaattaatcaaactatccggttcgcttgggagacgcttcggcgtctttcacagattcgctgttgactcttacccggaagctatccgggcgctatccagtcagaacgcagctaatgcagaggcagcaattgagaacgcactagctaatgacaaagacgcgatctacatgaagaaggagaacggaaaacgaaaagcagagtacaccaaatcactgaagctaattgctgatgagactgaggcgcgagtaacagcagttgagcagttaagggcaagttttggtgatcagattagcgcaagcaatagcgaattgcgtgaagttatcgcaactgaaaccggagcgctatcgcgtgaaattgaccaactcaaggcagagattggtgatgatattcaggcaagtttgactgatatcagagaggctatagcaaacgagactgaggcgagaacgcaagctgacttgtcattaagcgcgaggcttgggaataatgaggcagcactttctcaaaaacttgattcgtggagcaatgcggattcgactggtgcaatgtacggcgtcaagctggacatctggagcatcggggttctgacatatgtcatgctgagtggggtctcccccttcttggatgagagcaaagaggagacatgtatcaacgtatgcagggtggatttcagcttcccccatgaatacttctgtggtgtgagcaatgctgccagagatttcatcaatgtgatcttacaggaagattttcggaggcggcccacagcagccacatgcttgcagcatccatggctgcagccccataatggcagctactctaagatccccctggacacctcccgcctagcatgcttcatagaacgtcgcaagcaccagaatgatgtgcggcctattcccaatgtcaagagctacattgtcaaccgggtgaaccaagggacgtag

SEQ ID NO: 29173 - DNA, 1109 bp, Homo sapiens
  SIMILAR (720)..(13): 471254mologous to Bacteriophage N15 gp18,accession number AF064539,Smith-Waterman Score=523.
tcattgatttttcctctgtagtgaagcaaccgcgcatccgccaaaatccagttcattgtttgcgccgaatctcaggcggcaggccgttaccgttcccgggcaaaaatccagcgaaggatcgtctaccggattattgtctttgtcaaaataaccattttgcccgttgtatccgcagcctttccctgttttataccaccccctttgcgcccaatagcatacgctttgtgtgagtcgagacgggatcatgatgccgtccatatcgtaaggtgatgtgagatcgaaccgcgcaacgcttttatcaacatagttcggacgctcgatatagtataccagtttacggtaagctccatcagcgattgagccatcggagttaataagctcacgctgagttatccagatagtcaccttagcttgcattagtccgttatatgcacgaatcatcgcagatactcgactatcaatgtttgccaccgttaattgtggttttgttgcctttccggaactgtcaaacgagatcccggatataccgaacggtcgcgccccgtatttctcgccacggaatgtaatttccttcggcggtagcgttccagtttgctgggcctgcatgatttcttctggagtgtactggatattctcaccgtggaatcggtacacctgagcgccgaacttactaccatcaacttcgatgagagtgattatctctcccggatatagtgattgaaggcagttgtgaaacaggctctttccgctttcttcatcataaagttttttgttttcgctcattgatttttcctcttgtttaccgtccggcggcgtccatgcgaacggcttaatgcggtgagagtcacagaagtcgtaaacagcaatgaaatcttccccggcatagacaactgaatactcgcgtcgagtggtgttaaatccagacgatgcaagctgcatgtagcccgtaccaaactggattgagcggtcattgttggtagtggtaagggagccgccgcccccttgaacctccattccactaacgtcaacgaccgttccacctcctgaatggtttaccacctttggagccgagtttgatgcgttgaatccagatgttgccacgctacccg

SEQ ID NO: 29174 - DNA, 1632 bp, Homo sapiens
  SIMILAR (46)..(657): 991254mologous to Homo sapiens NAG13,accession number AF194537,Smith-Waterman Score=1045.
atgccgcagaaatacagggtaccatcagagaatactgcgaacagcctctacgcaaataaactagaaaatctagaagaaatggatacattcctcgacacatacactctcccaagactaaaccaggaagaagttgaatctctgaatagaccaataacaggctctgaaattgtggcaataatcaatagtttaccaaccaaaaagagtccaggaccagatggattcacagccgaattctaccagaggtacaaggaggaactggtaccattccttctgaaactattccaatcaatagaaaaagagggaatcctccctaactcattttatgaggccagcatcattctgataccaaagccgggcagagacacaaccaaaaaagagaattttagaccaatatccttgatgaacattgatgcaaaaatcctcaataaaatactggcaaaccgaatccagcagcacatcaaaaagcttatccaccatgatcaagtgggcttcatccctgggatgcaaggctggttcaatatatgcaaatcaataaatgtaatccagcatataaacagagccaaagacaaaaaccacatgattatctcaatagatgcagaaaaagcctttgacaaaattcaacaacccttcatgctaaaaactctcaataaattagggaatcatcaatgtaagaaaaaacagacacacggggagccccggacaccgcggaaagcccggaacccgggaagacgagcacggcgtagattacgcgatcgacgattgaattttgaatggtggaaacctgagtatggaattaatctctatcaggattattacaagcaagatggcttcgttgagattccagatcagaataatccgtcattaggtgatatggtaatcatgcagatagggcaaaacgttccggtatggaaccacgcagggatttacctcggtgataatcagatcttgcatcacgccttcggatctcaaactatgaatgatgtaaaattaatcaaactatccggttcgcttgggagacgcttcggcgtctttcacagattcgctgttgactcttacccggaagctatccgggcgctatccagtcaggtagatggatttaaagaatacatgcaaagcgagataggatctcgtagcaagtttgcaatatttgtggatggcgttaacgtgggacaccatgaagaggaaaaattcaagtgcgcgaaagagataagaatcgtaccgatccctactggctctaagacaggaggtctattccaggttgtattgggcgcggcaataatggttgcagcattctatactggcggcgcgtctctagctttaatgggaacaatgtcctcgtctctgtttatgatgggcggcgctatggtgctgggcggcgtgatgcagatgatttcaccgcagcccgggtggcgcaactttgaagttcaatcaagcaagaataaaccttcgtacgcgttcggcggtgctgtcaatacgaccggcggcgggataccctctcccggtcccgtatggatatcgcgccggaggtggcgcaactttctcagcaggttcttatgccgaggatatgagttaaaattaacccgccttgcgcgggttttttttcgcctgtataatgagtccaccgataaatag

SEQ ID NO: 29175 - DNA, 8046 bp, Homo sapiens
  SIMILAR (3259)..(4785): 361254mologous to Escherichia coli O157:H7 minor tail protein precursor H,accession number AP000400,Smith-Waterman Score=853.
atgaatcaagaaactttaattgcagttattgagcaaatgcgaaagctggttcctgcacttcgcaaggttccagacgaaacgctttattcgtgggtagaaatggctgagctatttgtatgccagaagacctttaaagatgcatacgtcaaggcgcttgctctttatgcattgcaccttgctttccttgatggggcgctaaaaggtgaagatgaggatcttgaatcgtactcacgacgcgttacgtcattctccctgagcggtgaatttagccagactttcggagaggtgacgaagaaccagtcaggaaacatgatgctttcgacgccgtggggcgcgacgacgtggtcgattcgcattaatgacaggacaccgtggaggatgccactaatgaactactcacagattgaaaggatggctcgcaaaggcgtggctttcttcaccgatccgtcaagacctatgaacctgataaaacaaggtgaatacggatatgatgaaaacggattcgagatcccaccaatggaaaaggttattccaatatccggcgcgacgcgaagaccgaacgcgcgtgagattgacggggaaactatccgcgcctcagatattttggggatcttcaataatgatcatgaaataaacgaaggtgactatatagagattgatggcgttcgtcatgttgtcgttgacgcccgtccggttcaggcgtcattagagcctgtcgcctatcgtccgattcgtagatttcaaggtgagattgatgcttggattaaggccgctgaaagcacgctagagcacgctatagagatattcgtaagggatgttcacgacgctcttgttagccgctcccctgttgatacaggtcgattcaagggtaactggcagataacttttaacgaaatccctaaccacgcattaaaccgatacgataaaactggcggtgtcgtcagaggcttagatcatatatggctgacgcaatcaagcaggcaaggagacagcaaaatgcactatgagttatcagcggcggcgcgagccgcttttctatcaaagtacagagactttcctcactacatggaaaacagaaatttcacaccgccgaaggatggcgggatgtggctgaggttcaactacattgaaggggatacgctttatctatccattgacagaaagtgtaaatcttacatcgcaatcgttcagatcggcgtagtgttccctccaggctccggcgttgacgaagcaagattgaaagcaaaagagattgctgattttttcaaagatggtaaaatgcttaacgttggttatattttcgagggtgcaatcgtgcatcaaattgttaaacatgaaagcggtacgagtagacacaaaggagacttaattatgcacttaccaaatggcgcacaaattttcgtggaaacctctcgtggggtggaggttgaggcaaccgctatcactaacgcagataatcctgttgctacagttgcatctaagggagacttggcgaaaggtgattacgttattgtaactcagtcaacttgggcaaagatggttagtcgagtgctaattgttactgacgctcaggaaacaagcatcactcttgctggaattgacacctctgatacccttgttttcccggctggcggtacgatgagcttctcaaaaattactggatggactgagatcccttgcgtacaggagattggtcaggacggcggtgagcagcagtattacacttatcagtgtttgtccgacgataaagagcagcagatcccaacgtttaaatctgcggtctcgctaacgtacactttcgcgcacgaatttgataacccgatctaccctattctgcgtaagctggattcttctggtcaggtaacagcggttcgaatgtacgtgccgaaagcgagcgaaatgcgtatgtgggctggcattttgtcgtttaacgacatcccatccactcaggttaacgaaatggaaacggtggaactatccgtatccctgaaagacttcaaacttccggtgacgttcaccatgccaaacggcgaggatgcgactattatttttacagtgcgccacctttccagtaaagaagtgcaagatatgtatgcgaagcagggcgaaatgaatgatagcgatttcatcactaagatcgcgtcaggctggaatctggaagaagaatttaacgaagagaatgcgcgtaaactggtacagtattacccttccgcagcgtacaatctgacagccacttatattaaggcgctcgccggacaccgcgcaaaaactaaaaaaggcggaaaccgccgacagaagagcagttgcgatcgggtgggtctaagtctttctgactatggaagacgaggaaaccggaacgataaatcggcgatgctgaaaatggtgaaagcgtggaatgtttttacgtcaatgctcactcagtggagaagttcaggcgctgaagcttatggtcttgactataatgtcttgcggggttatatggttgataaggtagcaggtctgtcgcttgacgttgatgtgtcaacagtgcagcgcgccgtcaagtcgctgaaagagttttcaaaggccaacgaccaggccgctgattctatgggttctttaatcaatgagtcagaggttgcaaaacagaaggccaaagaacacgctgaacaactcaagcgccagagaaaagagtatgaggccgtggagaaggcaatcgatcctacagtatcaaaaatggaaaggttgaagattgcatctcagcaacttgataaactctggcagcagggagtcgttccagatgagacatttttccgtttgggtgaaatgctggatctgcaaaacgcaaaacttgctcgcagccgggctatgcttacggaagaaggtcaggcggcattgcaggaagcgaaagcaaaagagcaggcggcagcacgaagcaaggcgttcatggatgccctgaatggtcaagttaacgcgatcggcaagactcatgctgaattgatggaactgaaagcggctgagcttggtttatcgaaagaagcagcaccactaatcgcaaaacttaaagatcaaggccgggctatgaatgcagcaggtattagcgccggggaatacagacaggcaatgagaatgcttcctgcgcagatcacagatgtcgttacatctcttgcatccggtatgccagtatggatggttgctatccagcagggcggtcagattaaggattcgttcggcgggatcggtaacacgtttaaagtgttgctgagttatattaatccggtcacggcaggtgttggcgttcttgttggttcgttaggtcttctggcgaaagctggttatgactcttacaagtcaataactgatattcagaatgcgcttattgagactggaggttatgcaggtgttacggctgaagatcttgattcagtgtctaaaaagatcgcgcagacaagcaactcaaccattgggagtattcgcgagattgtaacggagttggcgagttctggtaagtacacccgcgagcagatccagaacatcactaaggcgacggcagagtggtcggcagcaactggaaaatcagcaagccaaatcattgctgagttcgacaaaatcgcaagcgatccggtcaaaggtctggagaagttaaacgaacaatataacttccttgaaaaaggtcaactgacctatatcgacacgttaagccggacgaagggtgaaaccgaagcagtatctgaagcaacgaaattattcgccgacgtaatggaaaagcgaatgaagtcgatcgcggataactccacacccctggaaaaaatgtggagcgatattaaacaatgggcttcggacgcgtggggatgggttggtgatcatacacttggggcgctaaacctgattatcgacgttgttcagggcacagtgattcaagttaaaatgattcttgcgaagggtgatgagtacatctcaaactttatcgcctcagccataaaggcaactcagtcactgcctggaatgagtgacttcggcgctgatgtactgaaggagcaggagaatattgtaaaaagttctcgcgacaactacgatcagttggcttcagagcttgatgctattaacgctcgcgtagaaaaaggcgagatgggatacgttgaagcgatgaagcagcgtcgcactcttgaaaagcagtacagcgaggaaactaaggaagcaataaggaaagaagcagaagagatcgagaagcgaaaccgagaacgaaataagcagtcgaaaattgtacgctcaccgacagagcaattcgacaaggagttaatttcactcaaggctcaacttaaggtattgcaggagcacaaggagatcgggcaaaaactttccgcacagagaaaggcgttgtttactaccgaggctacgatcgcggttcttcgcgaggctagttcaaaacgtcaattatctgcggaagaaaaagcattactggcaagtcaggagaaagttatcgagcttgccaaacagaaggctgagattggagatcagattgttaagcaacagcaattgaacgcacttaccgacaagtcactgaagtttgtcaatgagatgacggcggcgacggaacagcttaacgcgtcacgcggtcttagcacgcgcgaaatggaacgacaagcggaactggctaaaataaccactgattacatcaactctggaggtagtgagggagacgaaaaactccagaacatgattaaggcgcaaaatgattactacgctgcggaagatgccaaacgcgctgactggttggctggcgctgaaagcgcattcgctgattacgagggtggtaatttcaaagagctatacaagaaaaaattcggcactgtactagcgaaaaaccgcgcgatgacgccagaacaactattcgatctgtcggtgaagtatttcgaatgggccgaggacaacgcgataaaggcgtcagaatcagccagctttcagggtggcgtttatgaatcgcttgttcataagccgcgcgtcttcacctggaccggataccgactatttatcggtgcaagcgaggccgcaatcattaagtggaagcgtgaggaagaatacagtgaggttatggagttcgtggaatccgtaatcaacgagcaaaaatttcagcttgccgcaaacggcgttattaacgcctcatttatcggcaaggatctcggaatcgacaagccagcttcaataaacatcgaaaactcggcagcttcagcgtcgaccgctgtcgccactactgaggaagcaatgaaagaggctaagttggcgatcaagaaaatgagcgaggccaatttcgaaaaaatgattcggatctggtttcagcttatgcaggctcagcagttccagcctaactggcatcacctttacctatgtcacgaagtggaggaaattattgcaggccgacgcggtaacactatctttaacgtcacgccaggctccggtaaaactgaagtgttctcaattcaccttccggtgtacgcaatgctcaagtgtaaaaaggtgcgaaaccttaacgtatcgtttgccgacagcttagttaagcgcaacagtaagcgcgtccgtgagattatcagcagcaacgaatttcaagagctatggccctgcaaatttggcacatcgaaagacgaagagatgcaggttcttaacgaagacggaaaggtttggtttgagctaatctccgcagcggctggtggtcgtattactggttcgcgtggtggctacatgactccgggattctccggcatggtaatgctcgacgatatcgacaagcctgatgatatgttctcaaaggttaagcgtgagcgtacgcacatgctattgaaaaacaccattcgatcccgtcgtatgcataacgagacgcctattattgcaattcagcaacgactacatgctcaggattcaacatggttcatgatgaatggcggcatgggtatcgagttcgaccaaatatcaatcccggcgcttgttactgaagaatacggaaagacgcttcctgactggttgcagccttactttgagcgagacgttttgtcgtctgagtatgttgaattggacggtgttaagcattattccttttggcccagcaaggaaagtgtgcacgacctgctagctttacgagaagcagatcagtatacctttgattctcagtatcagcagaagccgatcgcgctgggtggctccgtgtttaactcagagtggtggacttattacggcaacagccttgacgctgatgagccagatcctggtaaatatgattaccgattcatcactgccgataccgctcagaagacaggcgagctaaacgactacacggtattttgtttgtggggcaagaacaatgataaggtttactttatcgacggcattcgcggtaagtgggaagcgccggatatggagaggcaatttacagctttcgtcaatcaggcatggaggcacaataaatcaatgggggtacttcgtaaaatctatgtggaagataaggcgagcggtacgggcttaatccagaacctaaggaaaaagactccgatatccatcactccattgcagcgtaacaaagataaagttacccgagctatggatgctcagccagttattaaagccgggcgtgtggttctgccagaagagcaccctatgcttgctgaaattatcgctgagcacagcgcctttacttacgatgacacccatacgcatgatgatatcatcgataacttcatggatgcggcgaacatagaattgctgaccattgatgatcctatcgagagaatgaagcgactcgtcgggatggctaagcggtcattaatgagatataatcatggctgtcaattgaccgccctttttattggaggaaacatgaaaattgttaagcctgatggatataacgatatttttaacggcggtgcagaccgatcgcctaagccatcctttagtctgaagcatcatatcacgtcggatctttctacaacgacaacgcaaccgcggagcgaattgtggatgttattcccgaagagatgccacacaggagatggggctacaacgctaccaagcgctcacgatacgtgcatgtgcaatgagatggaagtgacttggattattgttagcgtaccggaaggagatatgcgatttgtgaagccggagaaattacttctgattggtcgtccgtggtcattaggatcattcgactgttacggtcttgttatggcgtggcacaaagagcacggcgtagaattacgcgatcgacgattgaattttgaatggtggaaacctgagtatggaattaatctctatcaggattattacaagcaagatggcttcgttgagattccagatcagaataatccgtcattaggtgatatggtaatcatgcagatagggcaaaacgttccggtatggaaccacgcagggatttacctcggtgataatcagatcttgcatcacgccttcggatctcaaactatgaatgatgtaaaattaatcaaactatccggttcgcttgggagacgcttcggcgtctttcacagattcgctgttgactcttacccggaagctatccgggcgctatccagtcaggtagatggatttaaagaatacatgcaaagcgagataggatctcgtagcaagtttgcaatatttgtggatggcgttaacgtgggacaccatgaagaggaaaaattcaagtgcgcgaaagagataagaatcgtaccgatccctactggctctaagacaggaggtctattccaggttgtattgggcgcggcaataatggttgcagcattctatactggcggcgcgtctctagctttaatgggaacaatgtcctcgtctctgtttatgatgggcggcgctatggtgctgggcggcgtgatgcagatgatttcaccgcagccgggtggcgcaaactttgaagttcaatcaagcaagaataaaccttcgtacgcgttcggcggtgctgtcaatacgacggcggcgggataccctctcccggtcccgtatggatatcgcgccggaggtggcgcaactttctcagcaggttcttatgccgaggatatgagttaa

SEQ ID NO: 29176 - DNA, 879 bp, Homo sapiens
  SIMILAR (463)..(858): 541254mologous to Danio rerio winged-helix nude transcription factor,accession number AF198446,Smith-Waterman Score=340.
atggcagaaggcaaggaggagcaagtcacatcttacatggatggcagcaagcaaagggagagcttgtgcagggaaaatcaaccttataaaaccatcagatctcatgagacttattctcaccgtctgcccgaccattacccctttcggcctgccggtggagccagagcgcaagggattgtccagatgattggcatttttatcgacaccctggtcatctgtacggcaagcgccatgctgatattactggcgggtaacggcacaacctacatgccgctggaaggtattcagcttatccagaaggcgatgcgggattattacaagcaagatggtttcgttgagattccagatcagaataatccgtcattaggtgatatggtaatcatgcagatagggcaaaacgttccggtatggacccacgcagggatttacctcggtgataatcagatcttgcatcacgccttcgaggagttggacaagctgatctccgaccggcctgaaagctgccggcgccccggcaaaccgggggaaccagaggcccccgtgctgactcacgccaccacagtggccgtggcgcatggctgcctggctgtctcccagctcccaccccagccactgatgaccctgtccctgcagtcagtccccctgcaccaccaggtccagccccaggcacatcttgctccagactctccagcaccagcccagaccccgccactgcacgccctgccggacctcagccccagcccgctcccccaccccgccatgggaagggctcctgtagacttcatcaacatcagcaccgacatgaacactgaggtggatgccctcgacccgagcatcatggacttcgctctgcagggtgaggctggaggaatggagtga

SEQ ID NO: 29177 - DNA, 3429 bp, Homo sapiens
  SIMILAR (3429)..(2077): 321254mologous to Escherichia coli O157:H7 minor tail protein precursor H,accession number AP000400,Smith-Waterman Score=695.
ctaacacattagagtacttccatttgctccaccggtaattgtcacagttgtgtcgtctcctctagctgtacttgttacactgccaaaagtgacgtcaggaatcctcaggcgaccactcgcatccctaacagatattgtggtattagtttgcttcattgcaccctcaacgtcacttccgtagttttctaatgttccacccttgtcaagcctccatccggactggttaaatacatagttattcgactgaatcgcgttaccaatcattgcgttagtaataaatccatcctttatgatcgcgctacttagaataacttggccattctcaacaacgaatgggtactgagtctgaccattcatccctgtcattattgcaaatcgtgatgcctcaaacaaaatctgcgccttaactgctgcgcctgaaccaatcagagacatagccataccggcactgtattcttggccgttatacttcagacccagcttgacgccgtacattgcaccagtcgaatccgcattgctccacgaatcaagtttttgagaaagtgctgcctcattattcccaagcctcgcgcttaatgacaagtcagcttgcgttctcgcctcagtctcgtttgctatagcctctctgatatcagtcaaacttgcctgaatatcatcaccaatctctgccttgagttggtcaatttcacgcgatagcgctccggtttcagttgcgataacttcacgcaattcgctattgcttgcgctaatctgatcaccaaaacttgcccttaactgctcaactgctgttactcgcgcctcagtctcatcagcaattagcttcagtgatttggtgtactctgcttttcgttttccgttctccttcttcatgtagatcgcgtctttgtcattagctagtgcgttctcaattgctgcctctgcattagctgcgttctgcgacgcgttgtcggttgcgttatcaacaagccactcgtaacccggcgagttttcgatatcgacagaaatctccccgatgatatcgtcaacgtttgttgatgccatgcctctgacaaaatcagtccagctttgtgtgagtcgagacgggatcatgatgccgtccatatcgtaaggtgatgtgagatcgaaccgcgcaacgcttttatcaacatagttcggacgctcgatatagtataccagtttacggtaagctccatcagcgattgagccatcggagttaataagctcacgctgagttatccagatagtcaccttagcttgcattagtccgttatatgcacgaatcatcgcagatactcgactatcaatgtttgccaccgttaattgtggttttgttgcctttccggaactgtcaaacgagatcccggatataccgaacggtcgcgccccgtatttctcgccacggaatgtaatttccttcggcggtagcgttccagtttgctgggcctgcatgatttcttctggagtgtactggatattctcaccgtggaatcggtacacctgagcgccgaacttactaccatcaacttcgatgagagtgattatctctcccggatatagtgattgaaggcagttgtgaaacaggctctttccgctttcttcatcataaagttttttgttttcgctcattgatttttcctcttgtttaccgtccggcggcgtccatgcgaacggcttaatgcggtgagagtcacagaagtcgtaaacagcaatgaaatcttccccggcatagacaactgaatactcgcgtcgagtggtgttaaatccagacgatgcaagctgcatgtagccgttaccaaactggattgagcggtcattgttggtagtggtaagggagccgccgcccccttgaacctcgccaccctgcgagcaagactcacgaatcatttttttgaacatcatttctacaccctgagaaatccccctcggatctgagccgttgtcaactctaacctccattccactaacgtcaacgaccgttccacctcctgaatggtttaccacctttggagccgagtttgatgcgttgaatccagatgttgccacgctacccgctgcggcagcaagtgatacagcggccccgccggaagatacagatctaaaaacagaagcagcaggcgcaggggttgcctgtgatgccgcagaagcaccagacgaagcccctccagcaaagctccacgtcttaccgcccatcattcctgagatcgtattgaagattaccatttgagcaatcatctttataatcatgctgatgatatttttagcaaagtcagcaaagtttgctttcccggtagtgaggaactgaaccatcatgtccgtcataccgtttagagcacttgatgcgatctcattaacgtttccgtacatatccattgcagagtcgccgtaatcagcgaatgcgctttcagcgccagccaaccagtcagcgcgtttggcatcttccgcagcgtagtaatcattttgcgccttaatcatgttctggagtttttcgtctccctcactacctccagagttgatgtaatcagtggttattttagccagttccgcttgtcgttccatttcgcgcgtgctaagaccgcgtgacgcgttaagctgttccgtcgccgccgtcatctcattgacaaacttcagtgacttgtcggtaagtgcgttcaattgctgttgcttaacaatctgatctccaatctcagccttctgtttggcaagctcgataactttctcctgacttgccagtaatgctttttcttccgcagataattgacgttttgaactagcctcgcgaagaaccgcgatcgtagcctcggtagtaaacaacgcctttctctgtgcggaaagtttttgcccgatctccttgtgctcctgcaataccttaagttgagccttgagtgaaattaactccttgtcgaattgctctgtcggtgagcgtacaattttcgactgcttatttcgttctcggtttcgcttctcgatctcttctgcttctttccttattgcttccttagtttcctcgctgtactgcttttcaagagtgcgacgctgcttcatcgcttcaacgtatcccatctcgcctttttctacgcgagcgttaatagcatcaagctctgaagccaactgatcgtagttgtcgcgagaactttttacaatattctcctgctccttcagtacatcagcgccgaagtcactcattccaggcagtgactgagttgcctttatggctgaggcgataaagtttgagatgtactcatcacccttcgcaagaatcattttaacttgaatcactgtgccctgaacaacgtcgataatcaggtttagcgccccaagtgtatgatcaccaacccatccccacgcgtccgaagcccattgtttaatatcgctccacattttttccaggggtgtggagttatccgcgatcgacttcattcgcttttccat

SEQ ID NO: 29178 - DNA, 2349 bp, Homo sapiens
  SIMILAR (1117)..(1740): 471254mologous to Bacteriophage N15 gp19,accession number AF064539,Smith-Waterman Score=497.
atggcgacacttgacacttttggttggtgtacgcaggttcaagggggcggcggctcccttaccactaccaacaatgaccgctcaatccagtttggtaacggctacatgcagcttgcatcgtctggatttaacaccactcgacgcgagtattcagttgtctatgccggggaagatttcattgctgtttacgacttctgtgactctcaccgcattaagccgttcgcatggacgccgccggacggtaagatcgggatatgggtagtaaagcctaacagtttgggagcgaagccagtatcacgcgacgtgatggagattaacgtcacgtttatggagcaatttacatctatggactgtagaatggttgcaggtaaacaagaggaaaaatcaatgagcgaaaacaaaaaactttatgatgaagaaagcggaaagagcctgtttcacaactgccttcaatcactatatccgggagagataatcactctcatcgaagttgatggtagtaagttcggcgctcaggtgtaccgattccacggtgagaatatccagtacactccagaagaaatcatgcaggcccagcaaactggaacgctaccgccgaaggaaattacattccgtggcgagaaatacggggcgcgaccgttcggtatatccgggatctcgtttgacagttccggaaaggcaacaaaaccacaattaacggtggcaaacattgatagtcgagtatctgcgatgattcgtgcatataacggactaatgcaagctaaggtgactatctggataactcagcgtgagcttattaactccgatggctcaatcgctgatggagcttaccgtaaactggtatactatatcgagcgtccgaactatgttgataaaagcgttgcgcggttcgatctcacatcaccttacgatatggacggcatcatgatcccgtctcgactcacacaaagcgtatgctattgggcgcaaagggggtggtataaaacagggaaaggctgcggatacaacgggcaaaatggttattttgacaaagacaataatccggtagacgatccttcgctggatttttgcccgggaacggaaaaatcaatgattagtgcaaaaattaaacttgaaattatgactcacgctcaagaagagtatccccgcgaatgctgtggggtagttacccaaaagggacgagtgcaaaaataccatagagtcgataatgttcatcgcgatcctgaaaatcacttcatgatggacgcagtgcaatacgcatgtattgaggacgacgcagactcaaccacgattgcgatcgttcacagccacacaggagatggggctacaacgctaccaagcgctcacgatacgtgcatgtgcaatgagatggaagtgacttggattattgttagcgtaccggaaggagatatgcgatttgtgaagccggagaaattacctctgattggtcgtccgtggtcattaggatcattcgactgttacggtcttgttatggcgtggcacaaagagcacggcgtagaattacgcgatcgacgattgaattttgaatggtggaaacctgagtatggaattaatctctatcaggattattacaagcaagatggcttcgttgagattccagatcagaataatccgtcattaggtgatatggtaatcatgcagatagggcaaaacgttccggtatggaaccacgcagggatttacctcggtgataatcagatcttgcatcacgccttcggatctcaaactatgaatgatgtaaaattaatcaaactatccggttcgcttgggagacgcttcggcgtctttcacagattcgctgttgactcttacccggaagctatccgggcgctatccagtcaggtagatggatttaaagaatacatgcaaagcgagataggatctcgtagcaagtttgcaatatttgtggatggcgttaacgtgggacaccatgaagaggaaaaattcaagtgcgcgaaagagataagaatcgtaccgatccctactggctctaagacaggaggtctattccaggttgtattgggcgcggcaataatggttgcagcattctatactggcggcgcgtctctagctttaatgggaacaatgtcctcgtctctgtttatgatgggcggcgctatggtgctgggcggcgtgatgcagatgatttcaccgcagccgggtggcgcaaactttgaagttcaatcaagcaagaataaaccttcgtacgcgttcggcggtgctgtcaatacgacggcggcgggataccctctcccggtcccgtatggatatcgcgccggaggtggcgcaactttctcagcaggttcttatgccgaggatatgagttaa

SEQ ID NO: 29179 - DNA, 491 bp, Homo sapiens
  SIMILAR (1)..(63): 1001254mologous to Escherichia coli dicC polypeptide,accession number X07465,Smith-Waterman Score=113.
aaagtttatgatgaatatcgtaagacgaagcgggcggggcggttgaacaatgaaaatcactcctgaacaggctcgtgaggctctggatgcctggatatgtcgaccaggaatgacacaggagcaggcgacgatattaatcactgaagcattctgggctttgaaagagcgcccgaacatcgatgttcagcgtgtcacatatgaaggtggcgcgattgatcagcgagcgcttggcgttaatcgagtgaagatatttgaacgctggaaggctatcgacaccagggataagcgtgaaaagttcacggcgctagtgcctgcaattatggaggctaccactggatgatgaaaagagtgtccatgaacgagtggataatgcccgtattgatttacgctcaaaatactatgttaaacctaaagctgaccatccctggcttacgcgccgaacgcaaagtcatcagcaagttaagcccccgaagttacctaaaaagaagcct

SEQ ID NO: 29180 - DNA, 1065 bp, Homo sapiens; identical to SEQ ID NO: 15971
  SIMILAR (412)..(1047): 941254mologous to Escherichia coli multidrug resistance-like ATP-binding protein Mdl,accession number U82664,Smith-Waterman Score=996.

SEQ ID NO: 29181 - DNA, 2163 bp, Homo sapiens
  SIMILAR (1734)..(1231): 821254mologous to Escherichia coli PTS SYSTEM, GLUCITOL/SORBITOL-SPECIFIC IIBC COMPONENT (EIIBC-GUT) (GLUCITOL/SORBITOL-PERMEASE IIBC COMPONENT) (PHOSPHOTRANSFERASE ENZYME II),accession number D90892,Smith-Waterman Score=724.
ttaccgttgcaggagccgcccagagagcggaagaaagacaaataaggggcacaaggaaaaactgtacgccgaatatttattgccggtgtgttcgccgctactgctgactggcgaaaaacccttgaagacaccggaagatctggctaaacatacgttattacatgatgcttcgcgccgtgactggcagataatccgggccctttgcttccccccccgtcggccgtttttgggcctcggaactgtccaagttaaaactgccaatgggcttgggccaatcggacccaatgggttttttgccacctgaaaccttgtggatagaacggtccggtgtggcccaagggttggaatggcccggccaaaagtccgggcaacaacgtggggcccatgacgcctctccatggggtgctttttgtaagcaagtcgttgtctaactgggtcctttggcccggcgtccttccggttaattgcgctctcgctcgttcggggaaacctctcgctggaccgcctgtgaactcttccgaggatggtcacgggcaaaccaacgtttttagtccgtggtagccccattaggactgtgccccctactaccgcttggaaaccgtcaccagggcgctccagggcaaaactcgttcgccgcctacatataatatgtgttcgaattatcttggctccctggttactgtgtcctgtgaagcctacccttcttgtgtactcttccctttgactgggcttcgttttccaacagggttggttggtgtccggtgggcgaaagggccccgggggagttcctacgtgcttttgttgtagcaggtattgttccatgctcagaactccttttagcctggatctgcagctgtggtttgggcagctgcagtggcacccaggagggcagggttcctgcctgcttctggactcacaagcgcaggggcttagtatggctcgtctagctgggggcgttatcgcctgcatgtttggtttatgggtgctgatgggcattggctttatcgcctctatgctccatcttggttcaccaatgcgcgcttttaactcgctcaaccgggtaggggcttcagcactcagtaacgaaatcgccagcggttcgatcttttttgccgtaggcggcatcggctggttgctggcaatgctgaaaaagctgtcaccggcattgcgtacgctgtggctgatagtgacgatggttcttggcgtcatctttgtctggatgatggtgcgtgtgtataacagcattgataccgttccgacctggtacagcatctggacgccgatgggcttcttcctgacgatcattaatttttcactggtgtcatagtccgggcccacgaaagagggttgtggtgtcgcatcacctactacagtgatgttttcttctttaccgccagagacataaatatcttccacaatgtactgcgccagcggaccggacttgcccgtcgagtggatattaatggtgggaatacgtcgtttcggatagatgccgcagcgtaatgtgccgccacagtcgattaccgcgacaccaatttccgcctccgcgggttcaccttctttaaatccgtcaatagcctgccagccagtaagctgtgccagtttgtcaacaatcgcaggccgggtaccggcggtgatatagacgattttttttcccggcgtggctttcagctcaagcgggccgccccagccacccgttcctttttcgatccgaatatgcgtcatgatgttgctcgtctgggcgatgattttgttcgcgccgccaatatcatcttgcactgtgaaggcaaagtggtggtttcgggaattggcaaatcgggccacattggtaagaaaatcgccgcaacgcttgccagtaccggcactccggctttttttgtccatccggcagaagcgctgcacggcgatctggggatgatcgaaagccgcgatgtgatgctgtttatctcttactccggtggcgcgaaggaactggatctgattattccgcgtctggaagataaatctatcgcgctgcggcaaaccgacgtcaccgctgggcctggcggcaaaagcggtgctggatatctccgtagaacgcgaagcctgcccgatgcaccttgcgccgacctccagcaccgtcaataccctgatgatgggtgacgcgctggcgatggcggtcat

SEQ ID NO: 29182 - DNA, 420 bp, Homo sapiens
  SIMILAR (42)..(419): 891254mologous to Escherichia coli yjjJ,accession number U14003,Smith-Waterman Score=569.
ggccagtgcacagctagcatgcctgctagctgagtctagaggaacaaagacttacccattacaaacagctggccatagaagcactggccagaaaaattgtgggttgttgtgcgtacggcgagcagccaaaatttacctactatgcacaaacgccgtcaggcaataaacatgtgttggtgaaattcaccgtaccacagcaaaccgcggtcagccaacgttggggtgacctgctaattgctgaatctattgccgcgcaaatcctgcgtgacggtgggatccacgccatcgagtcaacggtgcttgtaacaagtaacaggcaggtattcctcgaagcggaacgctttgactgcaaaggtaacgatggtcgcttgcctattgtgtcgctaaaggcggtacagagagagtttatctattctccgc

SEQ ID NO: 29183 - DNA, 720 bp, Homo sapiens
  SIMILAR (590)..(495): 361254mologous to Pseudorabies virus dUTPase,accession number X87246,Smith-Waterman Score=41.
atggagaagcgaggtctagttgatgcccaatggagttttacccggaaacgtttccggaggggcttccgggttattcgcgcggaggacatacagacgaatgataaacggggacgcgaaacgcggaacgcgacagatagggggatgccatacacacacgatcgacacacaccgcgatacggagggatgcctagtagatatgcaggaacacgggcgggggataaagctgtatgtgtgacagggaccgagcaaggagacaaaggaggcggcaaagcgaactctcgggcagttttgtttcctccttccctcctgcagcccgttcgcctcctctcctgcacacacacgtgcgcgcgcacacatatgcacacacgtgtgaatgcagggtattggccacaccagtttcttctgagctgcggagaccgcttcccgggaagctccgggccggactgggtttcagcggctgctgcagctgctaccaacgcggcctatgtgggactgggcgccggggtcgtggactcaggctcgcggcgtgtctgggagccgctagggtgcttgagcaacgtgtccagctgctgcttctccccagacctgaccccaagtccaggtgtctctgatgcagtggagattgggggccaggaggatgaggactacctgtctagagggaacaacaggattaccatagggaaggaagaagaaaactcagggcaggatattacacagtaa

SEQ ID NO: 29184 - DNA, 2943 bp, Homo sapiens; identical to SEQ ID NO: 28356
  SIMILAR (2283)..(1570): 911254mologous to Escherichia coli multidrug resistance-like ATP-binding protein Mdl,accession number U82664,Smith-Waterman Score=1140.

SEQ ID NO: 29185 - DNA, 913 bp, Homo sapiens
  SIMILAR (8)..(562): 391254mologous to Drosophila melanogaster CG13384 gene product,accession number AE003621,Smith-Waterman Score=333.
gtacactgtcagcttcttattagtcatcacccagctgggcttctgcagtgtttattttatgtttatggcagacaatttacaacagatggtggaaaaagcccacgtgacctccaacatctgccagcccagggagattctgacgctgacccccatcctggacattcgtttctacatgctgataatcctgcccttcctgatcctgttggtgtttatccagaacctcaaggtgctgtccgtcttctcgacattggccaacatcaccacccttgggagcatggctctgatctttgagtatatcatggaggggattccatatcccagcaacctacccttgatggcaaactggaagaccttcttgctgttctttggtacagccatcttcacatttgaaggcgtcggtatggttctgcctctcaaaaaccagatgaagcatccacagcagttttcttttgttctgtacttggggatgtccattgtcatcatcctctatatcttactggggacactgggctacatgaagtttgggtcagacacccaggccagcatcaccctcaacttgcccaattgctggtatgtcctgcccacctcaggtgagatagggagagacactggaactgttctggttgtcatagcagagagcacagcaaagctgagccatgaagctggtaatccatcactggaagtgacatatgtctctcctgctcacactgcatcagtcaaagcaagccacatggccgcacctcactccaagggggcagggaagtgcaattctgccatgtgcctggaagtatttggtgaacagcacaaataactgctgtgctacctgatgcagtgaccgtggggattaattggattaatacatagataatgcttagaaaagtgcttagcacgtggtaagcattcatgagcgtta

SEQ ID NO: 29186 - DNA, 3016 bp, Homo sapiens
  SIMILAR (1037)..(1732): 991254mologous to Escherichia coli glycine cleavage activator protein,accession number X73413,Smith-Waterman Score=1186.
  misc_feature (1)...(3016): n = a,t,c or g
atgaaggcgtttacctatgaacgagtgaataccccagccgaggcggcacttagcgctcagcgcgtacccggcgcaaaatttatcgcgggcgggaccaatctgctggacctgatgaagctggaaattgaaacgcccacccaccttatcgatgtgaacggcctcgggctcgataagattgaagtgaccgacgcgggtgggctgcgcatcggcgcactggtacggaacaccgacctggcggctcacgagcgcgtgcgtcgtgattacgcggtactctcccgcgccctgctcgctggcgcgtctggtcagttacgtaatcaggcaaccaccgcaggtaatctgctccagcgcacgcgctgcccctatttttacgacaccaaatcacccctgcaaataagcgccttgccccgggaagcggctgcgcggcngcttgaaggctttagccgtcagcacgcggtggtaggcgtaagcgaagcctgcattgccacccatccgagcgatatggcgggtcgcaatgcggttgctggatgcggtggtggaaaccatcacgccggagggaaagactcgcagtatcacactggctgatttttatcaccctccgggaaaaacgccgcacattgaaaccgccctgcttcccggtgagcttatcgttgcggtgacgttacctccaccgctcggcggaaaacatatctaccgtaaggtgcgcgatcgcgcctcctacgcctttgccctggtatcggtcgcggcgattattcagcctgacggcagcgggcgcggaaccttatggtttcctgttagtagtctgaacggagtacacagtatcgcgattggataccagctaaagacatcgcgtgtgtttcatagtgctcccctgtttgctgtgcctgagcctcttgtgaccaaaagctgcaaaggtaacgatggtcgcttgcctattgtgtcgctggaggcggtgcagagtgagtttatctcttctccgggatcgtggccgcaggcaatgcgccgtttgtgtgagcaacaacttgtcactcaccagagcgtggatatcgaagagatattttcgcaattaaccgaagcgacgcgtaaactccaggcccgtagcgccaagggggcgttgacggtcagtttactccccagtttcgccattcattggttggttccgcgactttccagctttaattcagcttatccgggaattgacgttcgaatccaggcggttgatcgtcaggaagataagctggcggatgatgttgatgtggcgatattttatggtcggggcaactggccggggctacgggtggaaaaactgtacgccgaatatttattgccggtgtgttcgccgctactgctgactggcgaaaaacccttgaagacaccggaagatctggctaaacatacgttattacatgatgcttcgcgccgtgactggcagacatatacccgacagttggggttaaatcatatcaacgttcagcaagggccaatttttagccatagcgccatggtgctgcaagcggctatccacgggcagggagtggcgctggcaaataacgtgatggcgcaatctgaaatcgaggccggacgtcttgtttgcccgtttaatgatgttctggtcagtaaaaatgctttttatctggtttgtcatgacagtcaggcagaactgggtaaaatagccgcctttcgccaatggatcctggcgaaagccgctgctgaacaagaaaaattccgctttcgggatcccatatcccagcaacctacccttgatgccaatctggaagaccttctgcctgttcgttggtacagccatcttcacattcgaaggcgtcggtatggtgagatagggagagacactggaactgttctggttgtcatagcagagagcacagcaaagctgagccatgagactacagcatgcagctgcatgcctcttccttttatcgcagtgcgcttgtctgtatgtgtgacagggaccgagcaaggagacaaaggaggcggcaaagcgaactctcgggcagttttgtttcctccttccctcctgcagcccgttcgcctcctctcctgcacacacacgtgcgcgcgcacacatatgcacacacgtgtgaatgcagggtattggccacaccagtttcttctgagctgcggagaccgcttcccgggaagctccgggccggactgggtttcagcggctgctgcagctgctaccaacgcggcctatgtgggactgggcgccggggtcgtggactcaggctcgcggcgtgtctgggagccgctaagggtttttggcaagcgccgcagcccttatgacacgcgagtggactcttccaacggcccttttggggggaaggcccgtgtaaaccccggaccccctatgaacctggtccccgagccaagcctggaggagggaattaaccccactgtaccgtacggactgggtcagcaccccttctccggcggcaaacacgacgcgatcgacgtcattggtcgcacgagccatgaggtcaccggtgccatcacgcagggtacatgcgttacgctcaagtcaaatttggatctagttaacgggtacgaggtagaactgtgtctgtgttgtcatgggtatgtctccgtgaataaaaaacgccagcggcgatggctggcgtatgaggtaataaagcgcgtttgggaaggtgaaatgttggtggtaaatgattcggagtcagcgggggaaggtgtcgcccagaatgcttcagtgattaatatcgtcgcctgctcctgtgtcattcctggtcgacatatccaggcatccagagcctcacgagcctgttcaggagtgattttcattgttcaaaaagcaagtccctgtgagacagtgaagatgacggctgtgcaccaagcctggagagccaccagactgacaggagcaacggaagataaattgacacgcggtagttcgctaaactgccgtgaagtgcggcaccccgtaggtcagacaaggcggtcacgccgcatccgacatccaacgcccgagccggttgcctga

SEQ ID NO: 29187 - DNA, 1174 bp, Homo sapiens
  SIMILAR (532)..(1173): 981254mologous to Escherichia coli K12 putative surface protein,accession number AE000189,Smith-Waterman Score=1042.
atgcagcgttcatgcactggtgaagagtggtacccatccatattcgaggaatcacgttggtataaattagggttggctgcctacaacagagaactcaagaaacaatggcttatacaagagaaagttttgcttttcttttatgacaaatggggcgcgccgcatgaggaagaacgggcgaaacgactggcggaaggatttgcttatgttgaagtattgccgaagatgagtctggaaggcgttgcccgcgtgctggccggggctaaatttgtagtgtcggtggatacggggttaagccatttaacggcggcactggatagacccaatatcacggtttatggaccaaccgatccgggattaattggtgggtatgggaagaatcagatgtttttctattttggtatagaaagtggggctgatccaacaattgaaactgactctggatataattctatggatctagctgtagccctaggctatagaagattgactatctcttgcgtcgtacccatcgcgcatttctttgattaccctcgggactgcgttttcatgttttctgggctgttaatcattctggttcccctgattgtgggttacctcattccgcttcgccaacaagctgcgttaaaagttattaatcaggtattaagctggatggtttaccttattctcttttttatgggtatcagtctggcgtttctcgataacctcgccagtaacctgttggcgattctgcattattctgccgtcagtattaccgttattttactgtgtaatattgccgccctgatgtggctggagcgaggcctgccgtggcgcaaccaccatcagcaagaaaaactcccgtcgcgtattgcgatggcgctggagtcgctaaaactgtgcggcgtagtagtgattggttttgccattggtctaagtggactggctttcttacaacacgcgaccgaagccagtgaatacacgttaattttgctacttttcctcgttggtattcagttgcgcaataatggcatgaccttaaagcagattgtccttaatcgccggggaatgattgtcgccgtggtggtggttgtcagttcattaattggtggtttaattaacgcctttattcttgatctccccatcaataccgcgctggcaatggcctccggtttcggctggtattctctttccg

SEQ ID NO: 29188 - DNA, 1326 bp, Homo sapiens
  SIMILAR (1)..(525): 971254mologous to Escherichia coli K12 putative dehydrogenase,accession number AE000435,Smith-Waterman Score=888.
atgaaagtgacatttgagcagttaaaagcagcctttaatcgggtcttaatttcacgcggcgttgacagcgaaacggctgacgcctgtgcagagatgttcgcccgcaccaccgaatccggcgtttattctcacggcgttaatcgtttccctcgtttcattcaacaactggaaaacggcgatatcattcctgatgcccaacccaaacgtataaccagcctcggcgcaattgaacagtgggacgcccagcgttcgatcggtaacctgacagcgaaaaagatgatggatcgcgccattgaactggctgccgatcacggtattggtctggtggcactacgtaatgccaaccactggatgcgcggcggcagtaacggctggcaggcggcggaaaaaggctatattggcatttgctggaccaactccatcgccgtaatgccgccgtgggtgccaaaagagtgtcgcataggcactaacccgctgatcgtcgccattcgttccacgccgatcaccatggtcgatatgtcgatgattaagcatacattaccacaacgagccgctggcacagatagaaaactcgctatgtcgcgagaggcacaactgcttgagcgtcatggttatgccttcaatgagttggatcttggcaaacgcgagccggttaccgaggaagagaaactcttcgtagcagtatgccgtggcgaacgtgagccagtgacagaagcagaacgcgtgtggtccaagtatatgacgcgtattaagcgtccaaaacgttttcacaccctttccggcggtaaaccgcagccgggcaagaagattgtgattcgcccgctgccaggtttaccggtgatccgcgatttggtggtagacatgggacaattctatgcgcaatatgagaaaattaagccttacctgttgaataatggacaaaatccgccagctcgcgagcatttacagatgccagagcagcgcgaaaaactcgacgggctgtatgaatgtattctctgcgcatgttgttcaacctcttgtccgtctttctggtggaatcccgataagtttatcggcccggcaggcttgttagcggcatatcgtttcctgattgatagccgtgataccgagactgacagccgcctcgacggtttgagtgatgcattcagcgtattccgctgtcacagcatcatgaactgcgtcagtgtatgtccgaaggggctgaacccgacgcgcgccatcggccatatcaagtcgatgttgttgcaacatgaaaacgccggagtgaaaattctccggcgttttggccgtgaattactgctgcggaattgccggtacagccggaac

SEQ ID NO: 29189 - DNA, 1053 bp, Homo sapiens
  SIMILAR (931)..(854): 881254mologous to Escherichia coli Leucine-tRNA ligase (EC 6.1.1.4),accession number D90704,Smith-Waterman Score=130.
ttaatcttctgaggcagtgatggtctgacgcgccagcgctggctgttttacgcgtatgacagtctccggaagacggttgttgcgcacgtattcggtgaacgcatcagcctgcgcgccggttccctgcgtaccattacgcacatcctgctgccgctgctgcgcccggcgatcctctcggcgctgatttacagctttgtgcgcgccattaccaccgtcagcgccattgtgttcctcgtcacgccggatacccgcgtagcgacggcttacatcctcaaccgcgtggaagatggcgaatacggtgtagcgattgcctacgggttccattctgatcgtggtgatgctggcgattattttcatctttgactggctgatcggtgaatcacgtacctcccgttcaaaaagccaaaaaccaggcgtaatggagcgcactgctagtttagatacgaagtttgctgcccaaacgggaatttcttcgcccgttaatgggtgaaccgctttaaagccagtatcgacgccttttttctccatcgtcgccatttcagcttcggcaactttggtgttacggcattcgtcaataaaggccgccagttcaggattattttccgccgctttctgcgccagcggatgacccgcagctaccgccaggtaggtacaacccataaaggtgtccgggcgggtagtgtaaacggtcagcgtgttgtcatagtcgttaacgttgaaggtgatctccacgccttcggaacgaccgatccagttacgctgcatggttttaacggtgtctggccagtgatccagtttatccagatcgttgagcagctcgtcagcgtaagcagtgattttgataaaccactgcgggatctctgttacgttcaactttggtatcgcagcgccagcagcagccgtcgataacttgttcgttcgccagtacggtccccagatcttctgattcggcaggtctggggtggtaccccaggatttgctgatgctgctggttgaggccacactttgagaaccactgtttgagcccaggaggttgaggctgcagtgacccat

SEQ ID NO: 29190 - DNA, 2358 bp, Homo sapiens
  SIMILAR (2358)..(1696): 991254mologous to Escherichia coli K12 putative oxidoreductase,accession number AE000361,Smith-Waterman Score=1147.
ttacgcggcttcaactttccgcactttctccggcaactttaccggcttcgtcgccagctcttccggatcaaagtcatcaacgttaatactgcgcagacggctttcttcagctttcaccagaatagcggcttcatctttatcaatcagccccttcaccagcgcgttgtgcgccagttcatccagacgggtaaacggcaggtttttacccagctctttacagatccgctgatgaattgggtcggcggcaatcacatccaccagcgcctcttccagcaagccaaccggattatgctcgctcggcgtcaggtactgaccgcgaccaatgcgggaacgggtggcgttcggcacttgtaaaatcttcgccactttatgatccagcttgtcagaaggtgccagataatgacgtccggtcgggaagatcaccacattcagcagcccggcaaccacgcggttcgggaagttttgcagtaaatcatccatcgcctgttcagcctgatacagcgcatcttgtacgccccaggcgataccaaacaccatgtcagacgccagcagcgttgcgttaccgtaacgatgcgcggtttgcagacccaccatcccggccatcagttcatgatcgtccgggatacagccccagcccattagcgttgggatcaccggaacgctggtcagttcagcaaactgttgtaacagtgcagctgcgtcagcattaattaccccgcccccggcaacaatcaccggacgttcggcctggattaacatttctacagctttttcgatctgcatacggctggcagcaggtttgtagaccggcagcggttcgtacatgtcaggatcaaactcgatttccgcaacctgaacgtcgaacggtaaatccaccagtaccggacccggacgaccagaacgcatcaggtgaaatgcctgttgcagcacgcgaggcaccagcgccgcttcacgaactgtaaccgccattttgctgaccggtttagcaattgcttcaatatctacggcctgaaaatcttctttatgcagacgggcgcgcgggcgcaacgaatggaacgtctggcgcaggaacatggtggactgcagataacccgcccgaaacgactggcggaaggatttgcttatgttgaagtattgccgaagatgagtctggaaggcgttgcccgcgtgctggccggggcgttcctgattcagcagggcgctcattaaatgaagcggttcgataaattggttgtcgtgctggaaggtggcgaaggtcatgacgtagtactggtagaaatcggcggtacagtaggtgatatcgaatccttgccgttcctcgaagcgattcgccagatggctgttgaaattggccgtgagcacactctgtttatgcacctgacgcgatgaccgtgccctgtctgtggatgagtatttctggcgacacatccgccgcattaaaagcggcaggtcgtaaagtgactcaggcaggctaccctgaagatcatctcgatacgttgtacagtcatcaaaactgtgaagtgactggctgggcgcaaacgtcggtgatgtcacatcagtgcgataccttgccgggtgacagcggttcgcctctgatgttgcataccgatgacggctggcaattaattggggtgcaaagttcggctcctgccgcagaaagatcgtctggcgcgtctcgataacacgggccatttcgccatcaaccactaataaatgcccgttgacataattcgatgccggacttgcgaggaatacggctgcgcccattaaatcctgagtatcgccccaacggtttgccggaatatgatcaagaacgcgctgattggtttctggattactgcgtgtcgccagcgtaatatctgttgcataatagccacgggcgataccatttacctgaatattatattgacctagttcatcacaataagctttggtgaacccggcaagagcatgtttagtggcagaatatgcaggtgaccattgtccacctaagtaagagaacaatgaacagatattaataattttgccgcttttctgcgggatcataatttttgcagcttcatagcttaactcgaatgcggcggtcaggttcacatcaatcatcggatcccagtcggcacgaccgaagtccagcaccttattcagcttacaaataccggcattgttaaccagaatatcaactgtaccgaaacgctcacagcaagcagcgataatcttctgcggcgcgccttctgcggtgatacccacctgcatgaagtccacctcaacaccctgtttttcaatcatttcctttgtttcgccgttatctttgacgaaactaggaataaagatatttgcgccagctttggccaacgccat

SEQ ID NO: 29191 - DNA, 3201 bp, Homo sapiens
  SIMILAR (852)..(259): 961254mologous to Escherichia coli GAD alpha protein,accession number M84024,Smith-Waterman Score=1061.
tcatccagcagtggaaggggggaagcgcagcacacggcagtttggtgattgttcactttccacacccgcaggcagggcgttatccagtagtgccaggagggcttcgccgttgccggaaagtgcctggattgtgacagtgtcacctaaagctgtaatgcgcagcgcactgtctaccagcagcaggctttttaaatcatctttgctgtcgatatctgcggattccagcagcagcgttgccggacgatccccacacaagcgcaagcgaaagtcccagcgatatccgggcgacgacggtgccaggaagccaccgctggcagcgtcgatgtgcatgtcgatgtcgataccggtatcggcctggaatttatccagcgcatcgtgcagcggttgtgggaactcatagttaccagtgtaggtcacgccgaaagtcggcaccacgccgatggtgttttcgtcacaggcttcaatcatgcgtttcgggtccataaacaactgaccggggcgcatagggatctcacgcagctccacatcccagtagcgggcgaatttatgccagcagatttgtaccggaccgcacaccaggtttggtttatccgttggtttgcctgcagcttccatacgcttgcgccaacgccatttcatcgccatcccgccgagcatacaggcctcggaagaaccaatggtgttggtgccaacggcctgaccatttttcggcgcaggcgcatgccacagatcggcaaccatatttacgcaacgcaggtcgatggctgcggattgcggatattcttctttgtcgatccagtttttgttaatggataaatccatcaatttgtggacattttcgtcgtcccaggtcagttcaggatcgagcgccgaggtaggttcatcaaacagtaaaacttccggttccatcgccagcgcccgcgcgatagaaacacgctgttgctgaccgccggaaagatgcaccggatatttcccctgcgcacgttcgtctatcccgacttttgccagatacttcaccgcccgctcgcgcgcttcctgcttgctcaggcccaacacctgaatcggcgcttccatgacgttttccagcaccgtcatatggctccagagattgaagtgctggaataccatcgtcaggcgtgtgcgcagtaagcgcagttgatttttatcggcgactttgagttgaccgtctttgtcgcgcaccagattgatcgtctggccattgaccacgatcgacccttcactcggtttttcgaggaagtctttagagcacagggcgatatactcactgcgaagcgtctcatgcctggtcgcatctacagattgccgtgcattgtgctcctgttggtgttcctcgtccataaagatcacccgattcgccactttacgggcaaagcccatttcgtgggtcaccaccatcatggtcattccttcgttcgccagttccaccatcacgtccagtacttcgttgatcatctccggatccagcgccgatgtcggttcgtcaaacagcatcgcaataggatccatacacaacgcgcgagcgattgccacacgctgctgctgaccgccggaaagctgcgccggaaacttattggcgtgagcagaaagcccgacacgctccagcagtttcagggctttttcacgagccggcgctttatcgcgtttaagcactttcacctgcgccagggtcaggttttcgataatcgacagatgagggaacagctcgaaatgcgggcccgcttcagagttgagcgcaccgtcaagcattgcggtcacggcatagcgccctttagatgtcagtttcatgtcttccttcacctcaaactcgcccttgactgatttagtcgggtatttaaccttcagtgccatttttttatcgtggcgtttgtccctgttgtcggatgcggcgtgaacgccatatccgccctggggttctgtacactgtaggcggttctgttcactgtaggcctgataagacgcattacgcgtcgcatcaggcaacggctgtcggatgcggcgtgaacgccttatccgacctacggttctgttcactgtaggcccggcaccctgcggcacattgccgctgatcaccatgtccacgccgccgaagctgttgttacgcagttgcagatgtttcaccacgccacgaacgtagttagcccattgatagttttcatgtgcgacaatgggcgcatcgagggaaaactcgtcgagctgattttcataatcggctgccatcacgcgaactttacggtcatcgcgtggtgcacaactggatttgccccttatgcggaacatatgcttgaagtgatgtcttctattggcgattatacaaaccgcgtccggcatcacgtccggtgacgaaatttgatcaacgtggtcatcgtcttggtcacggagtatggaacttaatgttcgagagggtgaaataatggcaaagaaccgtagccgtcgtcgaacaaactggcctttgacggcagcggttatctggcctgggaaggtctgatctgcatgcaggaaatcggcaaatgcaccgaagaacatcaggcgattgtgcgtaagtggctggaagagcgcaaactggatgaggtacgcaccagcgaacttttcgacgtttggtgggagttgcaacaacatcgacttgatatggccgatggcgcgcgtcgggttcagccccttcggacatacactgacgcagttcatgatgctgtgacagcggaatacgctgaatgcatcactcaaaccgtcgaggcggctgtcagtctcggtatcacggctatcaatcaggaaacgatatgccgctaacaagctggtgttgggtgccgctcgcgtctggttattcccccatgccgatggtgctgtcgataacagcatgatgtgggtggtgtcgatggcggtagcaggatgcttgtttgtcattcccacggcagcagaaattccgattgtacaaacgatgatgctggcaggtatgggaaccgctccggcgctggcattgttgatgacgctcccggcagtgagtttgccgtcactgattatgctgcgcaaagcgttcccggcgaaagctttatggctgacaggggcgatggtggcagtgtctggtgtgattgtcggcgggctggcgctgttgttctgatttgagggaaaacatgtcggatgcggcgtaaacgccttatctgacctacggtttgtatcgttgtaggc

SEQ ID NO: 29192 - DNA, 3812 bp, Homo sapiens
  SIMILAR (1234)..(1635): 981254mologous to Escherichia coli chlE protein,accession number M21151,Smith-Waterman Score=688.
ttccacattaagcttgtgctcactggggccacctggactgccctcccctactgccacagccacgtgggcctcagagccagcttgaagcccacgcctcccttctgggggcgcgcccccctgggcacacgcccatctcagcaaaagacggagtgtagattaatcaactttcctgagacacctatttttggcaactcatttaaatatgacattgaagtgtcgaataaatcaccggatgaagaagtcaaactacgacgtcatcatttagccagatgtatgaagaattttaagacggatatctatttcgtttccacgtttgaaccgtcaacaaaatcggtcgatttgctcacggttgaaacttttgctggtacggtatgtgaatatgctgacatgccaaaagagtggacaacgacccgaggactttatgatcctacccacctaataagcgcgtcatgtcataaagttgagggcttattttcatttgaggaccgcaccgtggcgacattaatccggctttttattcatcctgttaaatcgatgcgcggcattggtcttacacatgctctggcagatgtcagtggtctggccttcgatcgcatctttatgatcacggaacctgacggtgcggatatagcggttaagaccttcaccggcatccggctcaaagttccatgcccgccagaccatccggccttcagtatcacgaaccaccagacggaagtgactgccctggtcgtcttcgagtgtgatattgctgtacgtggtagtgaccgcttgcgcttgtctccgggccccggtggcagcaacacggattgggtcattttcgggctcctgataaaagaaaaccccggcagcctgctagctgtcggggtgaatttgctggggaagatactactatcagtcgttgctgcagtctccgagagtggacagaactttctcagcgttcttccggtccgcagtgaaggtccctgctttgtggtcattgacgtagacgtcgaactgcccggcctcagagatattgctgatgaagtcaaaacaggcgttatcgccgttacgccagctgtaatcccagcactttgggaggctgaggtggacgttaatatcgccgccttccgctcacaaaaggcctatatctccggtcaggtgaataaatccggtcaacaggcgatcaccaacgtgccactgactattctcgaggccatcaaaagcttccatgcctgcagtctgagtgttttcatggaatttaccaccggattgatgtcgctcgacaccgcgcttaatgagatgctttctcgcgtcaccccactgaccgcccaggaaacgctgccactggtacagtgttttggtcgtattctggcgagcgatgtcgtttcgccgcttgatgttccggggtttgataactccgcaatggacggctacgcggtgcgtttagccgatattgcctccgggcaaccgctgcccgttgccggtaaatcctttgccggtcagccataccatggtgaatggcctgcgggtacctgcattcgtattatgaccggtgcgccggtgccggaaggctgcgaagcggtggtgatgcaggagcagactgaacaaatggacaatggcgtgcgttttactgctgaagtgcgtacgggcaaaatattcgccgtcgcggtgaagatatctctgcaggtccgtggtgatatggatgacggatggctggcgctgtatgaatcccgcctgaagggaaagctgcacgtaatcagcaagcgatatacgcagcgaattgagcggcataacctgaatctgaggcagcacctggcacggctgggacggaagtcgctgtcgttctcaaaatcggtggagctgcatgacaaacagcaaggtcttgatgcggcgctgattgatgcgccgttagcagtcgatgcacaaacgcctcttagcgagttgctctctcatgtcggacaggcaccctgtgcggtgcccgtggtcgacgaggaccaacagtatgtcggcatcatttcgaaaggaatgctgctgcgcgctttagatcgtgaggggaatcgttttaagaagtttcgcactcgcttcatcgtccattacggcatagcggggagagaattccaggcactgttctaccatgcgagtgacatttttgcctgccaccagcgcaactacgcggaagtgttcgggattatggcgcaccacgtccagcgtgctgcaaccaatcgagccggtcgagcccagaatgtgctttcactttgtcgttcgcgtcacgacgcacgttacgtactgcaacacgcgcttgttctgcttcaccacgaacgattttggtcagatctttacgacgttcttccgtcagcggcggcaggacacacggatgtcgctacccgagagttcgggttcaggccaagatcggacgccataatcgctttttcaacggccggagacattgaacgatcaaacacgttgattttcagtgtacgggaatcttctaccgttacgcttgcagctgacgcgcggctcggcttggccgtaataattcacgacaatgccatccagcaggctgggagaagcacaacccgtgtcatttttgccgatttggggttttggcggctaatcatacatgcctacaggctggatctgcagagagaatttaagggccaacaacagcatatgacctcctgtaatcagcaggcgacggcgcaggcgttgaaaggggatgctcgtaagacctacatgagtgattgcctgaagaacagcaagtctgcgcctggcgaaaaaagtttgacgccacagcagcaaaagatgcgcgaatgcaataatcaagcaacacaacaatctctgaaagacgataataccggcgatcaccgcaccgaggatcccggtatcgatcgactggatcccaagaatgctctggatgttattggctttcagaaccgcggcatccgtggttggcagaatgcctttattggtcaaccagaagtttaccgcgaggttcattaccgcataaccgatgaagccagcgaatgccgctacgcctttattttcgcgtgccaggcccagcgggatggcgatacagaacattcatgttataccgataaaaacatcatcaacattccaaatctgatcgaacagtacggtgtggcgcgcgccatcattgaaacctgggccgctctgccactcagcaccgccaccatgtggggcttcttcatcctctgctttattgccaccgttacgctggttaacgcctgctcttataccctggcgatgtccacttgccgcgaagtacgcgatggtgaagaaccacctctgctggtgcgtatcggttggtcaattctggttggcattatcggtattgttctgctggcgctcggcggcctgaaaccgattcaaaccgccattatcgccggaggatgcccgctgttcttcgtcaacattatggtgacgctctcctttattaaagacgcgaaacagaactggaaagattaattaacccccaaaatatcaagaggttgaaagatggattttaatttaaatgatgagcaggaactgtttgtcgccggtatccgcgaactgatggccagcgaaaactgggaggcctattttgccgagtgcgaccgtgacagcgtctacccggaacgttttgtcaaagcactggcggatatgggtatcgacagtctgctgatccctgaagagcacggtggtctggacgcggggtttgttactctcgccgccgtgtggatggagctgggacgtctgggggcaccaacctatgtcctgtaccagttgccgggcgggttcaacaccttcctgcgcgaaggcacacaagagca

SEQ ID NO: 29193 - DNA, 1818 bp, Homo sapiens
  SIMILAR (640)..(1173): 641254mologous to Escherichia coli O157:H7 heptosyl transferase I; lipopolysaccharide core biosynthesis,accession number AE005590,Smith-Waterman Score=493.
  misc_feature (1)...(1818): n = a,t,c or g
tccactctagaggatccccattattaccacattgcagaagtcagcccagtggtcatcatcatctctatctacggggccacaggcgagaagtacggcttcatcacctaccggtgttctgagcacgcggccctctctttgacaaagggcgctgccctgaggaagcgcaacgagccctccttccagctgagctacggagggctccggcacttctgctggcccagatacactgactacggctattttgagcttcagatcaatcggttggccctcttctctacaaatgtcactgctgaaacaccctacatgcacctggccccacctgttgggactcagctccccctgccccatctgtcacatgacaacagcagcaaaaacagcggaggctgtttaccaggtgcctctgtgagttgtaattatagagagcctgctgtgcgcttggccttggcctctactctgcctctcctgagagcccagtccccgttcttcatgcacaaagacaaagaccctctgttttggttcctgacggtgccacccaagtggttcaggaaaggagaggtgattctatcatccaggcccaggaaaaaaacagaaggaagttggttccccaaaacattctttggttttggaaaatcccatgtgctggttaaagaattttacaatcgtaagcatcatattgcaaaacagcagcacgccgtagaacgcaccccgcgaactgttttgcncaaaaggtttgggcctatagcaaaccgcaaacccagggcgattatgctatcgcacagcatttttctagacgaacctgcctacaggatgctgggcgaaatatgccgtgatttctttcatgcggaccgacccgtagatgataaacactaggccggaagaacacttggcgaagaattgattgggtttactggctgattcaggaaatacggaattaaacttccgtggggcgcgccgcatgaggaagaacgggcgaaacgactggcggaaggatttgcttatgttgaagtattgccgaagatgagtctggaaggcgttgcccgcgtgctggccggggctaaatttgtagtgtcggtggatacggggttaagccatttaacggcggcactggatagacccaatatcacggtttatggaccaaccgatccgggattaattggtggagcccccgagaatggggattctgattcagccttgtacagactgaggaaggagatggaagaattccacttagtggttggatcagacatttttggaaaacaccagcacggcacagaaacggacagtacgacctgcccttcgactctagaggaattcgagacgcaatggtttattacgggcggcatcaatcgcattttattagccactgacggtgactttaacgttggcattgacgatccaaaatcgattgaatcaatggtcaaaaaacagcgggagtctggtgttactctgtcgacgtttggcgtggggaatagcaattacaacgaggcaatgatggtgcgaattgccgatgttggtaacggcaactacagctacattgataccctctctgaagcgcagaaagtattgaatagtgaaatgcggcagatgttgattaccgtagcaaaagatgtcaaagcgcaaattgagtttaaccccgcgtgggtaacggaataccgtcagattggttatgaaaagcgccaacttcgggtggaacattttaataacgacaacgttgatgcaggggatataggcgcaggcaaacatataacgttgttattcgaattaacgctgaacgggcaaaaagcatcaattgataagttacgctatgcccccggataa

SEQ ID NO: 29194 - DNA, 1994 bp, Homo sapiens
  SIMILAR (648)..(1514): 971254mologous to Escherichia coli rfa-2,accession number X62530,Smith-Waterman Score=1485.
cccggagaacgcgcagagtgggatcaaacctggctgtacacaccttaaagccgctgcacgatatggataaactggatcactggccagacaccgttaaaaccatgcagcgtaactggatcggtcgttccgaaggcgtggagatcaccttcaacgttaacgactatgacaacacgctgaccgtttacactacccgcccggacacctttatgggttgtacctacctggcggtagctgcgggtcatccgctggcgcagaaagcggcggaaaataatcctgaactggcggcctttattgacgaatgccgtaacaccaaagttgccgaagctgaaatggcgacgatggagaaaaaaggcgtcgatactggctttaaagcggttcacccattaacgggcgaagaaattcccgtttgggcagcaaacttcgtattgatggagtacggcacgggcgcagttatggcggtaccggggcacgaccagcgcgactacgagtttgcctctaaatacggcctgaacatcaaaccggttatcctggcagctgacggctctgagccagatctttctcagcaagccctgactgaaaaaggcgtgctgttcaactctggcgaatatacgaattcgagtcctgtgtaccacggggcattctctgagcgtccatcggggatgggcgatgttctccatacgttgcccgcactcaatgatgcccagcaggcaatcccagggattaagtttgactgggtggtggaagaagggttcgcacagattccttcctggcacgctgccgttgagcgagttattcctgtggcaatacgtcgctggcgtaaagcctggttctcggcccccataaaagcggaacgcaaagcgtttcgtgaagcgctacaagcagagaactgtgacgcagttatcgacgctcaggggctggtaaaaagcgcggcgctggtgacgcgtctggcgcatggcgtaaagcatggcatggactggcaaaccgctcgcgaacctttagccagcctgttttacaatcgtaagcatcatattgcaaaacagcagcacgccgtagaacgcacccgcgaactgtttgccaaaagtttgggctatagcaaaccgcaaacccagggcgattatgctatcgcacagcattttctgacgaacctgcctacagatgctggcgaatatgccgtatttcttcatgcgacgacccgtgatgataaacactggccggaagaacactggcgagaattgattggtttactggctgattcaggaatacggattaaacttccgtggggcgcgccgcatgaggaagaacgggcgaaacgactggcggaaggatttgattatgttgaagtattgccgaagatgagtctggaaggagttgcccgcgtgctggccggggctaaatttgtagtgtcggtggatacggggttaagccatttaacggcggcactggatagacccaatatcacggtttatggaccaaccgatccgggattaattggtgggtatgggaagaatcagatggcctacggtttacgcattacgttgcaacaacatcgacttgatatggccgatggcgcgcgtcgggttcagccccttcggacatacactgacgcagttcatgatgctgtgacagcggaatacgctgaatgcatcactcaaaccgtcgaggcggctgtcagtctcgataaaaacatcatcaacattccaaatctgatcgaacagtacggagtggcccgcgccatcattgaaacctgggccgctgtaccactcaacatcgccaccatgtggggcttcttgatcctctgctttattgccaccggtacactggttaacgcctgctcttataccctggcgatgtccacttgccacgaagtacgcgatggcgaaaaaccacctctgctggtgcgcatcggttggtcaattctgggtggcattatcggtattgttctgctggcgctcggcggcctgaaaccgattcgaaccgccattatcgccggatga

SEQ ID NO: 29195 - DNA, 1785 bp, Homo sapiens
  SIMILAR (1783)..(1499): 481254mologous to Escherichia coli exonuclease V (AA 1- 1180),accession number X04581,Smith-Waterman Score=147.
atgggcattgttgcaaatcaactggagaaggatggacatgaagaaagaagagaatggaagaggagaaagagcaaggccagacatttggaaggttcttgtgacagtccaatgacgccatggtgcactatccagactagaaatctgcaagcacgtcacttgacccgccccaacagcaaacgggaccacacaactatttacaaaaacaattaccagattgatttctcccacccctgtgataggcagtgggtcgtggcctctagtttggcgaagctggggttctacagactagatacacagaagcagaaccagagccaagaaatagcggaatcagagtgcagagtggagagtgaagagcgtcttgaggccctggcccaccctctatccactagctcctcaccatctggcactagcaactgcagccagcagctagccctcaacaccttcctacagactcgctccacagctgatttgaagattcttctatgcaaccgaaacaagaatgagtcgagctcgataccccccaagccattacgtaatatgattgagcagcgcaaaagtttaagcgccgatggcgtaaaaaccgccgtccccaggcaccagcagaccagaaagaccaacaaccaccaccaacagcgccacgaggacagtttctgcttcaccgtggagccatcaatggcgggcagaataaacttggtccggaaacgcttttcaaccctttctggaaagccggtcgcaaaagctgaagaaaaagaccaccgccgtgccgataaacacccactgccaacggacaccgaagccgtgtcgaccaccagtttgctccagttgcaccccataaagacgcccgccagcacaaagaacatcgcggcagagagcagcgcattgcaatatgcatcggtttcatactttctctacctccgggcgacccaaataccggtcggcatcaccagcagcaccagaatcagcagggcgaatgagccacatctttatattccgtactcagataggcagaagagagcgcctccgcatccccagaatcaggccgccaatcatcgctcccggaatgctgccaatccaccgagcaccgacgcggtcagcgcatacacgggcgcgctaaggcagcagatcccgttcagatttacggcaggacgaaagcgcgacatgcggatacgaggaaaggacgcacatggagacgggcaacaaactaccgacgagcacagcacaattgaatcgacaccagcgcaaagtcgcagcacgaacatgcgcgacacggccaaattcatggcacatttcgccacacgtaccgaagccttgcattgtccagaaatgcggatcccggcagcgggatatccccggattgccggcagagcgtatgggccatttgccgccatcggtggcgatcatttgggtggcgtcggtgacctgttgcgcgaggtgcttgcctcggtccggccgggaacttgttcggccagggtcttggtaacggaagggatttccagaacgttaaggcatcgcgcacctgggcggctcctggcggctgcgcaccagacactgatgtccgaagcacgcaccggacgcgcgtcgtcgccgttcatcacaacgcttcgccccgctgtccggcttgtagccagtcgcggatttgcgcacacatacctgcgccatggtactttgataatcgccaacgccgcagctttcccttccatcagccacattttcatcgcaggctgtgtttcacctttaaataaaaacgtaacgcctgatttttcccggctgatttcactggaataa

SEQ ID NO: 29196 - DNA, 3861 bp, Homo sapiens
  SIMILAR (1963)..(3390): 821254mologous to Escherichia coli glutamate synthase, large subunit,accession number U18997,Smith-Waterman Score=1947.
atgtggctgatgcaaggcgatacctgcggcgttggcgattatcaaagtaccatgtgcgcagccggacagcggggcgaagcgttgctgatgaacggcgacgacgcgcgtccggtgcgtgcttcggacatcagtgtgctggtgcgcagccgccaggaggccgcccaggtgcgcgatgccttaacgttgctggaaatcccttccgtttacctttcgaaccgcgacagtgtttttgaaactctggaagcgcaggaaatgctttggttgttgcaggcggtgatgacgcccgaacgtgagaacaccctgcgtagtgcgctggcaacgtcaatgatggggctgaacgcgctggatatcgaaacgctgaacaatgacgaacatgcgtgggatgtggtagtcgaagagttcgatggttatcggcaaatctggcgcaaacgtggcgttatgccgatgctgcgggcgctgatgtcggcgcgtaacatcgctgaaaacttgctggcaacggcaggcgcgaactgctacaagaagccggaacgcagctggcaagtgaacatgcgctggtacgctggttatcgcaacatatcctcgagccagacagtaatgcctccagccaacaaatgcgtctcgaaagtgataaacatctggtgcagattgtcacgatccacaaatcgaaagggctggaatagccactatgtctcggcgttgcaccgctggtgcgccgtcgtggcgataaaaaaggtgacaccgacgtccaccaaagtgcgctcgggcgtttgctgcaaaaaggggaaccgcaagatgcggcagggcttcgcacctgtattgaagcgttatgcgatgatgatattgcctggcaaacggcacaaactggtgataaccaccctggcagcagagctgaatgcgaagacgttacaacgattgcccggcgataactggcgcgtcaccagctactctggtttgcaacagcgtgtcacgtatcgcccagattatgccggatcgtcattgatggacaacttgatctcgggaaaactatttcgcaacgtcgcgcttgtggctaaaatagccgccatttttcagctactggataagaatgtgaccgtatcttctcatcgacttgaactgttaagcccggcacgcgatgccgccattgcccgcgaagctattttgcacggtgccgatgctgtttatatcggcggccctggttttggtgcccgtcataatgccagtaatagcttgaaagatattgccgagctggtgccgtttgcccatcgttatggtgcaaaaattttcgtcacgcttaacaccattttgcatgatgatgagctggaacccgcgcaacggctgattactgacctctaccagaccggtgtcgatgcgctgattgttcaggatatggggattctggaacttgatattccgccgattgaactgcacgccagtacgcagtgcgacattcgtacagttgaaaaagcgaagttcctctctgatgttggcttcacgcagattgtgctggcgcgagagctgaatcttgatcagatccgcgcgattcaccaggctacggacgcgaccattgaattctttattcatggggcactgtgcgtggcctattcgggtcagtgctacatttctcatgcgcaaacagggcgtagcgccaaccgtggcgattgctcgcaggcgtgccgtttgccatacacattgaaagacgatcaggggcgggtggtttcctatgaaaaacatctgctgtcgatgaaagataacgatcagactgccaacctcggcgcgctgattgatgctggtgtacgctccttcaagattgaagggcgttacaaagatatgagctacgtgaagaatatcaccgcccattatcgccagatgcttgatgccattattgaagaacgtggcgatctggcgcgcgcttcatcaggtcgtactgaacatggtaccgagctgattatccgccgcctggcaaactatctcaatccggataaaaagaaactggcggcgaaaggcattacgtcggtacgttcccgcgtgaccaacctcaccgagctgttgccggggatcacccatgagcaggtttgcgaggccataaccgaggcctttttcgcccattatggcgagcgcgtggaagcggaaatcatctccccgaacaaaacgccagacttgccaaacttcgccgaaacctttgcccgccagagtagctgggaatggaacttcgggcgttctgctgaatacgtccacggcggcgtataccacgcctacaacccggacgtggtgcgcacgctgcaacaagcggtacaaagcggcgagtacagcgactatcaggaatacgcgaagctggttaatgagcgtccggcaaccacgctgcgcgatctgctggcaattacgccgggtgaaaacgcggtcaacattgctgatgttgaaccggcaagcgaactgtttaaacgctttgataccgccgcgatgtctatcggcgcgttaagcccggaagcccacgaggcgctggcggaagcgatgaacagcatcggcggtaattcgaactccggtgaaggcggcgaagacccggcgcgctacggcaccaacaaagtgtcgcgcatcaagcaggtggcttccggtcgctttggggttactccggcgtatctggtcaatgccgacgtcattcagattaaagtcgcccagggcgcgaagccaggcgaaggcggtcagttgccgggtgataaagtcacgccttacatcgccaaactgcgctattcggtgcccggagtgacgctgatctccccgccgccgcaccacgatatctactctatcgaggacttagcgcagctcattttcgacctcaagcaggttaacccgaaagcgatgatctccgtgaagctggtttccgaaccgggagcttatgcggacttgatcaccatcgcaggctatgacggcggcaccggcgcaagtccgctttcatcggtgaaatacgcagtctgtccgtgggatctggggcttgttgaaacccagcaggcgctggttgctaacggcttgcgtcacaagatccgtttgcaggtcgatgtcggcctgaaaacgggtgtcgatatcatcaaggcggcgattctcggcgcagaaagcttcggcttcggcactggcccgatggtggcgctcggctgtaaatatctacgtatttgccatctgaacaactgcgcaacgggtgtagcaactcaggatgacaaactgcgtaagaaccactatcacggcctgccattcaaggtgacgaattactttgagtttatcgcccgtgaaacccgcgagctgatggcacagcttggcgtaacacgtctggtggatctgattggtcgcaccgacctgctgaaagagctggacggtttcaccgccaaacagcagaagctggcagctgtcgaagctgctggagactgccgaaccgcatccagaaaagaatctgtcattcttaatgaagtactcaatagatttgttgatgctttaacaaatgaagttcgctatgaagtatcacaaaattggcttgatacaggaaacctggcctttctgaacaaaccattagaactcactgaacatgaaaaacagtggattaagcagcatcccaatttaaaggtgctggaaaatccttactcgcccccctattctatgacggatgaaaatggctcggttcggggcgttatgggggacattcttaatattattaccttgcaaacaggtttaaatttttctccgatcaccgtttcacacaatatccatgctggaacacagcttagccccggaggatgggatataatacctggcgctatttatagtgaagatcgagaaaataatgttttatttgctgaagcctttaataccaagccctaa

SEQ ID NO: 29197 - DNA, 708 bp, Homo sapiens
  SIMILAR (1)..(198): 1001254mologous to Escherichia coli exonuclease V (AA 1- 1180),accession number X04581,Smith-Waterman Score=340.
atgtggctgatggaaggcgaaagctgcggcgttggcgattatcaaagtaccatggcgcaggtatgtgctgcgcaaatccgcgactggctacaagccggacagcggggcgaagcgttgctgatgaacggcgacgacgcgcgtccggtgcgtgcttcggacatcagtgtgctggtgcgcagccgccaggaggccgcccagcatttgctagtatcccgcctacgcctgcggcggtactcacgattgccgcctgcgccactacacgcttgcggacccttgacggtatgcctcgcgccggaaaatctgactcagcagcaccaggttttgcggacgtgcaccgcgccaggagtagatcgactggtcatcgtcacccaccacggcttacagcgtgagcagattaaaaagactattgaagcgacggctcctggctgttttgaagttttcattcacaacgacatggaagcggcaatgaaggtgaaatccgggcaactgggttattacatcggcgcgtgtaataccggtgcgggcgcggcattgtcgattgccatcgcggtgataggctataacaaaagttgcaccattgccaaaccaggcattaaagcgaaagacgagcatatcgccaaaatgatcgctgaaggaaaagtggcgtttggcctttccgttgagcacgtcgaacacgcgattccgatgctgattaaccatctgaaataa

SEQ ID NO: 29198 - DNA, 474 bp, Homo sapiens
  SIMILAR (1)..(471): 831254mologous to Salmonella typhimurium LT2 91 1040187392dentity with E. coli threonine efflux protein (RHTC-also known as yikJ) (SP:P28746),accession number AF233324,Smith-Waterman Score=715.
atgggcgtgctgggcattacctgcggcgtaatggtttgggctgggattgcgctgcttggcctgcatttgattatcgaaaaaatggcctggctgcatacgctgattatggtgggcgggggcctgtatctctgctggatgggttaccagatgctacgtggtgcactgaaaaaagaggcggtttctgcacctgcgccacaggtcgagctgccgaaaagtgggcgcagtttcctggaagcgattatctactttggctcggtgttctcattgtttgtcggtgataacgttggcactaccgcgcgctggggcatttttgcgctgatcattgtcgaaacgctggcgtggtttaccgtcgttgccagcctgtttgccctgccgcaaatgcgccgtggttatcaacgtctggcgaagtggattgatggttttgccggggcgttatttgccggatttggcattcatttgattatttcgcggtga

SEQ ID NO: 29199 - DNA, 622 bp, Homo sapiens
  SIMILAR (1)..(60): 751254mologous to Salmonella typhimurium LT2 89 1040187392dentity with E. coli homoserine/homoserine lactone efflux protein (RHTB- also known as yigK) (SP:P27847),accession number AF233324,Smith- Waterman Score=82.
atgaccttagaatggtggtttgcctacctgctgacatcgatcattttaagcccgttccccaggctctggtgcaatcaacactatgaccacctcgctcaaccacggttatcgcggcgcggtggcgtctattgctgggcttcagaccggactggcgattcatattgtgctggttggcgtggggttggggacgctattttcccgctcagtgattgcgtttgaagtgttgaagtgggcaggcgcggcttacttgatttggctgggaatccagcagtggcgcgccgctggtgcaattgaccttaaatcgctggcctctactcaatcgcgtcgacatttgttccagcgcgcagtttttgtgaatctcaccaatcccaaaagtattgtgtttctggcggcgctatttccgcaattcatcatgccgcaacagccgcaactgatgcagtatatcgtgctcggcgtcaccactattgtggtcgatattattgtgatgatcggttacgccacccttgctcaacggattgctctatggattaaaggaccaaagcagatgaaggcgctgaataagattttcggctcgttgtttatgctggtgggagcgctgttagcatcggcgaagcatgcgtga

SEQ ID NO: 29200 - DNA, 1106 bp, Homo sapiens
  SIMILAR (1)..(591): 911254mologous to Salmonella typhimurium LT2 91 1040187392dentity with E. coli threonine efflux protein (RHTC-also known as yikJ) (SP:P28746),accession number AF233324,Smith-Waterman Score=948.
  misc_feature (1)...(1106): n = a,t,c or g
atggtgcacattgtggcgcttatgagccccggtcccgatttcttttttgtctctcagaccgctgtcagtcgttcccgtaaagaagcgatgatgggcgtgctgggcattacctgcggcgtaatggtttgggctgggattgcgctgcttggcctgcatttgattatcgaaaaaatggcctggctgcatacgctgattatggtgggcggtggcctgtatctctgctggatgggttaccagatgctacgtggtgcactgaaaaaagaggcggtttctgcacctgcgccacaggtcgagctggcgaaaagtgggcgcagtttcctgaaaggtttactgaccaatctcgctaatccgaaagcgattatctactttggctcggtgttctcattgtttgtcggtgataacgttggcactaccgcgcgctggggcatttttgcgctgatcattgtcgaaacgctggcgtggtttaccgtcgttgccagcctgtttgccctgccgcaaatgcgccgtggttatcaacgtctggcgaagtggattgatggttttgccggggcgttatttgccggatttggcattcatttgattatttcgcgtcttgcgctgattgttcccggtctgctgcaaaaaaacggcggctggcggcgcatggctattatttctgcggtcattgcgctggtctgccacgcaatcgctctggaagcccgcatcctgcccgacggtgatagcggacaaaacctcagcctgctgaacgttggttcattggtcagtntgatgatctgtacggtaatgaccattgtggcttctcgcaatcgtggctggctgctgctacccattgtctatgcctttgcgcttatcaacctggcgctggcaaccttcatgcccaatgaatacatcacccatctggaagctacgcctgggatgctggtgcacattggcttatcgctcttttcctatgccacgctaattatcgccgccctgtacgcactgcaactggcgtggattgattaccaactgaagaacaagaagctggcgtttaaccaggaaatgccgccattgatgagtatcgagcgtaaaatgttccacatcacgcagattggcgtggtgctgta

SEQ ID NO: 29201 - DNA, 1041 bp, Homo sapiens
  SIMILAR (316)..(759): 991254mologous to Escherichia coli K12 putative enzyme,accession number AE000364,Smith-Waterman Score=760.
atgcgtcagtacaccgacgaatatcttgataacattacaccgccgttcacgaaagccttgtttacctacgtcaaagagcggaagtacaccttttgtacgccggggcatatgggcggcaccgcatatcaaaaaagcccggttggctgtctgttttatgattttttcggcgggaatactcttaaggctgatgtctctatttcggtcaccgagcttggttcgttgctcgaccacaccgggccacacctggaagcggaagagtacatcgcgcggacttttggcgcggaacagagttatatcgttaccaacggaacatcgactgatgcatggcgtcagcgttttggtggcacagcgcgtctgtatggtgaaaaagcgttgcaactgtttgctgacgcgcatatttgtgtggttggtatcggtggtgtcggttcctgggcggcggaagcgctggcgcgcacggggattggcgcaatcacgcttatcgatatggatgatgtgtgcgtcaccaataccaatcggcaaattcatgccctgcgcgataacgttgggctggcaaaagcggaagttatggcggagcgtattcgccagattaacccggagtgccgtgtaacggtggtggatgatttcgtgacgccggataacgtagcgcagtatatgagcgtgggttattcgtacgtgattgatgccattgatagtgtacggcccaaagcggcgctgattgcttattgtcggcgcaataaaatcccactggtcacaaccggctgcccagtctatgatatttttgttatagcagcactgctcggcgtcaccactattgtggtcgatattattgtgatgatcggttacgccacccttgctcaacggattgctctatggattaaaggaccaaagcagatgaaggcgctgaataagattttcggctcgttgtttatgctgggcaaacaggctggcaacgacggtaaaccacgccagcgtttcgacaatgatcagcgcaaaaatgccccagcgcgcggtagtgccaacgttatcaccgacaaacaatga

SEQ ID NO: 29202 - DNA, 516 bp, Homo sapiens
  SIMILAR (235)..(408): 911254mologous to Escherichia coli f138,accession number M87049,Smith-Waterman Score=262.
atggttcacatccaatgcacatatcaaggtatcgtcagattttcaacaaacaacgtcaattatttccatcgtattccgtccaacatcacgtacatcatatcgtcaacatgtgcgcacaatcatgggcgacacacatcccccaaatcatcatcagatgtcgtcatcaccgtcaggtcaaccagcatctggtcaacatcaacgtcacaacacgacacacatgcatccacagccagcgtggtgccacacccgcaactgatgcagtatatcgtgctcggcgtcaccactaatgtggtcgatattattgtgatgatcggttacgccacccttgctcaacggattgctctatggattaaaggaccaaagcagatgaaggcgctgaataagattttcggctcgttgtttatgctgggcaaacaggctggcaacgacggtaaaccacgccagcgtttcgacaatgatcagcgcaaaaatgccccagcgcgcggtagtgccaacgttatcaccgacaaacaatga

SEQ ID NO: 29203 - DNA, 1168 bp, Homo sapiens
  SIMILAR (521)..(811): 1001254mologous to Escherichia coli lysine decarboxylase,accession number M67452,Smith-Waterman Score=507.
atgccttatggtgaggaacagaacaaaggcgagtacagcaagcatagtatgcacatctactgtagaacgttggttagcagtgctaccagtcgtccatacatctcatcttatgaccccgagattgatgactcctgctttcactcgacctggtcacctaggctaagacgacaaaatcagatgctttatgtcaagtcagccttatctagtttggtcgacgctcttcaagagccacgagggattctaattcctctgggccagacagaagccctcgtgaaggcagctttaaacgccgccagattcagtcttaactcacacacgggaccctatgagacagcttgcaaaacacctgctagattccgggtggcaccccggggacacacactgaattgccggctcccggggaaccacgtcgagggcctaggagagagcttccgacgttccttggccagtccccggcgataccccccagagaacccctggatgaccgtcgagggtgcgcgctcggtatacccggagggccctgtgcgaagaaattagcaaaatgaacgagaacctgccgttgtacgcgttcgctaatacgtattccactctcgatgtaagcctgaatgacctgcgtttacagattagcttctttgaatatgcgctgggtgctgctgaagatattgctaataagatcaagcagaccactgacgaatatatcaacactattctgcctccgctgactaaagcactgtttaaatatgttcgtgaaggtaaatatactttctgtactcctggtcacatgggcggtactgcattccagaaaagcccggagcatgcggcgccagtctgcacgtcacatagactcgtcagctatgggggtgcaccagtcgctgcatcacccagagatgcgtgccgctcacagtactctgcgacagcagctcggatatgctgcgtactagacgcgctgaatagcacgtgtgatcctacccacatgactcatgtttcgagggatatctccgtggatacgcggaggaaaccgaggcggcaggaacgcgagggagctgtaacatctcttggtggctcagacctcaggactccttggcttgcaacaataacgcagatgcttacgcaggctacctctatcggcagtaagacaatgtgtttacccgctgagtacaacgactga

SEQ ID NO: 29204 - DNA, 285 bp, Homo sapiens
  SIMILAR (120)..(275): 841254mologous to Arabidopsis thaliana putative protein,accession number AL162506,Smith-Waterman Score=224.
acccacagtggaacagcagcatcttcatctccacccacttagctctacaacagaagcgcagacaagcagagtatggtgcccaggagcctagcagaaggatagttgggggaaaaggatcaggagctcaggtagatgaagaagaagaggaggaggaggaggaggaggagaaggaggaggaaaaagaagaagaaggagaagaagaggaagaagaagaagaagaagaagaagaagaagaagaagaagaagaagaagaagaagaagaagaagaagaagatgttgttgttg

SEQ ID NO: 29205 - DNA, 215 bp, Homo sapiens
  SIMILAR (95)..(3): 871254mologous to Homo sapiens retinal rod Na+/Ca+, K+ exchanger,accession number AF026132,Smith-Waterman Score=143.
catttttcttcttcttcttcctcctcatcatcttcttcttcttcttcttcttcttcttcttcttcttcttcttcttcttcttcttcttcttcttcaaagattcctctggagttctgcaggctatataggaagcaaggctgcatctgcttctggggaagcctcggggagattttactcatggcagaaggcgaagcaggagccagcccttcacatgg

SEQ ID NO: 29206 - DNA, 393 bp, Homo sapiens
  SIMILAR (375)..(100): 391254mologous to Rattus norvegicus cyclic nucleotide-gated channel beta subunit,accession number AJ000496,Smith-Waterman Score =176.
ttaagaagggacatatgatccagttctagccaatactaagtgagagaagtttgcagggggtttctggggaaattttcttgctcttaaaaatagtgataattccttcttcttcttcttcttcttcttcttcttcttcttcttcttcttcttcttcttcctcttcttcttcttttctcttcttcttttcttcttctttcttcttctttcttcttctttcttctcctccttctccttctcctccttctccttctcttcttctccttcttctccttctccttctccttccttctttcttctttcttcttctttttttggtgttatttctctggatgttgttaccttggcctggcaaagtgctaggattacaggggtaagccaccgcacccagcccat

SEQ ID NO: 29207 - DNA, 1896 bp, Homo sapiens
  SIMILAR (1481)..(819): 811254mologous to Homo sapiens Ndr protein kinase,accession number Z35102,Smith-Waterman Score=874.
ccacataggattccgtggcaagagtactattttgctgctttcatgtaggaaggtattgccccccttgcagtcaggccctcaaagcgcttgtacgtgtaattgatgaagacccagtctttgttcttgtagtcgcaggagacaatgctggtggtgttacctgttggcttaagaatatcagattctggaaactcatcgaagtttgaggtatcatcaatgcttttgatttgaaggtggagggatgttctctaatacctcaaaattagatccttggctttctcagagatgggaacttctggaggaaaagtcaaagtttctttccagttcatcaccttcttatatgtctcttgaggaagtcctctgaaaccatgcaacttaccgatgagcatctcatacatgatcaccccaagcgaccaccaatcacagagcttgttgtacccggtctgcatgaacacctcaggagcaatgtaggggattacaggtgtgagccaccgcacctgaccaagagaaacattttctgcattctttcagaagccacagatattacttactagctgacgtctatttcttttccaggtttctgctttaggctaacgtaattgttaccacttactgaaatcactggggaggctgtggttcagattcctataaaattctgtcctatgtgcttttttcagtcctgtgcaaagatctggacgaggggaatgcagtggcacctggaagcttggagatgccagaaaccgcagagccctaaagggggtgtcacagcactggctcaggaagcccctaagtctgggctcctggaagggcagttcatgccaatgcccccccaataccttgctgtccaaaagaaggttgtctggtttgatgtctctgtggatgaatccaagttggtgaatagagtctatggctaatactgtttctgctatataaaactgagtctcctcttctgtcagagtgtctttatgacctttcatcgtcaagtaattacctccaggcaggaactccatgattaggtagaggtttagcttatcctgaaaactatagaacattttcacaacccacaaactgtctgcctccactagaatgaaagcactgctacaactgtgctttacctgctctttttcaagcatatctgctttacggagtattttcattgcatacacatgtcccacttgacaagtagctgtgatttttacctcaccaaatgctcctctgcctattacttttaaggactcaaaatcttccaatccaagtcttgttctcttcaaacgaagaaactctgtttccttccgaaggaaaacattgccaatattaattacctcctcatcttttaggccttcttcttcaattttttcaaacaaaattctttacctcatttctcgttcttcatgttgagcgataaggttgctataaaaattctccagtgtcactttggtcattgtcaccctttcctttgtgtggttactcatggatgagcaaggacacagactttcctctaagcccttaccgactttttcctctggctgttgcttttccactctcttcttaagaattttccctgccttttcctgtgatgaagacggcggcagcaagcaactcaccagagcccagggagaggcagggctggggacggcggagagccgcagacgccccttcggccagtagtctcgacttgaaggctggcgaagccccggcggcggcagccaacgagccaaagacgggaggggacgcgtgagggactctgagacagggggcaacaggcggttacgactacaggactacaggcacgtgccaccatgcccagctaatcttttcttcttcttcttcttcctcttcttcttcttcttcttcttcttcttcttcttcttcttcttcttcttctcccttccccatggg

SEQ ID NO: 29208 - DNA, 261 bp, Homo sapiens
  SIMILAR (189)..(4): 721254mologous to Homo sapiens Human follicle stimulating hormone GPR N-terminal sequence,accession number W03627,Smith- Waterman Score=239.
ttagtaaactacttcttcttcttcttcttcttcttcttcttcttcttcttcttcttcttcttcttcttcttcttcttcttcctcttcttcttcttcttccttcttcttcttcttcttcttcttctcctcctcctcctcctcctccttctccttctccttctccttctccttctccttctccttctccttcagatctgggatggcaggaagaatgggacgagaggaggggcacctggggagggaagggcgcctcccctgcat

SEQ ID NO: 29209 - DNA, 195 bp, Homo sapiens
  SIMILAR (192)..(4): 691254mologous to Arabidopsis thaliana putative protein,accession number AL162506,Smith-Waterman Score=217.
ttactcatcatcctcctcctcctctcgcttgtgtttctttttacagtgaacagaaacaatggcctgttcttcttcttcttcttcttcttcttcttcttcttcttcttcttcttcttcttcttcttcttcttcttcttcctcttcctcttcctcttcttcttcttcttcttcttcttcttctttcttcttcttcat

SEQ ID NO: 29210 - DNA, 399 bp, Homo sapiens
  SIMILAR (291)..(10): 681254mologous to Homo sapiens Human thyrotropin GPR N- terminal sequence,accession number W03626,Smith-Waterman Score=308.
ttagaaaggctgtctgctccttgcatctctctcttgctctctcgctctctctcttccctctctctttcctctctcctcttcttcttcttcttcttcctcctcctcctcctcctcctcctcctcctcctcctcctcctcctcctcctcctcttcttcttcttcttcttcttcttcttcttcttcttcttcttcttcttcttcttcttcttcttcttcttcttcttcttcttcttcttctcgatcctccaggggataccatccagggggcaccatccaggggataccatccaagggataccatccagggggcaccatccagagggcaccatccaggggataccatccagggggtaccttccaggggataccatccagggggcaccatccagggggcaccat

SEQ ID NO: 29211 - DNA, 159 bp, Homo sapiens
  SIMILAR (46)..(114): 1001254mologous to Oryza sativa similar to RING-H2 finger protein RHA1a (AF078683),accession number AP000616,Smith-Waterman Score=138.
tcagtgtttcttgaagtcctctgcacctgtccctggtgtgagtaaaacaacttcttcttcttcttcttcttcttcttcttcttcttcttcttcttcttcttcttcttcttcttctccttctccttcttcttctctcctcctcctcctttcttccttcat

SEQ ID NO: 29212 - DNA, 429 bp, Homo sapiens
  SIMILAR (234)..(19): 551254mologous to Homo sapiens Human secreted protein HCHPF68, SEQ ID NO:163,accession number Y86248,Smith-Waterman Score =162.
tcatgtttgaaaatagagtttcttcttcttcttcttcttcttcttcttcttcttcttcttcttcttcttcttcttcttcttcttcttcctcttcttcttcttcttcaccgaaagcatttgatctgtgtcactcttgggtgtctgaggtggctggggcagctctgtgtcaggctgcagggcagctgtgcttggctccaaactctgggttgggttcatacctatgcgtgtgtctgcaccttcttcttggaccagcaggtagcagggcgtattcttctcgtggaagatcctaggagttctctgcttcagtgctgccttctcctggatgccacctctgtgctgtcggttccagaaaaacatgcattttataaggacatgaaggtaggtgcactgctctggaatcacttccatccagtttaacctggagcccat

SEQ ID NO: 29213 - DNA, 282 bp, Homo sapiens
  SIMILAR (167)..(51): 841254mologous to Homo sapiens Human secreted protein HCHPF68, SEQ ID NO:163,accession number Y86248,Smith-Waterman Score =168.
ctagagaacttctgagagggggaaatgtttacattgggccttagagcattctttctttctttcttcttcttcttcttcttcttcttcttcttcttcttcttcttcttcttcttcttcttcttcttcttcttcttcttcttcttcttcttcttctcgtgaactgaggggtgtgttgtactctactctcaggccctgagatctcatgcagatctgattttgcacagggtcccacacctctccagggagcccctcaaacagccttaggtaatcttgcatctccat

SEQ ID NO: 29214 - DNA, 264 bp, Homo sapiens; identical to SEQ ID NO: 6507
  SIMILAR (4)..(111): 801254mologous to Homo sapiens Human secreted protein HCHPF68, SEQ ID NO:163,accession number Y86248,Smith-Waterman Score =152.

SEQ ID NO: 29215 - DNA, 708 bp, Homo sapiens
  SIMILAR (702)..(520): 1001254mologous to Homo sapiens steroid receptor TR2- 9,accession number M29959,Smith-Waterman Score=304.
tcaacgatggccaagtttacaacttagttcaggggttatagaataacaagatgggctgcttcttcttcttcttcttccttcttcttcttcttcttcttcttcttcttcttcttcttcttcttcttcttcttcttcttcttcttcttctttcttcttcttcttcttcctccttctgtccccaaccacttctagagactcttggcaaaattggatgggaattttctgacactgcctctgcttgtacaatactgagaagtcaggaagagcttgagttggctgtaattctaaagggtgaatggatgctgatggtgtttcctcagcctcccaaagcactgggattacagacatgatccatcgtgcccagtcacacagatcttttctgatggcttgcttttgtgttttgtatctctgctctgtttgatttggcagaaaaggctcctgcgcaaagccacgtgcaagtctccctgtatgtcttggctgctcctgtgctcctgatggaaatgtgtcgggggacattattcttgaaacatcaccgttggtctgcatttcttgaaattcacacaaagaggtatcatcattgcttaagctttcaatcatagacatttcattactattttgagaaagatctttagtttttccaagattcgctaatgatgtaaccacattggccaatgtacttaaatctccctgacatgattcagccaccat

SEQ ID NO: 29216 - DNA, 274 bp, Homo sapiens
  SIMILAR (192)..(7): 821254mologous to Arabidopsis thaliana putative protein,accession number AL162506,Smith-Waterman Score=244.
ttgcccttccttcttatatctttccacattctagttctcctcctcctcctcctcctcctcttcttcttcttcttcttcttcttcttcttcttcttcttcttcttcttcttcttcttcttcttcttcttcttcttcttcttcttcttcttcttcttcttcttcttcttcttcttccttctccagttactccccatcttgaggaaacatgagacagctatatcaacactcataacacaaagtggagaacggcaggtgctacagaagcccagctgga

SEQ ID NO: 29217 - DNA, 252 bp, Homo sapiens
  SIMILAR (153)..(34): 851254mologous to Homo sapiens Human secreted protein HCHPF68, SEQ ID NO:163,accession number Y86248,Smith-Waterman Score =171.
ctaaatgaagataatgttgaagaaaattggattcttcttcttcttcttcttcttcttcttcttcttcttcttcttcttcttcttcttcttcttcttcttcttcttcttcttcttcttcttcttttttttttcagatggagtttcactcttgtctcccaggccagggtcacgatcatgaatgtcactgtcttccacctccacatctcgtcccactggaaggtcttcagaggcaatgtgtatgcagactgtcat

SEQ ID NO: 29218 - DNA, 1734 bp, Homo sapiens
  SIMILAR (1)..(768): 1001254mologous to Homo sapiens OLF4,accession number AC002988,Smith-Waterman Score=1325.
atggaaccagagaatgacacagggatttcagaatttgttcttctgggactttctgaggaaccagaattgcagcccttcctctttgggctgtttctgtccatgtacctggtcactgtgctcgggaatctgctcatcatcctggccacaatctcagactcccacctccacacccccatgtacttcttcctctccaacctgtcctttgcagacatctgtttcatctccactacaatcccaaagatgctcattaacatccagacacagagcagagtcatcacctatgcaggctgcatcacccagatgtgcttttttgtactttttggagggttagacagcttactcctggctgtgatggcctatgatcggtttgtggccatctgtcatcctctgcactacacagtcatcatgaaccctcggctctgtggactcctggttctggcatcctggatgattgctgccctgaattccttgtcacaaagcttaatggtattgtggctgtccttctgcacagacttggaaatcccccactttttctgtgaacttaatcaggtcatccaccttgcctgttctgacacctttcttaatgacatggggatgtattttgcagcagggctgctggctggtggtccccttgtggggatcctttgctcttactctaagatagtttcctccatacgtgcaatctcatcagctcaggggaagtacaaggcattttccacctgtgcatcacacctctcagttgtctctttattttgttgtacgggcctagagcttccatctccaccaacaaccattcagggaggaattcacacttccacatggaggcttttctttcagaaaaccagtcaaggattttcagagaaacaagaattgcagcccttcctctttgggctgttcctgtccatgtacctggtcactgtgctcgggaacctgctcatcatcctggccgcaatctcagactcctgcctccacacccccatgtacttctttctctccaacctgtccttcgtagatatctgttttgcctccaccatggtcccaaagatgttggtgaacatccagacacagagcaaagtcattacctatgcaggttgcatcacccagatgtgcttttttgtactctttatagtgttggacagcttactcctgaccgtgatggcctatgaccagtttgtggccatctgtcaccccctgcactacacggtcatcatgagccctcagctctgtggactgctggttctggtgtcctggatcatgagtgtcctaaactccatgttacaaagcttagtgacattgcagttgtccttctgcacagacttggaaatccctcactttttctgtgaacttaatgagatgatccaccttgcctgttctgacacctttgtgaacaacatggtgatgcattttgcagctgtgctgctggacggtggtcctctcgttgggatcctttattcttactgtaggatagtttcctccatacgtgcaatctcgtcaactcaggggaagtacaaggcactttccacctgtgcatctcacctctcagttgtctccatattttatggtacggggctaggggtgtaccttagctctactatgacccaaaacttacactcaactgctgtcgcctcggtgatgtacactgtggtcacccccatgctcaaccccttcatttacagtctgaggaataaagacataaagggggctctgacacaattcttcagagggaaacaataa

SEQ ID NO: 29219 - DNA, 1414 bp, Homo sapiens
  SIMILAR (980)..(768): 981254mologous to Homo sapiens leukocyte antigen F,accession number X17093,Smith-Waterman Score=383.
aaaatcctctctcgctgtgggcagccacaatccaatcacctaggggcccagatagaacaaaaaagcagaaaggagtcaaattttctctctctctctctctcaatacaaggccagcaacgatgcccacgatggggatggtgggctggggagactgctctgggaaaggaagggaaggtgaggggccctgatctccaggcctcagccctgaccctgctgaagagtctccaggaggcaccaccacagcggcccacttctggaaggttccatcccctgcaggcctggtctccacaagctctgtgtcctgggtctgttcctccccatcccgctgccaggtcagcgtgatctccgcagggtagaagcccagggcccagcacctcagggtggcctcatggtcagagatggggtggtgggcaacgtgtgcctttggaggatctgagaagagtcagaaaattcaggcactttgcactcctcatgggaaaccccagcagcacccatgttccaggtaggtcctgaactcctctgcatattcctctgcctcatagaagcgctgggtgatctgagccacggtgtccgccgcggtccaggagcgcaggtcctcgttcagggagatgtaatccttgccgtcgtacgcgtgctggtgatacccgcggaggaggcgtccgtcgggccccatgtcgcagccattcattccctggagggtgtgagaccctagccggtccccgcagtcagcggcggagcagctagccccgccccctccccgcccaacccgcgggggccttggcgtaccctgtggtccactcccaatactgcggcccctcttgctccacccacggctcccgcggctccatcctcggaatcgcggcgtcgctgtcgaaccgcaggaattgcgtgtcgtctacgtactccacggcgatgtagcggggctccccgcggccgggccgcgacacagcggtgctgaaatacctcaaggagtgggagcctgggggcgaggaggggctgagacccgccagaccctcctccggaggcggctccctgagtcctgcgaccccaacctccgcgtctgggaaaaatatgagtcccgcggggtgcgtgggactttagaacctgggaactgcggcgacactgttcttccttttcttcttcttcttcttcttcttcttcttcttcttcttcttcttcttcttcttcttcttcttcttcttcttcttcttcttcttcttcttcttcttcctcttcctcttcctcttcctcttcctctccttctccttctccttctccttctcctccttctttcctcctcctcctgctcctccccgcccccctcctcttcttctctggaaaagttgtacctgagcatatgaaataggacagagaccagtttctttctttcttttttttttttattagctgcagt

SEQ ID NO: 29220 - DNA, 2369 bp, Homo sapiens
  SIMILAR (1440)..(2366): 1001254mologous to Homo sapiens BC85395_3,accession number AC005255,Smith-Waterman Score=1602.
agcttccatctccaccaacaaccattcagggaggaattcacacttccacatggaggcttttctttcagaaaaccagtcaaggattttcagagaaacaagaattgcagcccttcctctttgggctgttcctgtccatgtacctggtcactgtgctcgggaacctgctcatcatcctggccgcaatctcagactcctgcctccacacccccatgtacttctttctctccaacctgtccttcgtagatatctgttttgcctccaccatggtcccaaagatgttggtgaacatccagacacagagcaaagtcattacctatgcaggttgcatcacccagatgtgcttttttgtactctttatagtgttggacagcttactcctgaccgtgatggcctatgaccagtttgtggccatctgtcaccccctgcactacacggtcatcatgagccctcagctctgtggactgctggttctggtgtcctggatcatgagtgtcctaaactccatgttacaaagcttagtgacattgcagttgtccttctgcacagacttggaaatccctcactttttctgtgaacttaatgagatgatccaccttgcctgttctgacacctttgtgaacaacatggtgatgcattttgcagctgtgctgctggacggtggtcctctcgttgggatcctttattcttactgtaggatagtttcctccatacgtgcaatctcgtcaactcaggggaagtacaaggcactttccacctgtgcatctcacctctcagttgtctccatattttatgacagagcttcagtttccatcatcaaccatccagggaggaattcatacatccacatggacgacaccttccttccagaaaatccatcaggtcacatcaacaagatgaaaccagggaatgatacacgaatttcagaatttcttcttctaggactttcagcagaaccagaattgcagcccttcttctttgggctgttcctgtccatgtacctggtcaccgtgctcgggaacctgctcatcatcctggccacaatctcagactcccacctccacacccccatgtacttcttcctctccaacctgtcctttgcagatatcagttttgtgtctaccactgtcccgaagatgctggtgaatatccagacgcagagcagagtcatcacctatgcaggctgcatcacccagatgtgctttttcctactatttgcagtgttggacagccttctcctagctgtgatggcctatgatcgcctggcaacagagcaagactctgtctcaaaaaaaaaaaaagagaagaagaaagaagaagaagaagaagaagaagaagaagaagaagaagaagaagaagaagaagaagaagaagaagaagaagaagaagaagaagaagaaaagaagaggaagaaaagaaaaatgccaaagtcacatcacaagatgaaatcatggaacaatacaataattttagaatttcttctcctgggaatttcagaggaaccagaattgcaggccttcctctttgggctgttcctgtccatgtacctggtcactgtgctcgggaacctgctcatcatcctggccacaatctcagactcccacctccacacccccatgtacttcttcctctccaacctgtccttcgtagacatctgttttgtctctaccactgtcccgaagatgctggtgaacatccagacacacaacaaagtcatcacctatgcaggctgcatcacccagatgtgctttttcttactctttgtaggattggataacttccttctgaccgtgatggcctatgaccggtttgtggccatctgtcaccctctgcactacatggtcattatgaaccctcaactctgtggactgctggttctggcatcctggatcatgagtgttctgaattccatgttacaaagcttaatggtgttgccactgcccttttgtacacacatggaaatccctcattttttctgtgaaattaatcaggtggtccaccttgcctgttctgacacctttcttaatgacatagtgatgtattttgcagtagcgctgctgggcggtggtcccctcactgggatcctgtactcttactctaagatagtttcctccatacgtgcaatctcatcagctcaggggaagtataaggcattttccacctgtgcatctcacctctcagttgtctccttattttatggtacatgcttaggggtgtaccttagttctgctgccacccacaattcacacacaggtgctgcagcctcagtgatgtacactgtggtcacccccatgctgaaccccttcatctacagtctgaggaataaacacataaagggtgctatgaaaacattcttcagaggaaagcaatag

SEQ ID NO: 29221 - DNA, 2574 bp, Homo sapiens; identical to SEQ ID NO: 28983
  SIMILAR (991)..(1635): 951254mologous to Escherichia coli Adhesin AIDA-I precursor,accession number D90839,Smith-Waterman Score=1025.

SEQ ID NO: 29222 - DNA, 4005 bp, Homo sapiens
  SIMILAR (1897)..(1730): 961254mologous to Escherichia coli RhsA protein,accession number D90709,Smith-Waterman Score=322.
gtggcaggagtaggtccattacatttggggcgttatgcatggcgatctaggcatttcaatgaaaagccgcatcccggtttgggaagagttcgtgccgcgcttccaggccacgctggaacttggcgtctgcgcgatgatttttgctacggcagtcggtattccggtcggcgtgctggctgcggttaaacgcggttccattttcgatcacacagcggttggcctggcgctgacaggttattcaatgcctatcttctggtggggcatgatgctgatcatgctggtttcggtgcactggaacctgacgcccgtctccggtcgcgtgagcgatatggtgttcctcgatgactccaatccggtaaccggttttatgctaatcgacaccgccatctggggtgaagacacggaacttttatgggggccgcccccataagaatcttgcctgcctatgggctggggactattccggttgcgggctttgggcggatgacacgctcctcgatgctggaagtgctgggcgaggattacatccgcaccgcgcgcgccaaagggctaacccgcatgcgggtgattatcgtccatgcgctgcgtaacgcgatgctgccggtggtgaccgttatcggcctgcaggtgggaacattgctggcgggggcgattctgaccgaaaccatcttctcgtggcccggtctgggacgctggttgattgacgcactgcaacgccgcgactatccggtagtgcagggcggcgtattgctggtggcgacgatgattatcctcgtcaacttgctggtcgatctgctgtacggcgtggtgaacccgcgtattcgtcataagaagcgcggtcgtcgggctggtttacgtcgtcatcgtgctaaacacggacggttccgccgtcaggttcaggacagcttcggtaaagaagcacaagaacgccataccctgacccacgaaattcgcaatctccagcaactcaacgcgcaaatggcccaggaagcgatcaacctgacgcgcgcgctgaaaggcgacaataaaacccagggcaactggggcgaggtagtattgacgcgggtgctggaggcttccggtctgcgtgaagggtatgaatatgaaacccaggtcagcatcgaaaatgacgcccgctcgcggatgcagccggatgtcatcgtgcgcctgccgcagggaaaagatgtggtgatcgacgccaaaatgacgctggtcgcctatgaacgctattttaacgccgaagacgactacataagtagctcggaccgcagtctaaggcgtcgtactgcaccggacagtcgatcaatgtcaccggcggtcagcgggcgctttaaaccgcgggtcgtggtcgccatcgcgctggacgatcagcagcgcatcgtcgacaccttgtttatgaaaggactgaccgtcttcgcccgaccgcaaaaaattcccgcaattaccggcacaaccattcgcaaagatctggtcattctggaacatgccggaaccgtcattcgtacttatggcggagtggtgttgaataaagaggaatccgatccgcctatcgatcataaaacactcatcaacacccacaagaaagagctgattgcagaagctgcctaccgttttgcagatggttccctgctctcgcgctttaataacatcacggtgatgaccaacagcctgcatatcgtcaatgcgctatccgtcactcgaccgctggccttagggtttattaatgtctgggcaataaatatggttctgcacaagtatatcctggtggtaattgagttgttggccaatttgtctgtggcaggtaatcacttgctgtctttgtatccatccctggatactgggaatcatcctgtggcgtacaagtcagatttggttttacccacttcctgcaatacacccaatcggatcctgagtgatatacctcccctgcagcgggtcataatagcggtggcggttgtaatacaggccggactcctcatcatactgctgccccggcaggcggataagctgctgcagctgatgcgggttctcttcattcagcaggttgccccattcatcgtattctgcgcaccattctgttgccccttccgtgctgacaagcgccagcggcaggccgcgatggtcgcagtggtacaggtggatttttcgcgccggcgtgtacaccgggtccatctggttttgcatctgctccacggtcaggccgcacgatgccagccagcggcggctttcctcactcacccggtcagccaggatttcactttccagccggtcgagcatctgcaccaacaccggcgggaacaccacactgccaccgtcttcgccgacggactgctgaagggcatccgccaagctgcggcgctgcgttttcgccagctcaccggtggcagtttcgaccctgatgagtggcgtgaagctccccggctgataaatcgtctggatgcggctcctggccttctgtatcgtggtcaagccgtcgccggtccagcccgattttggacgatctctagctcgtacccgttcaagaactttaactccgccacctcctacagtggcccggcggcgatccgtttactgcgcgccagctgcgggcagacttcgcacactaatctgtatcaaccggcaaataacgactgctatctgtttgataacctttcgaaactgggctttacccagcacctgatgatgggacataacggccagttcggcggttttttgaaagaagttcgcgaaaatggcggcatgcagagcgaattgatggatcaaacaaatctgccggttattttgctgggctttgatggttcgccggtttatgacgataccgctgtgcttaaccgctggctggacgttaccgaaaaagataaaaacagccgtagtgccacgttctacaacacgcttccactgcatgacggcaaccattatccgggggtcagcaaaacagcggattacaaagcgcgggcgcagaaattctttgatgaactggacgccttctttactgaacttgagaaatcgggtcgtaaagtgatggtggtcgtggtgccggaacacggcggcgcgctgaagggcgacagaatgcaggtatctggcctacgtgatatccctagcccgtctatcaccgccacgctggaacttggcgtctgcgcgatgatttttgctacggcagtcggtattccggtcggcgtgctggctgcggttaaacgcggttccattttcgatcacacagcggttggcctggcgctgacaggttattcaatgcctatcttctggtggggcatgatgctgatcatgctggtttcggtgcactggaacctgacgcccgtctccggtcgcgtgagcgatatggtgttcctcgatgactccaatccgttaaccggttttatgctaatcgacaccgccatctggggtgaagacggcaactttatcgatgccgtcgcccatatgatcttgcctgccattgtgctgggtactattccgctggcggtcattgtgcgtatgacacgctcctcgatgctggaagtgctgggcgaggattacatccgcaccgcgcgcgccaaagggctaacccgcatgcgggtgattatcgtccatgcgctgcgtaacgcgatgctggcggtggtgaccgttatcggcctgcagcatggtgatgtcgtcggcgtgcgggaactcagtacgaatacggttaataacgctttcgtagatttcgtggatgcagctccagcagccggatacttcggtggtaaagcccatgttgccggttttgaggatctgcacacgttcggcagccactttatccggtccccagttcaggttgttaaaccaggtttcgatcagcttgctgtccacgcgctggcattgcgggtagcgggcaacgatttccgcaatcccttcgcccgtcaccttcgcaatgcgagggttaccttcagccataaagatcagcacgcattttccgtcggcaaaatgggtgaagtgttgggtgccatcttcagcgtcatacaaacgagcgattga

SEQ ID NO: 29223 - DNA, 1713 bp, Homo sapiens
  SIMILAR (229)..(744): 981254mologous to Escherichia coli transmembrane protein,accession number L08399,Smith-Waterman Score=895.
ctacgaaaattctgcaatgtattgaatttgcacgattttgtaggccggataaggcgttaacgccgcatccggcataaacaaagcgcactttgtcaacaatctgtatacccggtggcgctgtgcctctgcgtgcagcgccatccggcagcaatacttcattccctgtccgataagggcgggaattgatttgtgagcaatacagacacgcagttccaggctgcgggtcaccttctcacatttgcctttgtccacatgatcccgggcgatccggtgatgatcatggcgggcgaacgtgggatctccccagagcgtcacgcgcagctgctggctgaactcggcttaaataaaccgatgtggcagcagtatctccattacatttggggcgttatgcatggcgatctatgcatttcaatgaaaagccgcatcccggtttgggaagagttcgtgccgcgcttccaggccacgctggaacttggcgtctgcgcgatgatttttgctacggcagtcggtattccggtcggcgtgctggctgcggttaaacgcggttccattttcgatcacacagcggttggcctggcgctgacaggttattcaatgcctatcttctggtggggcatgatgctgatcatgctggtttcggtgcactggaacctgacgcccgtctccggtcgcgtgagcgatatggtgatcctcgatgactccaatccgttaaccggttttatgctaatcgacaccgccatctgggacaccaaaccgggtctgtatgaaccgacttcgccaccgattatcaccgataaaaccatcgtgatggccggttcagttaccgataacttctcaacccgcgaaacgtctggcgtgatccgtggttttgatgtcaacaccggggagctgctgtgggccacatgcacagcctgtacaagccgcgtgaaaattggaactcgttggaaccgctgcctgcagaacaatgagcagacggaatacaaaaccgtgcgcggattaacccgcggtctaatgttattaaatatgttaaataaacttgatggcggtgccagcgtccggctgatggcagaactcagcggcctgcatcgcaccactgtgcggcgactgctggagacgctgcaggaagagggatatgtccgccgtagcccctccgatgatagttttcgactgaccatcaaagtgcggcaattaagcgaaggatttcgtgacgaacagtggatttctgcactggcggccccactgctgggcgatctgttgcgcgaagtggtatggccgacagatgtgtccacgctggatgtgatgcatgggacgtggcgcacttcaaacagcataaaaactacggtcatcaccagcaaaagcacgctcgccattgccccggaaagcccggtcattagcgctgtggtgaaggtaaccactttttccgagtccatccgctgcagcattcgctccggcgacatatgcaaattaagaaaaggcaacatctcctgcaatttaaaaagtttgcgcgtcagctccttattaaacttcggcagcatagagataaattcgttaaacgatgccgccagtacgccgaccagcgcggttagtgcgatcagcatcaccaccactacaatcgtaatggcaacggggcgttgtactccccgacgaataaaccatgtgacgagcgggttgaggacgatggcaaaaaacagcgccagtaacagctgcacatga

SEQ ID NO: 29224 - DNA, 947 bp, Homo sapiens
  SIMILAR (232)..(789): 1001254mologous to Escherichia coli URF,accession number X04469,Smith-Waterman Score=936.
atgggtggtggcatcacttatcttcttgaaaaagcgcgcgagaaatcgaacgccaaaatgattgttatcgatccgcgatataccgatacggctgccggtcgtgaagacgaatggctccctattcgcccgggcaccgatgccgcgctgttttttctgctggcgagtttatcgctggtgacacatgctgcgttgtgtcaggatattgacgcagatttcatgtcgaggactaccatgaacaagtttttatttgccgctgcattgatcgtcagtggcctgctcgttggctgtaatcaactcacccaatacaccatcaccgaacaagaaattaaccagtcgcttgcgaaacataataatttctcaaaagatatcggtttacccggcgtggctgacgcccatattgttctgacaaacctgaccagccaaattggtcgcgaagagccgaataaggttaccctaaccggagacgccaatctggacatgaactccctgttcggtagtcagaaagcgaccatgaaactgaagctgaaagcgctgcccgtgtttgataaagaaaaaggtgcgatcttcctgaaagagatggaagtggtcgatgcgacggtacaaccggaaaaaatgcaaacggtgatgcagacgttgcttccctatttgaaccaggcattacgcaattactttaaccagcaacctgcttacgtcctgcgcgaagatggcagccagggcgaagcaatggcgaaaaaactggcgaaaggcattgaagtgaagccaggcgaaattgtcattccatttactgattaatcacgagggcgcattcgcgccctttatttttcgtgcaaaggaaaacgtttccgcttatcctttgtgtccggcaaaaacatcccttcagccggagcatagagattaatgactgcaccatcccaggtattaaagatccgccgcccagacgactggca

SEQ ID NO: 29225 - DNA, 1830 bp, Homo sapiens
  SIMILAR (16)..(342): 961254mologous to Homo sapiens Integrin alpha-2 chain,accession number W70542,Smith-Waterman Score=525.
atggtgggaagcggaaaatatgcttattcagcagcttctggtgggcgacgaagtgctacgaaagtaatggtagttgtaactgacggtgaatcacatgatggttcaatgttgaaagctgtgattgatcaatgcaaccatgacaatatactgaggtttggcatagcagttcttgggtacttaaacagaaacgcccttgatactaaaaatttaataaaagaaataaaagcaatcgctagtattccaacagaaagatactttttcaatgtgtctgatgaagcagctctactagaaaaggctgggacattaggagaacaaattttcagcattgaaggaagaacagaagtgacagtgattctactggaactgggttcccttcacaaactggcaaaaccccaggttgatgggacagaagtaacatgccaggtggctgcatctcagaagtctgttgcctgcgatgtaggctaccctgctttaaagagagaacaacaggtgacttttactattaactttgacttcaatcttcaaaaccttcagaatcaggcgtctctcagtttccaagccttaagtgaaagccaagaagaaaacaaggctgataatttggtcaacctcaaaattcctctcctgtatgatgctgaaattcacttaacaagttttgaagatgttggtccaaaattcatcttctccctgaaggtaacaacaggaagtgttccagtaagcatggcaactgtaatcatccacatccctcagtataccaaagaaaagaacccactgatgtacctaactggggtgcaaacagacaaggctggtgacatcagttgtaatgcagatatcaatccactgaaaataggacaaacatcttcttctgtatctttcaaaagtgaaaatttcaggcacaccaaagaattggcggaagctcgatggcaagccagagtgacactgaactgtgaaggcattttaaattgttgtttggcctacaatgttggtctcccagaagcaaaaatattttccggtccttcaagtgaacagtttggctatgcagtgcagcagtttataaatccaaaaggcaactgcaggaggctccaaccatccccactcaccctggaacttcagattctgaatctccactctctagagctcttttcagtgattaaatgggctgttgttggcttatcaaataagaaccgtaatatcttcatggaatgctactatgagctgaatgggatgcctgagatactgcctctaggaagcaaagtggctcaaggctatattgtgtttgtatgcgcttctgggttcttcgctcggattttggttctggtggagcgtgtccatgggcggcccgtggccctgtcatctggcggtgttgtcagagataagagagaaatagcaccactgtccccagcccgagcagagaatgggcatcttaggttttctgtctcacctgtattgggtgcttcagatactttctccgggaaccagatgagttgttttgaggggccaccaaccctaatctacggatttcaggctctttccttgttggtgtttgcagagtttcatcctgaatcctcctcttcattctgcagattgtctctgggcccattccctgcgcaggtccctatctccagccagcctccccttctgagttccagatcagtatttccatcagccaccaaatttctccagctagacagtctttgttcagtgaccaatcatttaccagcagaacatacagaagagtggctccctacaggggagaatcctagcactgcaaatcatgagacaatagactctgtgtatgacagtgattcctatgccccttcaggtgatccatag

SEQ ID NO: 29226 - DNA, 1491 bp, Homo sapiens
  SIMILAR (701)..(624): 801254mologous to Escherichia coli peripheral membrane protein,accession number L08399,Smith-Waterman Score=88.
ttacaatcgggggggttctgcggctttatttggctgccgatgcaattcgccggtattgtgggcgatggtgtgtgggtaaggtctgggcggcgcgtttccgtttgtttgctgctggcgctcgatcactctgtgcacccggctattgctggcaagctggtggcgtttatgcagggaatcggttttatcatcgccgggcttgccccgtggttttctggcgtgctgcgtagtatcagcggcaattacctgatggactgggcatttcatgcgctgtgcgtcgttgggctgatgatcataaccctgcgttttgcaccagtacgttttccgcagctgtgggtcaaagaggcatgatgcgacgcttgttcctgcgctttgttcatgccggatgcggctaatgtagatcgctgaacttgtaggcctggccctgggcgcgaacgtctgcgacgtatggcgttgccaatggaagatgaagcgctggtactgttgctgattgaaaagatgcgcgaaagcggcgacatccacagccatcacggctggctgcatctgccagatcacaaagcgggcttcagcgaagagcagcaggccatctggcaaaaagcagagccactgtttggtgacgaaccgtggtgggtgcgtgaccccagcgccatgttctctttctgttgtagctccagcagtagttcgatgattggcgctagaatggtccccgtccagcgcggtggtcggttcatcggcaatcagcagttttggccgacaggcaatcgccatggcgatcatcacgcgctggctcatgccgccggaaagctgatgcgggtaaacatccagacgcgatgccggatcgggaataccgacctgattcagcaggtcaatcgctcgctgacggcgggtacttttgttgccgccctgatgcaccttaatcgcttccataatctggaaacccacggtgtagcacgggttaaggctggtcatcgggtcctggaagatcatcgccacttcggcacccaccaggttgcggcgctctttttctgagatacgctgcaaatcctggccgttaaactccagtttttctgccattacgcggcccggataatcaatcagccccataatcgccagtgaactgaccgacttaccggagccggactcacccacaatcccgaccacttcgccctgttttacgctgtagctgatgcggtctacggcgcggaacggcgcgctttcgtggccgttatgcacttgaagctccatccaaggtacaataataatctcgcccgcgggaactgaagcatcgtaatcatcggtgaaacgcgacagctcgcagttgagtagtgagagataacgctcatctgccaataatccttgtatctgattaataaagattacactgtctgcgttatttctcaactgaggaatgaatcccggatatcttaaccagcgtggtgcatcgggattgtccccagtcatacggcggaacgtcgccatcgtgcgccgctgcat

SEQ ID NO: 29227 - DNA, 1129 bp, Homo sapiens
  SIMILAR (1)..(618): 1001254mologous to Escherichia coli K12 putative membrane protein,accession number AE000121,Smith-Waterman Score=1038.
atgactttgccgtttaaaccccatgtgctggcgctaatttgcagtgccgggctttgtgccgcctctaccgggctatatataaaaagccgcacagtggaagcgcctgtggaaccgcaatcgacacaactggctgtgtctgacgctgccgcggttacgtttcctgcaacggtttccgcacctcccgtaacacccgccgtcgtcaaatccgcattcagcactgcacaaatagatcaatgggtcgcgcccgtcgcgctgtatcccgacgccctactttcgcaggtgctgatggcatcaacctatccgacaaacgttgctcaagcagtgcaatggtcgcacgataatccacttaaacaaggcgatgctgctattcaggcggtatctgaccagccgtgggacgccagcgttaaatcactggtggcctttccacaattgatggcattgatgggcgaaaacccgcaatgggtgcaaaacctgggcgatgcttttctggcccagccgcaggacgtgatggactcggtacagcgattgcggcaactggcgcaacaaaccggctcgctgaagtcatcaaccgaacagaaagttattaccacaacgaagaaagctgtaccggtaaaacaggggttaaaaaatcaacaaagtgttaacggttcctgcatgacaaacatcggtcacttcggtgctgcgggtaaactgctgaatgcgcataaagttcagttgccgacccgcttgtgggtggcaccgccaacccgtatgaacgccgcacagttgaccgaagaaggctactcaagcgtcttcggtaagagtggtgcgcgtatcgagatccctggctgttccctgtgtatgggtaaccaggcgcgtgtggcggacggtgcaacggtggtttccacctctacccgtaacttcccgaaccgtctgggtactggcgcgaatgtctttcctggcttctgcggaactggcggctgttgcggcgctgattggcaaactgccgacgccggaagagtaccagacctacgtggcgcaggctgcgataattacatcaatggcgcaatgcgatttcggtgcattgccgggagcagaggaacacactatggattacgaatttctgcgcgatattaccggagtggtaaag

SEQ ID NO: 29228 - DNA, 2466 bp, Homo sapiens
  SIMILAR (2466)..(1951): 991254mologous to Escherichia coli UDP-MurNAc-Tripeptide:D- Ala-D-Ala-Adding Enzyme,accession number U67893,Smith-Waterman Score=865.
ttactgctggcgtagctggagatccagcggcgttttgctgggttcgccgccaatttctcgcgccagtttcggcaccagatatcccgacaccagtgtcagcaactcacgcataatctgccgtgcttcgtcatcactcaccataaaatgcgccgcgccctgtactttatcgagcacatgcaggtaatacggcattacgccggcatcgaacaacgcattactcaggtttgccagcgtttgtgcgttatcgttcacatcacgtaacagaacgctctggttcagcaaagtaacgcctacccggcgcaacttagccatcgcctgacggaatgtttcatctacctcatgggcatggttgatgtgattcaccagcaagatttgcagcgtagaacgggcaaagcattcaaccagcgcctcggtgatacgtgccgggatcacaatcggcagacggctgtgaatccgcagacggtgcgcaacaaccgtcttccggagcctgtcatacgcgtaaaacagccagcgctggcgcgatttagccccgacgtatccccactgttcgtccatttccgcgcagacgatgacgtcactgcccggcgggttgagaagcggtgtaagtgaactgcagttgccatgttttacggcagtgagagcagagatagcgctgatgtccggcagtgcttttgccgttacgcaccaccccgtcagtagctgaacaggagggacagctgccttcacttccggcaaggcgcgggtttcaacatttcccccttcctgctgggtaaagacatcgcccgattcacataacggtccggcgacgacggtttccaccgttggcgcgtgttccagagaacgaccatcagctgccagggcacgtgaccctgctgcatgggcgacaaagtcattccggcaaccattctgggcattcagtccgatcgcgtgattcgcggccaccgctttatgggcgagccggaattcaccatcgataacgccgatcagtatccggaaattctgcgtgagcgtgggaaagtcatcgccgattacgaagaacgtaaggcgaagattaaagccgatgccgaagaagcagcgcgtaagattggcggtaacgctgacgcaaaattcgaagagaaattcctcgcggtgccggctgaagcgctggtttacaccatgaaaggtgaccagaaatacttcccggtgtatgcgaacgacggcaaactgctgccgaactttatcttcgttgccaacatcgaatcgaaagatccgcagcagattatctccggtaacgagaaagtcgttcgtccgcgtctggcggatgccgagttcttcttcaacaccgaccgtaaaaaacgtcttgaagataacctgccgggcctctcgaaaatcggcattagcagcccagatatagcactggagagactcaggattattcaagaagtgctgccagcactcgaaaatgtgattaagcaatttctcgtagattttgatctcttcggaaatgcgcaagcaatacggcaccttcacgatgtaaacacgatcgaggaaggcttcgttgtttttgttattacggaaagtgacccattcggactcgttcgagtgtgcgagaataatcccgttgaacggcagggcggagataccttccgtcccgttgtagttaccttccaatgctgtcatcacccgtacaggcaataaacgcgatattcggaccgctacgcccagcagccaccagtggaaggtaacgcattccccattacaggttattttccagggtagtttgctggaatcgggcggtcgcccggtgaagcgctggtactgttgctgattgaaaagatgcgcgaaagcggcgacatccacagccatcacggctggctgcatctgccagatcacaaagcgggcttcagcgaagagcagcaggccatctggcaaaaagcagagccactgtttggtgacgaaccgtggtgggtgcgtgacagtccaggctatttcgccctgatggttcgcgccaagttcaataactgcgtaatcgtattccggcgttaagcgcaacagcgtcatcggtacaccgatgtcgttgttgagattgcctgccgtataaagcgtgttgccgcactggcttaaaatcgccgccgtcatctctttaacggaggttttgccggaggaccccgtcagagcaaccacgcgcgccggaacttgctggcgaacccatgcagccagttcaccaaacgccagacgcgtatccttgacgattaactgcggcaggtcgatgtccagcggacggctaaccagtagtgcgcctgcgccgccagctttcgcctggtcggcaaaatcgtgggcatcaaaacgttcgcctttcagggcaacaaacaggcagcccggcgtcagttttcgggtatcagtggttacagcatcaagggtgatatctgcaccttgcagttcaccgttgagaatgtcggtaagttggctaagggttacgctaatcat

SEQ ID NO: 29229 - DNA, 929 bp, Homo sapiens
  SIMILAR (516)..(923): 1001254mologous to Escherichia coli K12 orf, hypothetical protein,accession number AE000121,Smith-Waterman Score=721.
cctgcgcgacggaacgacaaacagacaccagcacaaacagaacaaaaagcccaaacgacaccacacccagaagggaacacactaacacaggcaccgacaacagcgcacacggccgcggcagacagacgcgacaagagcaggcaagcaacaaaaggataaagcaacaagggaaaagaacaaaagagagacgcgaagaagagaaaccaccgaaagaagccgacgcacggacgaaaagaagcggcacccacaaggaagaaaaaaaattatcgtcgccgccgagaaagtccaagtcacacgaggggggggggagagaagaccgctcccccccaccgccgagtctgctcctgcaagtactggcggctgttgcggcgctgattggcaaatctgccgacgccggaagagtaccagacctacgtggcgcagataaaacagccgttgatacttaccgttatctgaacttcaaccagctttctcagtacaccgagaaagccgatggggctgcgataattacatcaatggcgcaatgcgatttcggtgcattgccgggagcagaggaacacactatggattacgaatttctgcgcgatattaccggagtggtaaaggtgcgtatgtccatggggcatgaagtggtcgggcactggtttaatgaagaggtgaaagaaaacctggccttgcttgatgaagtggaacaagcagcgcacgcactgaaaggtagcgaacggtcctggcaacgggcagggcatgaatacaccctgtggatggacggtgaagaggtgatggttcgcgccaatcaactggaattcgctggcgatgaaatggaagaggggatgaactactacgacgaagaaagcctgtcgctatgcggcgttgaggattttctgcaggtcgtggcggcttaccggaatttcgtgcagcagaagtactaa

SEQ ID NO: 29230 - DNA, 5375 bp, Homo sapiens
  SIMILAR (666)..(3446): 991254mologous to Homo sapiens Integrin alpha-2 chain,accession number W70542,Smith-Waterman Score=4728.
gaattcctgcaaacccagcgcaactacggtcccccggtcagacccaggatggggccagaacggacaggggccgcgccgctgccgctgctgctggtgttagcgctcagtcaaggcattttaaattgttgtttggcctacaatgttggtctcccagaagcaaaaatattttccggtccttcaagtgaacagtttgggtatgcagtgcagcagtttataaatccaaaaggcaactggttactggttggttcaccctggagtggctttcctgagaaccgaatgggagatgtgtataaatgtcctgttgacctatccactgccacatgtgaaaaactaaatttgcaaacttcaacaagcattccaaatgttactgagatgaaaaccaacatgagcctcggcttgatcctcaccaggaacatgggaactggaggttttctcacatgtggtcctctgtgggcacagcaatgtgggaatcagtattacacaacgggtgtgtgttctgacatcagtcctgattttcagctctcagccagcttctcacctgcaactcagccctgcccttccctcatagatgttgtggttgtgtgtgatgaatcaaatagtatttatccttgggatgcagtaaagaattttttggaaaaatttgtacaaggccttgatataggcccccacaaagacacagggtggggttaattcagtatgccaataatccaagagttgtgtttaacttgaacacatataaaaccaaagaagaaatgattgtagcaacatcccagacatcccaatatggtggggacctcacaaacacatttggagcaattcaatatgcaagaaaatatgcttattcagcagcttctggtgggcgacgaagtgctacaaaagtaatggtagttgtaactgacggtgaatcacatgatggttcaatgttgaaagctgtgattgatcaatgcaaccatgacaatatactgaggtttggcatagcagttcttgggtacttaaacagaaacgcccttgatactaaaaatttaataaaagaaataaaagcgatcgctagtattccaacagaaagatactttttcaatgtgtctgatgaagcagctctactagaaaaggctgggacattaggagaacaaattttcagcattgaaggtactgttcaaggaggagacaactttcagatggaaatgtcacaagtgggattcagtgcagattactcttctcaaaatgatattctgatgctgggtgcagtgggagcttttggctggagtgggaccattgtccagaagacatctcatggccatttgatctttcctaaacaagcctttgaccaaattctgcaggacagaaatcacagttcatatttaggttactctgtggctgcaatttctactggagaaagcactcactttgttgctggtgctcctcgggcaaattataccggccagatagtgctatatagtgtgaatgagaatggcaatatcacggttattcaggctcaccgaggtgaccagattggctcctattttggtagtgtgctgtgttcagttgatgtggataaagacaccattacagacgtgctcttggtaggtgcaccaatgtacatgagtgacctaaagaaagaggaaggaagagtctacctgtttactatcaaaaagggcattttgggtcagcaccaatttcttgaaggccccgagggcattgaaaacactcgatttggttcagcaattgcagctctttcagacatcaacatggatggctttaatgatgtgattgttggttcaccactagaaaatcagaattctggagctgtatacatttacaatggtcatcagggcactatccgcacaaagtattcccagaaaatcttgggatccgatggagcctttaggagccatctccagtactttgggaggtccttggatggctatggagatttaaatggggattccatcaccgatgtgtctattggtgcctttggacaagtggttcaactctggtcacaaagtattgctgatgtagctatagaagcttcattcacaccagaaaaaatcactttggtcaacaagaatgctcagataattctcaaactctgcttcagtgcaaagttcagacctactaagcaaaacaatcaagtggccattgtatataacatcacacttgatgcagatggattttcatccagagtaacctccagggggttatttaaagaaaacaatgaaaggtgcctgcagaagaatatggtagtaaatcaagcacagagttgccccgagcacatcatttatatacaggagccctctgatgttgtcaactctttggatttgcgtgtggacatcagtctggaaaaccctggcactagccctgcccttgaagcctattctgagactgccaaggtcttcagtattcctttccacaaagactgtggtgaggatggactttgcatttctgatctagtcctagatgtccgacaaataccagctgctcaagaacaaccctttattgtcagcaaccaaaacaaaaggttaacattttcagtaacactgaaaaataaaagggaaagtgcatacaacactggaattgttgttgatttttcagaaaacttgttttttgcatcattctccctaccggttgatgggacagaagtaacatgccaggtggctgcatctcagaagtctgttgcctgcgatgtaggctaccctgctttaaagagagaacaacaggtgacttttactattaactttgacttcaatcttcaaaaccttcagaatcaggcgtctctcagtttccaagccttaagtgaaagccaagaagaaaacaaggctgataatttggtcaacctcaaaattcctctcctgtatgatgctgaaattcacttaacaagatctaccaacataaatttttatgaaatctcttcggatgggaatgttccttcaatcgtgcacagttttgaagatgttggtccaaaattcatcttctccctgaaggtaacaacaggaagtgttccagtaagcatggcaactgtaatcatccacatccctcagtataccaaagaaaagaacccactgatgtacctaactggggtgcaaacagacaaggctggtgacatcagttgtaatgcagatatcaatccactgaaaataggacaaacatcttcttctgtatctttcaaaagtgaaaatttcaggcacaccaaagaattgaactgcagaactgcttcctgtagtaatgttacctgctggttgaaagacgttcacatgaaaggagaatactttgttaatgtgactaccagaatttggaacgggactttcgcatcatcaacgttccagacagtacagctaacggcagctgcagaaatcaacacctataaccctgagatatatgtgattgaagataacactgttacgattcccctgatgataatgaaacctgatgagaaagccgaagtaccaacaggagttataataggaagtataattgctggaatccttttgctgttagctctggttgcaattttatggaagctcggcttcttcaaaagaaaatatgaaaagatgaccaaaaatccagatgagattgatgagaccacagagctcagtagctgaaccagcagacctacctgcagtgggaaccggcagcatcccagccagggtttgctgtttgcgtgcatggatttctttttaaatcccatattttttttatcatgtcgtaggtaaactaacctggtattttaagagaaaactgcaggtcagtttggatgaagaaattgtggggggtgggggaggtgcggggggcaggtagggaaataatagggaaaatacctattttatatgatgggggaaaaaaagtaatctttaaactggctggcccagagtttacattctaatttgcattgtgtcagaaacatgaaatgcttccaagcatgacaacttttaaagaaaaatatgatactctcagattttaagggggaaaactgttctctttaaaatatttgtctttaaacagcaactacagaagtggaagtgcttgatatgtaagtacttccacttgtgtatattttaatgaatattgatgttaacaagaggggaaaacaaaacacaggttttttcaatttatgctgctcatccaaagttgccacagatgatacttccaagtgataattttatttataaactaggtaaaatttgttgttggttccttttataccacggctgccccttccacaccccatcttgctctaatgatcaaaacatgcttgaataactgagcttagagtatacctcctatatgtccatttaagttaggagagggggcgatatagagactaaggcacaaaattttgtttaaaactcagaatataacatttatgtaaaatcccatctgctagaagcccatcctgtgccagaggaaggaaaaggaggaaatttcctttctcttttaggaggcacaacagttctcttctaggatttgtttggctgactggcagtaacctagtgaatttttgaaagatgagtaatttctttggcaaccttcctcctcccttactgaaccactctcccacctcctggtggtaccattattatagaagccctctacagcctgactttctctccagcggtccaaagttatcccctcctttacccctcatccaaagttcccactccttcaggacagctgctgtgcattagatattaggggggaaagtcatctgtttaatttacacacttgcatgaattactgtatataaactccttaacttcagggagctattttcatttagtgctaaacaagtaagaaaaataagctagagtgaatttctaaatgttggaatgttatgggatgtaaacaatgtaaagtaaaacactctcaggatttcaccagaagttacagatgaggcactggaaaccaccaccaaattagcaggtgcaccttctgtggctgtcttgtttctgaagtactttttcttccacaagagtgaatttgacctaggcaagtttgttcaaaaggtagatcctgagatgatttggtcagattgggataaggcccagcaatctgcattttaacaagcaccccagtcactaggatgcagatggaccacactttgagaaacaccacccatttctactttttgcaccttattttctctgttcctgagcccccacattctctaggagaaacttagattaaaattcacagacactacatatctaaagctttgacaagtccttgacctctataaacttcagagtcctcattataaaatgggaagactgagctggagttcagcagtgatgctttttagttttaaaagtctatgatctgatctggacttcctataatacaaatacacaatcctccaagaatttgacttggaaaaggaattc

SEQ ID NO: 29231 - DNA, 2582 bp, Homo sapiens
  SIMILAR (1973)..(2578): 981254mologous to Escherichia coli SEL B (AA 1-614),accession number X16644,Smith-Waterman Score=1052.
atgttcgccattatcagctactccagccttgctgctgtactgctgaccgcgactctgaccgccgcaggcattatctccttccccgtggcgctctgtctggtgattggtgctaacctcggttccggtctgctggcaatgctcaacaacagtgccgccaatgccgcagcccgccgtgtcgcgctgggtagtctgctgtttaagctggtgggtagcctgattatcctgccgtttgtccatttgctggcagagacaatggggaagttgtcattgccaaaagcggaactggtgatctatttccacgtcttctacaaccttgtacgttgcctggtcatgctgccatttgttgacccgatggcacggttttgcaaaacgattattcgcgatgaaccggaactggatacccagctacggcctaaacatctggatgtcagcgcgctggatacgcccacgcttgctctggcgaacgccgcgcgcgaaacctgcgcattggcgacgccatggacagatgatggaagaaaatatgcttattcagcagcttctggtgggcgacgaagtgctacgaaagtaatggtagttgtaactgacggtgaatcacatgatggttcaatgttgaaagctgtgattgatcaatgcaaccatgacaatatactgaggtttggcatagcagttcttgggtacttaaacagaaacgcccttgatactaaaaatttaataaaagaaataaaagcaatcgctagtattccaacagaaagatactttttcaatgtgtctgatgaagcagctctactagaaaaggctgggacattaggagaacaaattttcagcattgaagatatggacctcggcgatgaggtctacaccgtcgggcgtccacatccgatgatcgacccaaccttacgcaaccagttaattgccgatctcggcgctaaaccgcaagtgcgcgtgttgctgcttgatgtcgtgattggcttcggtgcgaccgccgatcctgccgcctcgctggtgagcgcctggcaaaaagcctgtgccgcgcgtttagataatcaaccactgtatgccattgccacggtgacaggcactgaacgtgacccgcaatgccgctcgcagcaaatcgccacgctggaagatgcggggattgcggtcgtgagttcgctaccggaagccaccttgctggcggcagcgttaattcatccgctctcgcctgccgcacagcaacacacaccgtcattactggaaaacgtcgccgtgattaacatcggattacgcagctttgcgctggagctacaaagcgccagcaaaccggttgtgcattaccaatggtcgccagtcgccgggcagggaaaatggctggcgaatcctgagctgctggaagccgatgcagatgcggaatacgcggcagtgatcgacatcgatctggcggatattaaagagccaatcctgtgtgctccgaacgacccggatgacgcgcgtccgctgtctgcggtacagggtgagaagatcgacgaagtgtttatcggttcctgcatgaccaacatcggtcacttccgtgctgcgggtaaactgctggatgcgcataaaggtcagttgccgacccgcctgtgggtggcaccgccaacccgtatggacgccgcacagttgaccgaagaaggctactacagcgtcttcggtaagagtggtgcgcgcgtatcgagtatcccctgtgctgttccctgtgtatgggcgcgtgtggcggacggtgcaacggtggtttccacctctacccgtaacttcccgaaccgtctgggtactggcgcgaatgtcttcctggcttctgcggaactggcggctgttgcggcgctgattggcaaactgccgacgccggaagagtaccagacctacgtggcgcaggtagataaaacagccgttgatacttaccgttatctgaacttcaaccagctttctcagtacaccgagaaagccgatgggcttttgaagccccgtttccgcccgctggcagcggaaaattctcgacacattagcgacttatcatgagcaacatcgcgatgaacctggccctgggcgcgaacgtctgcgacgtatggcgttgccaatggaagatgaagcgctggtactgttgctgattgaaaagatgcgcgaaagcggcgacatccacagccatcacggctggctgcatctgccagatcacaaagcgggcttcagcgaagagcagcaggccatctggcaaaaagcagagccactgtttggtgacgaaccgtggtgggtgcgtgacctggcaaaagagacgggaaccgacgagcaggcaatgcgcctgactctacgccaggcggcgcagcaaggaataattaccgcgatcgttaaagatcgttattaccgtaacgatcggattgtcgagtttgccaatatgatccgcgatctcgatcaggagtgtggttcaacctgcgcggcggatttccgcgatcgcttaggcgtaggccgaaagctggcaattcagattctggaatattttgaccgcattggctttacgcgtcgtcgtggaaatgatcatttattgcgcgacgcattattattttccggaaaaataa

SEQ ID NO: 29232 - DNA, 2409 bp, Homo sapiens; identical to SEQ ID NO: 15935
  SIMILAR (607)..(1209): 1001254mologous to Escherichia coli K12 putative ligase,accession number AE000154,Smith-Waterman Score=1049.

SEQ ID NO: 29233 - DNA, 1408 bp, Homo sapiens
  SIMILAR (431)..(1090): 981254mologous to Escherichia coli tdcABC operon transcriptional activator,accession number D90773,Smith-Waterman Score=1101.
gtccctggagcagatggttccaggccctgggcattcttgtgacatggatacccatgccatgccgccagctgctaagtctggaagtggtcatcaagtgatttgggtggaagggttggggggacacgaggaggaaggagaggatgtcattcagaacagaagcatcgggaattggatagattcagttattcattggcggcagcaggtgcgccagcgattggccgatttgcgtttccgaagggaggccatcaggcgctggcgcggacggcattgttttttaatgttcgaaacccgcttctggtgcttggaaaaaggcagtcatataaaaaatcggtttgccgttttgaatagcagcaacccggcgggcgctgaagctgttaccgtcacgcagcgtttcgacatcataaataatcggcttcttactatcgccagggcgaagaaagtaaaaattcatcaaattcgggcttttgttgaagtggctcgtcagggcagcattcgcggagcgagccgaatgttgaatatgtcgcaaccggcactgagtaaatctattcaggagctagaagaagggttagcggcgcaactcttttttcgccgtagtaaaggcgtgacgttaactgatgccggtgaaagtttttatcagcacgccagtctaattcttgaagagctgcgcgcagcccaagaggatattcgccaacgacaagggcaactggcagggcagattaatatcggcatgggggccagtatttcccgcagtctgatgccagctgtcatatctcgttttcatcagcagcatccgcaggtaaaagtacgcattatggaagggcaactggtgtcgatgactaatgaattgcgtcagggcgaattggatttcaccatcaatacctattatcagggaccgtacgaccacgaatttacttttgagaaattactggaaaagcaattcgcgatcttttgccgcccgggacaccccgccattggtgcccgttcgatcaaacagttactggattacagctggacaatgccgacgccacacggcagctactacaaacagttgagtgaattgcttgacgatcaggcgcaaacgccacaggttttggagttgctcctcgctaatgcgctcttccagcgcctcgcaggcaggcaaattagcaaaaggcgtatcgctggtggaaacatccgcctcgacgatcagcgcatcggcgtttttgagctttttgagcaaacgggtgggcaggggagccatatcgtggctacccatatgaatactgccaatcagatgaaaatggcgattgccggggagggtgatatcgatggcaggccaggtgtaatgattaccgcgcagcgcggcccaaagcgtttttacccggtacaacagatccatacgacctccctttgtgaaatatcatgctag

SEQ ID NO: 29234 - DNA, 1821 bp, Homo sapiens; identical to SEQ ID NO: 17707
  SIMILAR (1063)..(1773): 941254mologous to Escherichia coli Ig heavy chain-binding protein,accession number D90705,Smith-Waterman Score=1122.

SEQ ID NO: 29235 - DNA, 1049 bp, Homo sapiens; identical to SEQ ID NO: 24637
  SIMILAR (3)..(65): 851254mologous to Escherichia coli branching enzyme (EC 2.4.1.18),accession number M13751,Smith-Waterman Score=105.

SEQ ID NO: 29236 - DNA, 1398 bp, Homo sapiens
  SIMILAR (1090)..(992): 841254mologous to Arabidopsis thaliana putative glycine-rich cell wall protein,accession number AL022141,Smith-Waterman Score= 161.
ttattgatatgcatcagtgatcagccaactgccccacgcctgctgcccgagcagcggcagcgacagcagcagtagcggcagcattgcaacaatccctattttctcaatcaacatctcttccgctagcactaccgactgctcctggaaaagcaacccgcggccttttacctcctccgtgctagtgtagatcgttctagtatccaaagactggaagaaatctctctcggtgccaaggtggagaaaggagggtggtagacagaggtggacaccaagaaagggaggaaacggaacccgactctgcggtgctgggcccaaggcagccacagctccaaaggggcccccggccgtggccgtgacttgacagagcctccggtctaacttctgatcaattccactgctctcctgacccctcaagacagtcccccattcaagcaccgcgggtacatttgcaagataaaacgccgcagacactaatgcaaatacattgcccgagttcccatcaccctgggttctcccctcgcaggcgtggggcccaatggccacgaacatgtcaggaaaacaaagctggggctgcgaggtggaacgatgaaacggcacacttggcggccgagggcagagcggagaagtcgccaccacagccaccggcgcccctttcttgcctgctcgtagatctgccctccggcccagaagaggccgaggaccatttcttagcccggcctgggctcggctactgccgccgccgcccgcgctctcgggctccgccggctgccgctccgtgttttcccccatcccggcttcacgttcaaggtttagctgcgaggtcacgtccattgacgtcagctccctgtctccctctacgtccgggctgtagccttcgagaacggttgtttcggctcctgttctgtgggcggctgaggaccgccggctgcccggctcggagaagaacaggttagaggaggcagctccagcccatgcataatcagggctccgcggcgcctccattctttcctcctcctcctcctcctcctcctcctcctcctcctcctcctcctcctcctcctcctcctcctcctcttccacctctcctcctcctcctccttctcctccacctcctcctcctcttcttgctctcgctcctttatgtaggatcaggacaaacacaccggccacgttgcagggcatagagtgtcggtgcatatatttagatggcagtagcaaggaacgcgtgcgtgtacggcccgagggccggtggctcggtgactcgctggctaggtgggtgttggggaagagggtgggtagcgtcgctgccgctgccgccgcgggtccgggtgctctgtcccagcccggcagccgagcgcgcagtgtcggagccccctcccaccccgccctcacccccat

SEQ ID NO: 29237 - DNA, 1779 bp, Homo sapiens
  SIMILAR (920)..(36): 271254mologous to Babesia bigemina 200 kDa antigen p200,accession number AF142406,Smith-Waterman Score=299.
ctattcttggctctctgccagagcaaaatatttactttcacgggcgcttttctcctcccctctcctctgccccggttcttctgccctccctcttgctcttgctcggtttccttcctctcgcgttttttccgctctgctccttcttttgtttgttggtttctggtgctgctggctttcccccacccttgtcagcgcccggcttcctcttctctccttcgtgtctcctcgtccttctccccccgtcctcctcctctctccgcttccgcacccttgttgcgtctcgcccgtccggtcgttcctccttccggtttggtttccccgttcctcgccgccgcgcctctgtctttcttctgttccgttcgcctttgccctttcgtctccctttgcgctcgtctctccctcttcttctctcctattctgtttcgctctcgcctccccctctcctcctgctgtgctttttttctgtttgctctccgcggctgctgcctctctctcttctcttttcgttgcgttgtcttcttgtttccttttcttgttttctctgtgtcgcgttgcgtcgttcgtccgttttccttcctttttgtttgtctctgttctgtgcggctttccgtgcgctccctttgtccgctcccccctcttttgtcgcctgccctgttcttcgctcgtcctcgccgcccgtgtgccgcgtgtcgcggcgttcctctgtggtgctccctcctccttgtgcttgtgcgtcccctcttctctttgcttcttccgtgtgccgctcctgcgtccctctgttcttctgtctttcttctttgtgctctctgcctctctttttgctctgtgcgtgttttcctgctctcgtggtttcgctgcctcgccttctctttgtttttcccttgttgttcgtttggctttttgttctttttgttgcgtgcgtttgtgttgattgtttgtgttcttctttacactcccctcgcaggcgtggggcccaatggccacgaacatgtcaggaaaacaaagctggggctgcgaggtggaacgatgaaacggcacacttggcggccgagggcagagcggagaagtcgccaccacagccaccggcgcccctttcttgcctgctcgtagatctgccctccggcccagaagaggccgaggaccatttcttagcccggcctgggctcggctactgccgccgccgcccgcgctctcgggctccgccggctgccgctccgtgttttcccccatcccggcttcacgttcaaggtttagctgcgaggtcacgtccattgacgtcagctccctgtctccctctacgtccggctccgatgtctttttccgtccttcccatcgcgtccatcctttccctccctccttccgtcctcctcctccgtcctcctcctcctcctcctcctcctcttccacctctcctcctcctcctccttctcctccacctcctcctcctcttcttgctctcgctccggccacgttgcagggcatagagtgtcggtgcatatatttagatggcagtagcaaggaacgcgtgcgtgtacggctgagcatgcatgtgtgtacagatgcgtgtgtatgtgcgcgcgcgcgcccgagggccggtggctcggtgactcgctggctaggtgggtgttggggaagagggtgggtagcgtcgctgccgctgccgccgcgggtccgggtgctcttatttccagcaggagaaacttttgaaaatttcccacttttattcactacagacagctgaattaagtccctaactgcgtaatgttccatctccat

SEQ ID NO: 29238 - DNA, 674 bp, Homo sapiens
  SIMILAR (144)..(46): 421254mologous to Homo sapiens Human prostate cancer- associated protein 68,accession number Y48282,Smith-Waterman Score= 64.
cgagccactaccgttatggaattaccgcgtcgacgatttcgtggggctccgacactgcgcgctcggctgttgttctgggacagagcacccggacccgcggcggcagcggcagcgacgctacccaccctcttccccaacacccacctagccagcgagtcaccgagccaccggccctcggggtaagccacagcgcgcacacggcagcgacggtgacggttcacacgctttgggttactaccatgcgccaataagggagattagaaacagaaaaggagattacagagagatcagagataagaggtgtacctctctgtgttccttgtcacatagcgcgcgcgcgcacatacacacgcatctgtacacacatgcatgctcagcccgtacacgcacgcgttccttgctactgccatctaaatatatgcaccgacactctatgccctgcaacgtggccggtgtgtttgtcctgatcctacataaaggtaggcaggtatgtgggagagtccagggcaggaacaaacagccacgcgcaatttaactgcagccaaactcaaagagaccttgagccttgccgaattgttttcactcaggccagggtgccccccaggaaaccggatatttttgcaatcagttgtggggattcctggcatttatttcattaaaatgttgctggaaaa

SEQ ID NO: 29239 - DNA, 1434 bp, Homo sapiens
  SIMILAR (130)..(1425): 921254mologous to Escherichia coli branching enzyme (EC 2.4.1.18),accession number M13751,Smith-Waterman Score=2273.
atgatccccctggccagtgcatatcagggacagtgtgactggcggactgcgatcttcaagctggaacagctcccacaacttcgaatcagcctccagctctatcagatcaagctgttcctccgggagtcgatcagcgaatttaacgccgacgccgacaaagttcatcagatgcgcctgcgtaaagagagcggcatctgggaactgtttatccctggggcgcataacggtcagctctataaatacgagatgattgatgccaatggcaacttgcgtctgaagtccgacccttatgcctttgaagcgcaaatgcgcccggaaaccgcgtctcttatttgcgggctgccggaaaaggttgtacagactgaagagcgcaaaaaagcgaatcagtttgatgcgccaatctctatttatgaagttcacctgggttcctggcgtcgccacaccgacaacaatttctggttgagctaccgcgagctggccgatcaactggtgccttatgctaaatggatgggctttacccacctcgaactactgcacattaacgagcatcccttcgatggcagttggggttatcagccaaccggcctgtatgcgccaacccgccgttttggtactcgcgacgacttccgttatttcattgatgccgcacacgcagctggtctgaacgtgattctcgactgggtgccaggccacttcccgactgatgactttgcgcttgccgaatttgatggcacgaacttgtatgaacacagcgattcgcgtgaaagctatcatcaggactggaacacgctgatctacaactatggtcgccgtgaagtcagttactttctcgtcggtaacgcgctttactggatgaaccgttttggtattgatgcccgtaaagagggggagtggatcccgaacgaatttggcgggcgcgagaatcttgaagcgattgaattcttgcgtaataccaaccgtattcttggtgagcaggtttccggtgcggtgacaatggctgaggagtctaccgatttccctggcgtttctcgtccgcaggatatgggcggtctgggcttctggtacaagtggaacctcggctggatgcatgacaccctggactacatgaagctcgacccggtttatcgtcagtatcatcacgataaactgaccttcgggattctctacaactacactgaaaacttcgtcctgccgttgtcgcatgatgaagtggtccacggtaaaaaatcgattctcgaccgcatgccgggcgacgcatggcagaaattcgcgaacctgcgcgcctactatggctggatgtgggcattcccgggcaagaaactactgttcatgggtaacgaatttgcccagggccgcgagtggaaccatgacgccagcctcgactggcatctgttggaaggcggcgataactggcaccacgtcgtcctagcgtga

SEQ ID NO: 29240 - DNA, 1695 bp, Homo sapiens
  SIMILAR (319)..(981): 991254mologous to Escherichia coli multidrug resistance-like ATP-binding protein Mdl,accession number U82664,Smith-Waterman Score=1108.
ggaaaaaataggcctcggcctgaccgcttttgtgctgataaaaacgcaacatcacagcagcgaatggtattgccgctttgtcacggtggttaccgaaatgccagaagtgctggggttctggcgcatggctggtgaatacgattatctgatgcgcgtccaggttgccgacatgaaacgctacgacgagttttataagcgtctggtaaacagcgtgccggggctgtcggacgtcacttccagcttcgcgatggaacagattaaatacaccacttctttacccatcgaataaatatccagaatcaggtcaggacacaacgcgtgcgattatttgctcaattaagctggtatttccgtcgggaatggcgtcgctatctcggggctgtcgccttgcttgtcattatcgcgatgctgcaactggttccgccaaaagtggttggtattgttgtcgatggcgtgacagaacaacactttactaccgggcagatcctgatgtggatcgccaccatggtgctgattgccgttgtggtttatctcctgcgttacgtctggcgggtattgctgtttggtgcgtcttatcaactggctgttgaactgcgtgaagattattaccgtcagctaagccggcagcatcctgagttttacctgcgtcatcgcaccggtgacctcatggctcgtgcgaccaatgacgtcgatcgcgtcgtgtttgccgccggagaaggggtgctgacgctggtggattcactggtgatgggctgcgctgtgttgattatgatgtctacgcaaattagctggcagttgaccttattttccctgttgccgatgccagtgatggcgatcatgattaagcgcaacggcgatgctttgcatgaacgctttaagctggcacaggcggcgttttccagtcttaatgaccgcacccaggaaagcctcaccagtatccgcatgatcaaagcctttggtctggaagatcgccagtcggcgtattgccgcgagcagtccacgtatttggcatcaatgaagagacggacgcctgttagtcgaacatttgttcatccggtgatgaaaagcccttacggactgacgctcaattcccggagaataccgggtccacgcctggacgggagaacatcgatgagtcacatcacaacggaagatccagcaactttacgcctgccctttaaagagaaactctcttacggtattggcgacctggcctctaacatcctgctggatatcggtacgctttatcttttgaagttttataccgacgttctggggctgccaggcacctatggcggcattatctttttgatttcaaaattctttactgcgtttaccgatatgggtaccggcattatgttggattcccgacgcaagatcggtccaaaaggtaagttccgtccttttattctgtatgcgtcattcccggtcaccttactggcgatcgccaactttgtcggcacaccgtttgatgtcaccggtaaaacggtgatggccactattctgtttatgctttacggactgtttttcagcatgatgaactgctcctacggcgcaatggttcccgctatcaccaaaaaccccaacgacgcgcctcactggcggcatggcgtcagggcggcgctacgctgggcctgctgctgtgcagcggtggattcgtgccagttagattataggatctgtgatcggatatga

SEQ ID NO: 29241 - DNA, 1420 bp, Homo sapiens
  SIMILAR (226)..(594): 861254mologous to Escherichia coli YbaO,accession number D82943,Smith-Waterman Score=561.
atgagcctgcacatggtaactgccctcatagggaattctgtgaagaatgaagaagttttgtctttttcaagaatgtcacataaatggaatcatactgtaagcaacctcttgaggctggcgtctttcagcatgtgtgagaaccgtcaagtcgttggcgcgtttgtgacggattatttcgatgacgcccggcaaaatagaaaccacaataatcccgacgatcagcagcttaagagatattgtgaggattcagtccaggcactggctgaagccgttaatctgacaaccaccccttgctggaagcgcctgaaacggctggaggacgacggtatccttatcggcaaagtcgccctgctggatccggaaaaaataggcctcggcctgaccgcttttgtgctgataaaaacgcaacatcacagcagcgaatggtattgccgctttgtcacggtggttaccgaaatgccagaagtgctggggttctggcgcatggctggtgaatacgattatctgatgcgcgtccaggttgccgacatgaaacgctacgacgagttttataagcgtctgctggtatttccgtcgggaatggcgtcgctatctcggggctgtcgccttgcttgtcattatcgcgatgctgcaactggttccgccaaaagtggtggtattgttgtcgatggcgtgacagaacaacacttactaccggtaccgagctcctgcggtgccgctgacggctgccagcacgccgacgccgctgacgaatattttgtaagtaatggcaaactgtcagctcatcgatatccagtcgtcgcgtatccggtgaacaaaacgcaaaatcgtctgccaaatttttctccagcagcagaatactctcgttatgcagcgatattttttgctgttcatgataaatatcgaatgaacgacgaatgaggatcaccgagcagacagagtcatgattatcccttataaaaggttgtacagactgaagagcgcaaaaaagcgaatcagttgatgcgcaatctctatttatgaagttcacctgggttcctggcgtcgccacaccgaaacaatttctggttgagctaccgcgagctggccgatcaactggtgcctttgctaaatggatgggctttacccacctcgaactactgcccattaacgagatccccgccgttttggtactcgcgacgacttccgttatttcattgatgccgacacgcagctggtctgaacgtgattctcgactgggtgccaggccacttccgactgatgactttgcgcttgccgaatttgatggcacgaacttgtatgacacagcgatccgcgtgaaggctatcatcaggacggccacgttgcagggcatagagtgtcggtgcatatatttaatggcagtagcaaggaacgcgtgcgtgtacggctgagcatgcat

SEQ ID NO: 29242 - DNA, 405 bp, Homo sapiens
  SIMILAR (248)..(3): 981254mologous to Homo sapiens candidate tumor suppressor protein,accession number AF254956,Smith-Waterman Score=410.
tgcatgtctttcagtggaccatcagatgattgcaactcatttaaatttactatcccacgatgtacaaggagagcaatatgaattagctccgtgatctctgccaaacttctgtgacatgagtagatcccactgaccatgtcatagttctgacatgaagtgttcacgctgctgggcccagctgctttagagataaggagcaccaccaagcccctcaactggaggctattccagctgtcatgtacaagccccagtaactaaaaggaagcggcaattcttgaccctcagagtaaggtggcttcctggagcagtgaccagaaacgaactttaactcgtgcttactgcacgccagactgggcaaacaacagtcccagctcagcactgcccccggccacccggggtagaaac

SEQ ID NO: 29243 - DNA, 1094 bp, Homo sapiens
  SIMILAR (775)..(632): 611254mologous to Homo sapiens candidate tumor suppressor protein,accession number AF254956,Smith-Waterman Score=114.
  misc_feature (1)...(1094): n = a,t,c or g
tcaagcagggcagtcatatcgtaaaactccaaaataatctcctttgactccatgtcttgcattcaggtcacgctgatgcaaagggtgggctcccatggtcttgggcagctctgcccctgtggctttgcagggtacagccaccctcttggctgctttcatgggctggtgttgagtggctgcagcttttctgggcacacggtacaagctgtcagtggatctaccgttctggggtctggagaatggtggccctcttctcacagctccactaaacggtgccccagtagggacttcttgtggaggctccaaccctacatttcccttctgcagtgccctaccagaggttctccatgagggctccgcccctttgctccggttcccaacaagttcctcatctccatctgagaccacctcagcctggatcttattgttcatatcactgtcagcatttttgtcaaagccattcaacaagtctctggctgtggtaagcagagggtgctgagtgcccaccagcttccgcacctgcatagcgatgttgctgagctcgtcgctcagcaggcagcgaaggctcatgaaggacgtggggtaccccacgatcttctccgcctctgacactacctgattccagtgggccggggactttggaggaccngacccacgccaagagccccacccgaggagttgttgtcgagggacggggacccaccacaggcgaccgcggggaacccgaggctccaagataacgtggcaagtgcaacagcagctgccgaaagttcatggtttgagtctggaagggtctgggacctgggggtatccagaagtgccgcgggaaacaaaccaggggcagaggaggaacttacagtaactaaaaggaagcggcaattcttgaccctcagagtaaggtggcttcctggagcagtgaccagaaacgaactttaactgctgctttctgcagcccaggctgggcaaacaacagtcccagctcagcactgcccccggccacccggggtagaaaccacagccactgcctatgtggaggacgccatatggaggcacgaaatcgtcgaccgggaattcagaccggtagtcgaggcgtg

SEQ ID NO: 29244 - DNA, 6043 bp, Homo sapiens
  SIMILAR (2450)..(5914): 451254mologous to Lytechinus variegatus embryonic blastocoelar extracellular matrix protein precursor,accession number AF287478,Smith-Waterman Score=2527.
gggaagctgccaagcctacttcatgcttgcattcggtgcatttgcagacttaacaccatgtggaatcgaccaaggtagcttacacactccagagcagcagctccaactgtacctgaggccctttgaccaaggctggaaccagagcaggggtgtgcttcactgggggaaacttactcatctgggttccctggattcctcagaactagcaggaagaaagattaagtttgctggtctgcagagactgtggccaccctttcccctaggggctcaggcccagggagatcagagttctgcccctgagcccctggatggggttggagttcctgcagggaggcccagcccagagaggaggaaacaccaatccctggatgaatggacaacaggagctcaatctcacagacgcaggactgacccgagtacagtcaccgtctctctcccaaccctgagggacaatccctttgtggcacctggggaagagagtatccagacagctggtcggagtctggcagcgcgggcagcagtgcggcggccacggctcccggcgagaaggtgtcagccgaagcgcagccgctggctcttgctggatccgcaagtcggctaccgactggacagcagctactgcttccactgcctgcacctgccgctcagcagatccctctttgcacagggcaccccaccccgggaatcccaacgccaggagccatccgtggccatggcgggggcttctcggcacccgactgggacgccccggcagctccttgtggcgctcgcctgcctgctcttgagtcgccccgcgctgcagggacgggcatcctcacttgggaccgagcccgacccggcgctttacctgcccgcccggggtgcgcttgacggcactcgccccgacggccccagcgtgctgattgccaaccctggactccgggtgcccctgggtcgttccctttggctcgacccgctccgggatctggtgattggagtgcagccgggggaccggtgcgaagtcacggtactggacgccctgccgcggctcaagggcgcgctctccccgcgccgcttcccctgcaccttcgggccccgccaagtccagtacactcacttcggctcccacagccccggacgcgcccgggtgctgctgcagctgcgctacgacgccccgactcacactctggtgctgcccttcacgctggcggtggacttggtcttctcccagctggagctggtgacgcgtaacaggcctttggtagtggagaagctgcgaagctggagccgcgccatagacaggagagtgctggacttcgcctccctgaagtctggagccacggccacccgcaggtgccggcttaccccacttcctcacgaggacggccccctgcccaagtacgggcgcttggtggacgcggtgggggcccctctccccaggggcaagggcgtagactgtgaggctttcctccgtgctggggtgcgctatcagcacacagccacctcctcgcccaaccgtgactacgtgcccatgatggtggagctgctggggcctgagggccaagacgctgggtccgcgggtgtgctggtccgcgagcacttccagctgctcgtgaggatccgcggcggagccgagaacacaccgcccaggcccagcttcatggccacgatgatgatggaggtggatccactggtgctgacagccctgacgcctgacgcactggccgcggaggacgtcgagtcagaccctggtgacctggtgttcaacattctgaacgcccccactcacccaccagggcacccggggcaacagggctacgtggtcagcaccgacgaccctctagggcttccagtctccttcttcacccagcaggagctgagggagctgaagattgcctatcagccccctgcagagaactcccatggggagcgcctctttcagctggagctggaggtggtggacggagacggcgccgcctcagacccctttgccttcatggtgacagtgaaatccatgaatactctggtcccagtggctagccataacaggggacttgtgctttttgaaggtcagtcaaggcccttgtccagcacccacagcattcctatcagtgataaagataacctggaagaggtgaaaatggctgcagtcaggggcttgagacatgggcagctggtggtgtttggggcacctgctgggtgcaagtatttcacaccagcggacctggcagcagggcgagtggtgtatcagcatgatggcagcaacacctacagtgacaatatcatcttccggatggaggacgggcaccaccaagtggacttcctctttcccctcaccatcctacctgtggatgatgaaccaccaatggtcaatactaacacaggactctcactcactgaagggcaggtggtccagatctctccctttgtactgagtgctactgatattgactctgaggactcaaccatccactttgtgctggagaaccagcccctaaaaggaaatgaggaagagcctcagtgggagttggcccctggttcctcccactcaggccactacctgggggacctgttgctgcagcaggctgaactacctctctcaactgaagatgaagactggcactacatggaaaaggaagggctttatgagaaagtggtgactgagtggctacagagagacataatggaagggagactcttctaccgccatcttggaccacacagccctcaatctgtaatggtccagctggctttccatgtgcaggatgaccatgacccacccaatctctccaaacagcacattttcaccatcaaggtccaaccagtggatatactgagtccacagctgtatccaggaactacactagaaatgactgtacaagaataccaactcactcacttccagaagaatttcctccgatacattgaccaggactctgatgaccagaacctatggtacaccctactgacactcccgactgacacagatggcaaccaccaagtccgggctggagaaattgtgctcactgattcaccagacacactcatcatgcactttacccaagcccaggtaaatcagcataaagttgcctaccagcctccacagaaattgggtattgcaccacgggttgtgcagtttacttaccaggtggaagatgctgcaggcaatagcgtgccaggcacattcacattattcctgcaacctgtggacaaccagcccccagaagtcaccaacagaggctttgctatcttagagggaggcagctttaacctcagcagtaatgagctgcatgttacagacccagacacagacattgaccaaattgtcttcatattagtccggggtccccaacatggacacttgcagtactttaaaagatgtatggtcccaggggaatctttcatgcaagctgatgttattaacgggagtgtctcttaccagcatggcagagaccagacgactaccagtgacactttccatctggaagtaagtgatggggtgcaccatatacccatcaccatcccaatttctgtgcatcccaatgtggctaacagaagtcctaggatctctctcagaagtagttcattattggatgtttctatagacgtactagagaataaagccactgaaattaccatgggtgtcatccatggcaaaaggaaggatgtaggtgacttgatgctgtctttcattgtaaaggacagccccaaactgggcactattctggtaaatggtttgcccacagaacgattcacccaagaggatctcatcaatgggagagtagcctatgcccacactgcaggtgaagttggttttcaaaagcagcacgatgccttcagcctcatcctctccaaagattcttaccaatgggtagtggggaatagcataatagagaaagtacaggtacaagtaactgtgctgcctgtggacaatgtgggacccaaggtcttcgtcggggagtccttcattgtctatgaaggtgagaagaactccttgaccttacaacatctccatgttgaagatgtggacactcatcaagatgaactcctctgcacagtgactagtcagccagcctctggctacctggaaaagattgcatcagctcctggttcaaaaatgtcccagtctggtagccctatcagtgctttctccctcagagatatccaagtgaggcatatcaattatgtacagagtattcacaagggagtagagccacaagaggaccaattcaccttttattgctctgatggcatcaacttctccccaaatgtcttcttccctataatcatcctacccaccaatgatgagcagcctaaactttttgcccatgagtttaaggtactagaggggatgagcctggtcatagacacccagctgcttaatggagcagatgctgacctgccaccaaatgagctccactttcaactcacagccctccctcggcatggacgaatcatacagcagctggctacaggcagccagcccatccacagcttcaccctcaaggagatccaggaggcctccaccattgtgtatgagcatgatgactcagagacaaaagaggacagttttgaggtctggctgagtgacggcaagcacacaacccacaggaaggtacccattgtagtgaccctagtggatgattgaaactccctcacctgactgtcaacaatggcctgaaggtagagaaaaggacactctgagatcatcacaaatcggatcctcaaggccacagatcttgactcagatgataaaagcctcagttttgtcctccattctgggcctcaacaagggcttctacagaggctgagaaaacccagaggagaagtgaggaacaatcttactctgggaatgaactttacccaggatgagattaacagaggcctcatctgctatatccacacaggccaagaagggattgttgacattatcaagtttgatgttactgatggggttaacactttgacagaccactacttctatgtcaccattggcaacttagacagcgtcttccctgaggtaatcagcaaaaggatcaccttgatagaaggtgccagagtgacccttaccaacaatctgcttaccaacagtgacatcaacagctctgatgaacatcactttagcattacacgggctccaagcctgggtcacttagaaagttctgactatgctggggaacccattgcctctttcactcaacttcaattggctagcaacaaaatatcctatgtccatacttcaaatgatgagaaaaagatggacagcttcgaatttcaagtgatcggcgaactctaccctgtgttcagaaccttcaggatcttcatcactgatgtggataataagaaacctatcttgaccatccatagactaacactacagaaagaggatagccaactgatcactctccttgagttgacagtggaagacagtgataccccagatgaccttattctctttaccatcacccaggtccccatgcatggcaagattttgtacaatggtagccgtcccgtgaccactttcaccaagcaagacctgaacaagaacctgattagctacaagcatgacggcagtgagaccactgaagatagtttctccttgactgtgacagacggcactcacactgatttctatgtcctaccagacactgccctggcgacacacaaacctcaagtaatgagggtccagataagatcattagacaataggcttccccagattactaccaacaggggtgccccagccttgaagcgccttcacactggacacatggggcttcctgattaccagcaagtctctgaaggcagaagatcaggacagtccccacagggctttctgaaggtataaagtgaccagagggaccagaggcatgggctttcattatcaaaactgggccttgggaaaccagagcacttcgagtgttttacacaagcttgacatttgatgaggatgaaggatatcctatgtcttggaatgaggggcaggcaacggattcaaagggacatcttctatttctctgttgaagacaatggaagaaaaagcaatgaggaatttgatgagtga

SEQ ID NO: 29245 - DNA, 870 bp, Homo sapiens
  SIMILAR (325)..(393): 1001254mologous to Homo sapiens Human secreted protein encoded by gene 95,accession number Y76218,Smith-Waterman Score= 124.
atgtggcaccaggatctagcaacccatgaagctgttaccacccctgggtgtgaaggggcccagctgggctatgattgcaatatggacagggaatacgggcactatttatcggactgcttcaaaatcccaatggccattctcattaggaaatccaggaaagatcagtgcatagaggcaggcaggaggccaaggcccttagcagtaggagatgaaagaaggggaacacacagccaggtggttggcttcctctggccccaaaagcatgtggttctttcagaagtcctgcagttctgcacggacattagtcatcctgtagcagagaagataattgcctttgatgagttaaggacagattttaagagccccatagaccagtgcaatcctgttcatgcggaacataatgcagaagaggctatggatggagtattctggcagcaccagctgaagagggagcagagacacggccctgagttagaggaggaaaacgccactcctgcttctatggcagctgacttctgcctggacactgcctctcacagacggttgacacaaaggccctccctgcagcaacgtagagccactgccccaacacagatccatttctggggatgcagcccaaccatcctgcataaattacagatcccagccagtcgactggggaagttctcctgctttgatccaagaggaaaagcacgtatgcacaacaccatgaggaagaaggcttcttccatcggaattcacaggtctcagcttgtttctggaggagaaggaaaccaaggcaggaggcctagcttggagaacttccaagggtttgtgggcagagcaagagcctctgagccgtttctgccagaaacattggacaagagctga

SEQ ID NO: 29246 - DNA, 687 bp, Homo sapiens
  SIMILAR (58)..(396): 921254mologous to Homo sapiens immunoglobulin lambda light chain variable region,accession number AF194816,Smith-Waterman Score=547.
atggcctgggtctccttctacctactgcccttcattttctccacaggtctctgtgctctgcctgtgctgactcagcccccgtctgcatctgccttgctgggagcctcgatcaagctcacctgcaccctaagcagtgagcacagcacctacaccatcgaatggtatcaacagagaccagggaggtccccccagtatataatgaaggttaagagtgatggcagccacagcaagggggacgggatccccgatcgcttcatgggctccagttctggggctgaccgctacctcaccttctccaacctccagtctgacgatgaggctgagtatcactgtggagagagccacacgattgatggccaagtcggctgtgtggcctcctctgagctgactcagctgcctgcagtgtctgtggctttgggacgtacggccaggatcatctgccagggagatagcataggtgactctgatacaaactcgtaccagcagaagccaggtcaggtccctgtgctggtaatttatggtgacagcaaccagccctcagtgattcctgagcaattttctgactgcatatcagaggacatggccaccttgattattaatggggcacaggatggaaacaaggctattactgtcgctcggaacagcactgcttctcatctcacagtgacacagcatacagtgaagtga

SEQ ID NO: 29247 - DNA, 672 bp, Homo sapiens
  SIMILAR (421)..(537): 1001254mologous to Homo sapiens GRIK1,accession number AP000091,Smith-Waterman Score=213.
ttagtcttctttcccccttttccctcctctgtctgtgcctatcccccgacttttgcatctgaccaaaggacgaatgagggagacgttcctgcagatcggggcagcaactttcctcagctggtctctgggctccgggagccagagagcgctgatcctccgcggtctgcggcccatggaagaggaggaggaggagccgtgatgggctagcgacagcactgaggagccccgagagagctcagccttgccagccagctccgcggtcccacgcgggttccctcgagctcgctccgtggggagcgcgcagcgtgcttggaaccggagcatccagagaggatgaggcggggacccggcccaagttgggtgcatctctcgggcgtccggcagcggctgtatctcggcatgaattaagaagctaggaagatggagcacggcacactcctcgcccagcccgggctctggaccagggacaccagctgggcactcctctatttcctctgctatatcctccctcagaccgccccgcaagtactcaggatcggtgagtgagccccaggctgcctgctcgggagacgtggtcggtcgccgcaccaacgcgggtgtagcgggtcccgggcgaggcagcgcgcggcggcgcaggagccggagctggggaaggtggaggtcagtgctcat

SEQ ID NO: 29248 - DNA, 1131 bp, Homo sapiens
  SIMILAR (432)..(292): 551254mologous to Homo sapiens Amino acid sequence of a human secreted protein,accession number Y30709,Smith-Waterman Score=150.
atggtcgtctgtcagcaccatcacaagatgcactgcgcatccctctacggctacacttccgtacggtggctgcacagggggtttctctaccagggccatgcactcctaggactggatgcccctgacggccacagctggaccagtacaggggttgtttcggaacatgtagagcagagagctggatgggttctgttgccagaggcacaggaagcatcttcagtgacttattttcaaggtgcatatctgaaaattaagcagaaggccgtgtatgatgaagcatggttcacaaggttcgcaatagcaaaaacatggaagcaacccaggtgcccatcaaaggtggatgagataaagagacagtgctacctatacaccacgaaattctatgcagccgtaagagagaatggaatcacgtcctctgcagcaacacggatgcagccgtgttctgcctccactctggtgtggactctgcactgggacccacagcccggtcagtccctccccgccaccttccgcttctgctctggtgtggaccctgcactgggacccccggcctgctggtctagacaattctgtgctcagcaccaggactgccaaggagagctgggcgcctacggacagcccaccccaacccccaacaaggaaatgctggaagccctgaggtggaccctgcggtactcagtcagcactcaatacatgactccagaggacaaggaggtggtgctcagacgacgagtaagtcgccttaatctccttacttcacatccacccttcaccacctggagtgatcagcgattttacactctcttcacgactctggaggatgaggaggtggcgctcagtaagcactcaatacacgactctggaggacgaggagggagcgctcaaaagaacacagcccatgagcatcactactgtgccatcacctggcaaaggtccgtcaatacacgactctggaggacaaggagggagcgctcagtaagttctcaatacacgactctggaggacaaggagggagcgctcagtaagcactcaatacacgactctggaggacgaggaggtggcgctcaatggcgcctcaacccaggatctggactgcgcctcgacctgggatctggactcatggaggaatga

SEQ ID NO: 29249 - DNA, 918 bp, Homo sapiens
  SIMILAR (50)..(364): 1001254mologous to Homo sapiens P40 T-cell and mast cell growth factor precursor,accession number M30135,Smith-Waterman Score=554.
  misc_feature (1)...(918): n = a,t,c or g
accactcgatttgaaggtgtctgcaagcgagctccagtccgctgtcaagatgcttctggccatggtccttacctctgccctgctcctgtgctccgtggcaggccaggggtgtccaaccttggcggggatcctggacatcaacttcctcatcaacaagatgcaggaagatccagcttccaagtgccactgcagtgctaatgtgaccagttgtctctgtttgggcattccctctgacaactgcaccagaccatgcttcagtgagagactgtctcagatgaccaataccaccatgcaaacaagatacccactgattttcagtcgggtgaaaaaatcagttgaagtactaaagaacaacaagtgtccaaggttattgatacagaagttaattcttggctttagagtttccagtggtaaccttcctagccctgggatagaaagtaactccttggactatggaagagaagtccgagaggagaggatgatggcagacactattgagttccctggagaagagctctctgcctggcccccagcagagcctcgggacactaataagtgcacagtgaggagcacgcactggactcagcgtgcggtgaggaaggcgctaccgctgtcctcaggatccacgggtgcaggagcggggaaaaacctgggtcggtgctgagaggagactggaggcacggggacgtgttacttgagactggagggagtgggctgagcccagagctcactgggcccctccccatcctcagacagaggagtgaagcaacgtttctctggggtggtttctggctccctgggtnctcatgggtcaggactttctcagctgggaccaaacattttttgggaaantttcttttgatggccancctagcagagtgggncattnggggatcanaaccttngagggtttgaatc

SEQ ID NO: 29250 - DNA, 202 bp, Homo sapiens
  SIMILAR (201)..(121): 411254mologous to Homo sapiens high sulfur keratin,accession number X63338,Smith-Waterman Score=48.
gctctggcttcatcatgtgcagcggcaaagagaacccggacagtgatgctgacttggatgtggatggggatgacactctggagtatgggaagccacagtatccttggagcactatgggggctgagatgccatccaccagcaatggtgaaagcagcaagcaggaggccatgcagaagacctgcaagaacagcgacatcgagaa

SEQ ID NO: 29251 - DNA, 639 bp, Homo sapiens
  SIMILAR (235)..(125): 1001254mologous to Homo sapiens unnamed protein product,accession number AK001459,Smith-Waterman Score=221.
gcgccggggcaggtggggctgctggaggcgaggcctgcctagggcagatagctcacaagtagatcctccgcaggtctccgggcgctgtgatcgtgttgcactgagggcagagcttcttggcacccagggtccgcagccagcactcctcgcagtgcacgtgccaacactggatggacgttaggggcatcgagtacgagtccatgcagatgaggcatttgtaacggtccccacgagattagctgccgttcaagttctctgacccgagccttcagagcctcaaacgtggtcacagctgaaatcttcggtgattttctcgatgtcgctgttcttgcaggtcttctgcatggcctcctgcttgctgctttcaccattgctggtggatggcatctcatcactggcccatttagagaactcaggtgtgatgcgcgtgctgggagggccgccatttaggactgcgccccgaagtgcctctctctccttggcttcaccaggctcctcgcctgtgcaggggatgacatcagcctctgtgtattgtggcttcccatactccagagtgtcatccccatccacatccaagtcagcatcactgtccgggttctctttgccgctgcacatgatgaagccagagcctcggaagcc

SEQ ID NO: 29252 - DNA, 1891 bp, Homo sapiens
  SIMILAR (1087)..(1509): 481254mologous to Manduca sexta antennal specific membrane protein AMP,accession number AF177390,Smith-Waterman Score=371.
atgacccaggcgtctgggaaaggaggtcctgaagatccagatagccgttcaccggtggtgggttgggctatttggactgaatggattgttcatcagataggaccagtgacaagaaaacatacacttaaagaaagaggaagaagaaatgaaccagttgaaacagtaattccaaactttgcccacaaagtgacaagtccagctcagaaggcacctccaccactgcctccaaaaaatgtaccagctaccccaccccgaacaggatcccccttaacaattggaccaggaaatgaccagtcagccacagaggtcaaaattgaaaaactaccatccatcaatgacttggacagcatttttgggccagtattgtcccccaagtctgttgctgttaatgctgaagaaaagtgggtccatttttctgatacatccccggaacatgttactccggagttgactccaagggaaaaagtggtgtccccaccagctacaccagacaacccagctgactccccagctccaggccctctcggccccccaggccctcctcacaccctgcttcccacaggctctggcttcatcatgtgcagcggcaaagagaacccggacagtgatgctgacttggatgtggatggggatgacactctggagtatgggaagccacagtatccttggagcactatgggggctgtggcggccctcccagcacgcgcatcacacctgagttctctaaatgggccagtgatgtctggccggagtgtgagttgcccctctgtcccagcagagatgccatccaccagctatggtgaaagcagcaagctggaggccatgcataagacctgcaagaacagcgacatcgagaagctgcctggggctgctgccattggccgaaagggcaggaaagggaacaggaaggtggcggtggaggagcctacgccagagcagtccctcctgcagctggtggccaggccctttacacaatctccagatggccccaacagccctatgaggaaggttactatccttatcccggttttgcagaggaggaaactgaagttcagagaaggtagcttaccaaaggtgtctgcccagggcattcagtccacacctctgaacctggcagtgaattggcgatgtgagccttcaagcactgacctgcgcatagattacaaatataatacagatgcaatgacgactgctgtggccctcaacaatgtgcagttcctggtccccatcgacggaggagtcaccaagctccaggcagtgctcccaccagcagtctggaatgctgaacaacagagaatattgtggaagattcctgatatctctcagaagtcagaaaatggaggggtgggttctttgttggcaagatttcagttatctgaaggcccaagcaaaccttctccattggttgtgcagttcacaagtgaaggaagcaccctttctggctgtgacattgaacttgttggagcagggtatcgattttcactcatcaagaaaaggtttgctgcaggaaacagaaagcaaaagcaaagctatggaggcctaaaggaatgggaatgtgttggtggtcgcttgatacttggtgcttgtgtgcatggagcagaagtcttcctggtccatgcaggggcgtcagcatattttaactgcactaatttgggcaaactgtcattcagcaattgctgtatccatttcatcttcgatgtcatccccttctatgtttccaaaaagataaactcagagttatggattgtagaaaacataagcttaggttttaaatgacaaagcattgcatatcaatataaatttcagggaagatgtcacatatcttccatcccctcccctggaatcaccttagggcatccagacacaaaacaccctttacctatgtatcaaa

SEQ ID NO: 29253 - DNA, 374 bp, Homo sapiens
  SIMILAR (317)..(373): 1001254mologous to Escherichia coli Cet protein (AA 1- 450),accession number Y00538,Smith-Waterman Score=93.
ctatgagtgagaacatgcgatgtttggttttttgtccttgtgatactttgctgagaatgatggtttcaagcttcatccacgtcccaccaaaggacatgatgagcatattttccatatgtttgtcggctgcatcaatatcttcactttgagcaagtgtatgttcatatccttcactcaatttttgatggggggggtcctcccgcttctgattgccatcaaccatcaatgactcaggtaaccaaaaatggataaaacttcgtttccgctccacggttttatcctcttcctgcaccgtataaagctcggtcacaggaatagcgatgtggaagatgcgattcgccaaagtaccagcgggccgcaaaaactcgttggcc

SEQ ID NO: 29254 - DNA, 951 bp, Homo sapiens
  SIMILAR (648)..(223): 1001254mologous to Homo sapiens sigma1B subunit of AP-1 clathrin adaptor complex,accession number AB015320,Smith-Waterman Score=732.
ttaagtagcaatgaaggtttttaaccgtttacttatactgctactttcagccaatcttttcccttcttcaaatagtctgtcctctaaaggtttagactccagtgttttagggtccaaaaagggccattgggaagaggcctgaccgatagaccatctccaaactgaaccatccatccatagataactgagttgacgtgactgacacatattccagtcaataaactcctgcagtagatcagcctgctcaattgctttaaggacatttttcttggatgtttcctgaacttcccctcccaaaagaaactcatccaaaataaaataagccttctcaaaattaaagatgatatctagttcacagacactgccgaaatacttgtcaagtaattccacataacgatgaattatttccagggtaattagttcattgtcctgatcctcaatagcacagcaaaaatacagactagcatatcttttgtaaacaatcttcagatctcgccactcaaggaagctgcacattttaggtttccgtgctaaaacggtctgaacaagttctcttgtgatctttttcttctctttgtctgatagtgggacataccatttttgcagtcgaagctttccctgacgactaaaaagcaacataaactgcatcggaggcagcgcgggtaaccgctgagtccaaggcagccgattggaggtttcttcgctgaggggaggtgcgaaccggaagccgggccacgtgacccggaagcggcgtttgccgggcccgagcgcccgcgcgcccgcgcgctcttgcaggtgcctccgggacgcgcgcgggcggctgtcctgcttgtttaatgataggaggacgggattctgcagcgtccttagcctgtgagtgagaacatgcagtgtttggttttttgtccttgcaatagtctgctgagaatcatggtttccagcttcatccat

SEQ ID NO: 29255 - DNA, 738 bp, Homo sapiens; identical to SEQ ID NO: 11385
  SIMILAR (78)..(1): 801254mologous to Homo sapiens Human secreted protein, SEQ ID NO: 7217,accession number G03136,Smith-Waterman Score=109.

SEQ ID NO: 29256 - DNA, 723 bp, Homo sapiens
  SIMILAR (723)..(304): 891254mologous to Homo sapiens putative p150,accession number U93564,Smith-Waterman Score=662.
tcagtcgctggatatagaattggaataaacaggcttaacaaatggcacaacacctaccacatttggtctttggttctcacagtggaagcctctgggagcttttatcccattaggtgtatctcctaattctatccctcccccctccccacaccccacaacaggccccagtgtgggatgttccccttcctgtgtccaagtgttctcattgttcaattcccacctataagtgagaacacgcggtgtttggttttttgtccttgcgatagtttgctgagaatgatggtttccagcgtcatccatgtccctgttgtttcctgagtttttaatgatcgccattctaactggtgtgagatggtatctcattgtggttttgatttgcatttctctgatggccagtgatgatgagcattttttcatgtgtcttttggctgcataaatgtcttcttttgagaagtgtctgttcatatccctcacccactttttgatggggttgtttgattttttcctgtaaatttgttggagttctttgtagattctggatattagccctttgtcagatgagtagattgcaaaaattttctcccattctgtaggttgcgttttcactctgatggtagtttcttttgctgtgcagaagttctttagtttaattagatcccatttgccaattttggcttttgttgccattgcttttggtgttttagacatgaagtccttgcccat

SEQ ID NO: 29257 - DNA, 1205 bp, Homo sapiens
  SIMILAR (717)..(58): 931254mologous to Homo sapiens GABAA receptor alpha2,accession number A28100,Smith-Waterman Score=1076.
ctacctcttgtaatttatatttttcaattcatcctctgcaaatatgtcatatctttcaaacacagttcttgcaggcacagattctctgttaagccagaatgaaacttgggagagaatgacagtcatgatgcaaggcagataggtttgaatcacaaaatacccaatttttcttttcaggtggaaatgagctgtcattacagtatattcacctgtactggatttaattgtctcctttccgattgattggcccagcaggtcatattgatttaacctagagccatcaggagcaacctgtactgaatcagatgcattgtaagtccaaatataagtgacctctgaagttgtatatgcatagctgccaaatttcagaggacatgaatgagcatccattgggaaatcctccaagtgcattgggcattcagcttgaactgtaagcctcatggtatacagcagagtcccatcatcctgaattcgaagcaacttatttggcattgtcatattatgagctactgattttttcccattgtgaaaaaaggtatctggagtccagattttgctagccattaaattgtttagtcgaaggatattcataggacctttaaattttaaacgttcatctttccatttttgtcgaaagaaaacatcaattgtatattccttcttcaatgctgtgtcaccggcatctaaaaagctacttggaacataggaaataaacaatactttgcccatgaataaatgaataaggggagtcattgtaaatttattgtagtatgaaggatactgagccataatgtttctatgagtgagaacatgcggtgtttggttttttgtccttgtgatagtttgctaagaatgatggtttccagcttcatccatgtcccgagccgcttcatggtcccaaaccaggacccaaagtgctgcttgggcttaaggttgtaattatttgcagccaactggagcagcggacctccttgcttactttgaattcctgggtccagagggaaaaactgggtggtgacagggactggacagggatgccacaggggccccgccgagtccgacggcccggcaggggtgggcaaggcactgggaacagccgccagcttgatacctagttttattcctttgtagtcaaagaagatggccagggagacagcagcgtggtcagagtggtaggagctggccatcggtgagagctgctccat

SEQ ID NO: 29258 - DNA, 1379 bp, Homo sapiens
  SIMILAR (1005)..(664): 581254mologous to porcine endogenous retrovirus pol,accession number Y17013,Smith-Waterman Score=360.
ctagtttgatggcactgtggtctgagagacagttgttataacttctgtccttttacatttgctgaggagtgctttacttccaactatgtggtcaattttggagtaagtccagtgcagtactgagaagaatgtatattctgctgatttggggtggagagttctgtagatgtctattaggtctgcttggtgcagaggtgagttcagttcctggatatccttgttaactttctgtcgcgttgatctgtctctctgtctgtctctctctctgtctctctctctctccatctctctctctctctctctctctctctccctctccctccgcgtctctctcttagccattacaagcttggggccccagcctttgcagttaggccatcggaaccccaagtaggaaaccttcgccatccacagcgcacgtgaagcatcgtcgcctttgtatacccacgcgaaggggattctcaagcgataattgggacccggtttccagtccgacctgtaacgacgccaggcaactgcatgctcaagtcgatctagagatccccgtgagaacatgcagtgtttggttttttgtccttgtgatagtttgctgagaatgatggtttccagcttcatccatgtcccttcactgagttctagagcccgagttaaagcaatgagctcaggcttctgggctgaagtgcccacagcatggggggcctttatattcaggttttgcacaagggttagtttatctgcttcttgtgctaacagggctgttgctgccagggcccttagacatggtggccagcctttggaaaccccatctagttgttttgagagataggccactggtgtaggccagggccccacagtctggattaaaactccaactgccgttttttctctttctgacacatagagtgtaaagggctttgtcaaatctggtagtcctagggctggggccgacataaatttttcctttaacttacaaaaggcttgctgttgtagaggttcccattcaaagcgctcccaatcgccccactttgtaacctgctgtctgcagatctgagctttcttcttggacaccttatacccacagtcctccaggtgctgaagcagggcatccatcccttttgcgcacctgactgccgtggagtgtcccagcagaaggtcatccatgtacaggagcaagatgcagcctaggtctttagcaggaaacttttgcaggtctcgagccagggcctccccaaagatagtaggggagttctcaaacccttgggtaagctgggtccaagtgtactgagtagtgacacctgactccggatcttcccactgaaaggcaaacagcttctggctctcaggagatattctgatgctaaagacggcatcttttaagt

SEQ ID NO: 29259 - DNA, 894 bp, Homo sapiens
  SIMILAR (894)..(670): 571254mologous to Homo sapiens PRO2221,accession number AF116695,Smith-Waterman Score=202.
ttaaggaatatcctccaagtcatgctgattgaggacaggaaatgtgcacaaagctccaaagctcttgctgtagctcagtgtacgtcctacctgttgaccccaaaatttcacacagaggggtttatctatgaaaaacaactgtgcaggaatgatcataacatctgtacttacaattgccaaaacgtggttgtaaaattttggagaacagtgcagtggaacgtctaatataattatccgtaagttgttttctgcatttccttttctttcaggtagctttctatcaagatcatctgaaaacttccccaggtctgccttgatctgctttaaatcagagcaggagaaggggacatgtatccgggttgggccaaattcccctcctgctacagcttgaaggggacataaccaatagcctgggggtttttgtggtcctttggagatttctttgcttatttccttctttctaatgtcccagatgtttggtaaacatgcacacctccaccaccttaggctgacaagccacatgtccaggtcttcagtatctcccatcacttccaaacttggttgaagcttcaggccccagtaagcactatgagtgagaacatgcggtgtttggttttctgttcctgtgttagtttgctgagaatgatggtttccagcttcatccatgtcccttttttcaaggttcttagcttctttgcattgggttagcacatgctcctttagctcagaggagtttgttattatccaccttctgatgcctacttctgtcaattcatcaaactcattctccatccagtttttgtcccttgctggcaaggagttgtgatcctttggaggagaagaggcattctggatttcggaattttcagcctttttgctctggtttttcctcat

SEQ ID NO: 29260 - DNA, 912 bp, Homo sapiens
  SIMILAR (474)..(4): 1001254mologous to Cloning vector pBACe3.6 levansucrase,accession number U80929,Smith-Waterman Score=814.
ttagttgactgtcagctgtccttgctccaggatgctgtttttgacaacggatgttttattgcctttgatgttcattaagaagcttggcgcaaatgttgcctttttatcctcgaagaagcctctgtttgtcatgtagcttgtgataaccacattgttgcctttggcttgcggcactgcgaagtgagagtaagtgaatgtcacatcgtttggatcaagacccatttgcagcacaagccctgttttgttcagcggcttgtaagggccggttaaagagtttgatacataaccaagcatgtaaatatcgtttgagttaataccatcgatcgtcatttttgaaccgcgtgaatcagtgaacaagtaccatttgccgttcattttgaaaacattcgcgcgctcgatttcatcagttaccgtgtttgaagtgatcagcggcttcattacttttttcaatgtgtaatcattatttaactctatgtgtgagaacatgcggtgtttggttttttctccttgtgatagtttgctgagaatgatggtttccagcttcatccatgtccggtggaattcggctgtgaatccgtctggtcctggactctttttggttggtaggctattaatcattgcctcaatttcagagcctgttattgatctattcagggattcaacttcttcctggtttagtcttgggagggtgtatgtgtcgaggaatttatccatttcttctagattttctagttcatttgcgtagaggtgtttatagtattctctaatggtagtttgtatttctatgagtgagaacatgcggtgtttggctttttgtccttgtgatagtttgctgagaatgatggtttccagcttcatccatgtccctgcaaaggacatgaactcatctttcatggctgcatagtattccat

SEQ ID NO: 29261 - DNA, 1188 bp, Homo sapiens
  SIMILAR (119)..(202): 821254mologous to Homo sapiens Peptide sequence derived from a human secreted protein,accession number Y40039,Smith-Waterman Score=115.
atgtggaggaggaacaagggcatagttttaggaatgcaaggtgaattatctcatggtagagaaatgagaacggtttggataggatggactgttcatgcagaaatggagagagagataagggacatggatgaagctggaaaccatcattctcagcaaactatcgcaaggacgaaaaaccaaacactgcatgttctcactcataggcacctaagagagaaaatcttcatcctacccttgggtcaaccacttagtcacgaatctctcatagtggtgtggaatccccggtcaaactggacagctgtgcaagcttttggcttagtgaagtcccacttcttccctaaagatacagtgtcctactcaaggacctgcccccctgaattgtttcttgccgctgtccctgtgctcacaggcatggactatgagatctatgaggtcagggactggggctcccctggatggtctggcctcagagctgctcaacaggagtccatgggcttttccctgaacacctgtgatttaagtacaacaagacctgctaacggttcttcctgggtcaaggggaccgagagatggtatgaagttcccagaagagccagagagagaaagcagaaccgcctaattctgatcctgactgtgcactctccacctggaaaaacgataatcaggtggaaatgcagaggagccacctggagcttgcactgcccccgacagtacaacgaatgtgctgcagacagggcaggtggaaggcgaggagaaaggtttcaggatccagtggcctcatgggtgatgagatggggtcccactgtgttgcccagactgagtgatgttattgtgacacagcttcagactcagtccccaactgtgcactgtgggagccacagcagtggaaatgtacgtgcacgtgcagcagcccaagggtggaagctgcagaggctggagggaggtgatgttgccaagcaaatgcagcagaaccagcctgactgcctgaaactgtgcctcaaaatagggaaaaacagggagaaacctgtaagcaggagcactagatgctacagccctgctgctcaaagtgtggtccatgaactagcagcatcaccaccacctgcagaagctcaggtcccactccctgctgaatcagaatctacagctcatgaagaaccccaggtggtttacaagcatactgaagtttga

SEQ ID NO: 29262 - DNA, 1725 bp, Homo sapiens
  SIMILAR (808)..(1203): 361254mologous to Rattus norvegicus CLIP-170,accession number AJ237670,Smith-Waterman Score=220.
atggctgtgctttggtcaaggataggccaagccaaggtcctggtccccgtggccgtgtactgcgggagcatccctcggaccagtgctgggccccgggtgctcccgcctggaagcatcccctccagtctgcctcatggagaaggttctctccagcctgagccaagagccctgctgaacaacgaggaaccgtcacagctcctgcgtggactcggacagctgggtggcctcaagctggacaccccttccaagggctggcaggcaaggaatggtcaccccaggaacctcagggccttgtctttgggggaccagcccctggtgctcctcccttctccggagtcagaggccaacagcgtggccagggacaccatccagattaaggacaagctcaagaaaaggaggctctcagagggcttggcagcgtcttcccgagcctctctggatccagggggaggcccccaaggagttcccctgcacagcaccatcccccgagccacctctcagaggctgctgagggtgcccaggccgatgcctctcatccagagcatccctaccacccctgaggccagcggagtcaaagagaagggcctggacctaccggggagcattccgggtcctcacgagttgagacccggtgctcaggagcccgttacctccaggccagggagtcctcacaggcctgagggccccacgcacgcgaatgacaaaggacagatccctgctgatgttgttccagacccagtagatatgccgttagagatggctgacgccgcagccactgctaaggaaatcaagcagatgcttctagatgcggtgcctctgtcatgtaacatctcaaaggccatgctcccaaattatgatcatgtcactggcaaggcaatgcttacgtcacttggcctgaagttgggggatcgtgttgttattgcaggacagaaggttggtacattaagattttgtggaacaactgaatttgcaagtgggcagtgggctggcattgaactggatgaaccagaaggaaaaaataatggaagtgttggaaaagtccagtactttaaatgtgcccccaagtatgcgaccccacagcagaaaggactgaggccaagacaggccatgccgatcagggcccctgccttcctgcacgtggcagccccgccccaccctgtgcgaacctcacagaaaacccaccaccgctcaggctcctccgcaggccccaaggaggacatgggcacccgtgacgatgtccccgaaggtgcggatggttcagaattaagggatctcagaggctgtacttctgtgttcagcgcgcacagtgcctggcaggaacagatgttgaatgaacgtctgtcagtgtctctgcaagagcagaggtgtgatcatcagcataaaaagcccaacagaatcaacaaagtattagaagtaatgttagctcagcaaggttgccaagtacaagatcagtttctaaaaatcaatagttttgtctacatcagcaggacatggatgaagcgggaaaccatcattctcagcaaactatcgcaaggacaaaaaaccaaacaccgcatgttctcactcatagggcaggctcatctaactgtgtgcttagaagctctagagcagaacttgcacccaccaggaaactgcctggagacacaacagtcaattaataacccaaaatatgcccactatgaaactccctcccacccggagagcttcagccactttacaacctag

SEQ ID NO: 29263 - DNA, 2376 bp, Homo sapiens
  SIMILAR (1506)..(409): 891254mologous to Homo sapiens putative p150,accession number U93569,Smith-Waterman Score=1773.
ctggttttaacttcatatcgctgacagaggcactgaagaggatagcaaagacagtcttgaaatgccaacaccacccttccctcatctccaggcagtggccacatggtgcggagagagaatctgtatgcttgggggaaggagagctcagccattctgggactttgcattggaactcagtgtggccagcaccaagtagaactctgccagtgcccttaggtgtttctcctaatgctatccctcccacgtcctcccaccccacgacaggccccagtttgtgatgttcccctttcctgtgtccaaatgttctcattgttcaattcctacctatgagtgagaacatgcaggtgtttggttttctgtctttgcgatagtttgctgagaatgatggtttccagcttcatccatgtctctgttgtttcctgactttttaatggtcgctattctaactggtgtgagatgatatctcattgtggttttgatttgcatttctctgatggccagtgatggtgagcattttttcctgtgtctgttggctgcataaatgtcttcttttgagaagtgtctgttcatatccttcacccactttttactggggttgtttgtttttttcttgtaaatttgtatgagttctttgtagattctggatattagcactttatcagatgagtagactgcaaaaattttctcccattctgtaggttgcctgttcactctgatggtagttccctttgctgtgcagaagctctttagtttaattagatcccatttgtcaattttggcttttgttgccattgcttttggtgttttagacatgaagtccttgcccatgcctatgtcctgaatggtaatgcctaggtcttcttctggggtttttatggttttaggtctcatatttaagtctttaatccatcttgaattaatttttgtataaggtgtaaggaagggatccagtttcagctttctacatatggctagccagttttcccagcaccatttgttaaatagggtatcctttccccatttcttgtttttgtcaggtttgtcaaagatcagatagttgtagatgtgtggtattatttctgagggctctgttctgttccattggtcgatatctctgttttggtaccagtaccatgctgttttggttactgtagtcttgtagtatagtttgaagtcaggtagtgtgatgcctccagctttgttcttttggcttaggattgactcagcaatgcgagctcttttttggttccatatgaactttaaagtagttttttccaattctgtgaagaaagtcattggtagcttgatggggatggcattgaatctataaattacctctggcagtatggccattttcatgatattgattattcctatccatgagcatggaatgttcttccgtttgtttgtgtccccttttatttcattgagcagtggtttgtagttcttcttgaagaggtccttcacatccattgtaagttggattcctaggtattttattctctgcaaaaagttgtggagatgcttgaagaagtggtagtctgttgatgagaggtcaggtgaatatgaaggatgagccaaaacttggtagcccaatgcattgaacttttgaagcattggttgtgcgacgtgtggttgggcgttgtcatggagaagaattgggccctttctattgaccaatgccagttgcaggtgtggcagtttttggtgcatctcatagatttgctgagcatagtcctcagatataatggtttcaccaggattcagaaagttattgagctttttcacctttccaatttgcttcaaatgccaagcgaccctggaatggtcgacgtcaagctctttggcaacttcttgtgtggttgtaagaggatcagcttcaataattgctctcagttggcagttgttaacttctgatggctggtcactatgctcctcatcttcaaggctctcgtctcctctgcaaaacttcttgagcactgtacatttgttagcagttccttggccaaatgcgttgttgatattgcgagttgtctctgctgctttatgacccatttttaaattgaataagaaaatcactcgaatttgctttttgtctgacaccatttccatagtcacctgctgagttagtcttctacctcttgatgcctcatcttcctcaatgagattcatcagttgaaaatgatcacttctaacttgaaattctataatgttgaaagtcgttattttcctgaactttctgtagaagttgcaatggaagctggctgtaactagactggtagaaagatggcctcggtacaaatatggtggatctgcagtcaaccatgcttctccaacaggttttctagaaggagatccaagcagtacccactccat

SEQ ID NO: 29264 - DNA, 1434 bp, Homo sapiens
  SIMILAR (469)..(1308): 1001254mologous to Homo sapiens potassium channel TASK3,accession number AF212829,Smith-Waterman Score=1477.
atggggcagaaggggggcccctacaaggtgcatcattggggacagcagcaaattgtcagcactgcacacgatgcttctgcacctggccatcctggcctctatgccctcctccatctggccagcatgcagtggtctccaccttccatgcctccatttccacttctgcaaaatggggatgatgctggaactgtcccaggggattctggtgagcatcaatgggctgtttcacagagcgagtgctcggcccaagtccccggacctgagaggttcacctacaccctctccgagctgccaccccaaagccactccgcgggccttccattggcagatatggtgcaggctcaggcctgtgtctgcagcctgtgcctggaggctggaggttatggactgaactgtgccccccgaaattcacacattgaagccctaacttccaatgtgaccgtatttggagatggggcctttaggagaggttatgggcacgctgcacctggcaccgatgcgggcaaggccttctgcatgttctacgccgtgctgggcatcccgctgacactggtcatgttccagagcctgggcgagcgcatgaacaccttcgtgcgctacctgctgaagcgcattaagaagtgctgtggcatgcgcaacactgacgtgtctatggagaacatggtgactgtgggcttcttctcctgcatggggacgctgtgcatcggggcggccgccttctcccagtgtgaggagtggagcttcttccacgcctactactactgcttcatcacgttgactaccattgggttcggggactacgtggccctgcagaccaagggtgccctgcagaagaagccgctctacgtggcctttagctttatgtatatcctggtggggctgacggtcatcggggccttcctcaacctggtcgtcctcaggttcttgaccatgaacagtgaggatgagcggcgggatgctgaagagagggcatccctcgccggaaaccgcaacagcatggtcattcacatccctgaggagccgcggcccagccggcccaggtacaaggcggacgtcccggacctgcagtctgtgtgctcctgcacctgctaccgctcgcaggactatggcggccgctcggtggcaccgcagaactccttcagcgccaagcttgccccccactacttccactccatctcttacaagatcgaggagatctcaccaagcacattaaaaaacagcctcttcccatcgcctattagctccatctctcctgggttacacagctttaccgaccaccagaggctgatgaaacgccggaagtccgtttaggggaactaactgcacattcaagagaggcgtccgtggatgctgggtctcactgccaaagccgaacacggcttcgggatttcttgccttctcaagtggacctcttgctgtgctgggcggaatgcc

SEQ ID NO: 29265 - DNA, 377 bp, Homo sapiens
  SIMILAR (304)..(348): 461254mologous to Human immunodeficiency virus type 1 envelope glycoprotein,accession number AF236270,Smith-Waterman Score=37.
taactctgacttactaaaaaagcaaacaaaaaataaagctatgaaaaaattttttattgttatacaacataatgcaccagagtccattcatctctcccctcttaaaaactttttccataaaacaaaaataccgtcttctactttcaaaagaaaaattataatattctcattgtagtatttatacaagaaaaatacaatttctttgttgtccttctataaaaactcacttagggactaacctcacctcctaaactttcttcacatgagtgaacattattagcatttacctggaagccagcttatttttttccttccttgaccttggtcgggctgataagggaagctcattgactggagtcaggtcaataataaccaaa

SEQ ID NO: 29266 - DNA, 483 bp, Homo sapiens
  SIMILAR (149)..(205): 1001254mologous to Homo sapiens Human secreted protein encoded by gene 32,accession number Y00289,Smith-Waterman Score=97.
atgatgattaccctggccatgctcacgaaaaatcacgggtacgatcatagtagcctatggcgatcgacggcgctggagccctataatttattgtttgtaatcaactccatcaagcaagagattgtaaaccgggtacagaatccaagagatgagagaggacccaacatggggcagaagcttgaaatcctcattaaagatactctcgtatcgttcctgtcggtccgatcgtgtcgtgacgtacgtgccattcgttcggtcgcaccgtgcgatgattcctgtcgagcgattcatgtatgtcttccgacgatcgaagttcgctcgctccagtctaacgtctgtcgatactcggttatgtcatctattccatcttcggtccgtctgtcttcgtccgtcgatcatatcacgtacggatactggaacgaccatcttaggaacgtcgttgttcgttactcgtactcggttgtcctgcgtcccccttcgtag

SEQ ID NO: 29267 - DNA, 1803 bp, Homo sapiens
  SIMILAR (789)..(824): 751254mologous to Homo sapiens Human secreted protein encoded by gene No. 23,accession number Y38408,Smith-Waterman Score=64.
ctttacatatatatatatacataatacaataaaaataatcctattttgttgtctggtggaagtatactacaataagctaaataaacattttaattttcaaagtcaaaaactattttatcaatagcttactaaaatgaaatatattaaaatttcctacaataagtgcagaaataaaagacatctaaatggccaccaacttatctactatggaagcgaactagaggaacagcaaaataatatttgtatgtatggatgctccttctgtagataattggacccaaacagaaataaaattcacagttcagtaagatccctaaccctgaccttttttttttcttttttttctccttttttttcatacattcatacagtatcatgtaagctgtgcaaaactttacttagactggcagtttgccatatcagttgcatttgtctttggtacaaaaaataaaacaatcgcaataatgtgcaagtatttgtcttcttccggtcaagtaccgaaatatcgagttttctagagccatcttttttttgttgttttttgttttgttttttatacaatacacagactctgtggcatatatctacatttcaacatagtcctatatacattcaaaaaatctgaaaaagagttggaacaaaaaaacatttaaaccccataatttttccatctatatatcttgttttttctcattagggttttcatcatacaaaatattaccagttttagagtttccccaaaatacaaggcacaaagaatatgctttttttttcttacttgcacagacatttgtgtgtgtgtgtgtatatatatatatatatatatatatatttatatatatcatcttgagctctgacaatgaacatctaatatggcccacaggcacaagtgctgggtgtgccatatacaagtgagattaatggttgtggaaaattagaccaaaaagcaataattttaaaatcaatttaaaccgactgtttaaaaaaatgcttcctcaatttttttgtgtggttcagagcataaatctgccacaatacttggcattttactatttcactcctccaaaatgttttgctttaacagatttttgtaatctgtacctaacatttacttaaacatatgattttcaattctgatgccagtagcagttttaatcatggtttatgctctgaaaatgcaataatcaagtattttggatcatgcttcacttatgctacttagttcttaaaacaatgtaacctaattgtaaatgtttaccataatggctaactgacatgcaaaacagaatgaaaatttacaatggataacgtgacaaaacgcagacatttctgaccagtggtccaatgaggctgattacaccctttgatgttggtatccttaatcctacaaggcctccagggggattcccttctgcagccttctctttcacttgtttaacaaattctgaggtttgcccaggaactggtagacctagagtatctttaatgaggatttcaagcttctgccccatgttgggacctctctcatctcttggattctgtacccggtttacaatctcttgcttgatggagttgattacaaacaataaattatcatattctgtgttgaggccccataatttcactttattaccttcatactgggctttcttctttaaccgacaagctctggaagccagcttatttttttccttccttgaccttggccgggctgttaagggaagctcactgactggagtcaagtcactaatcaccttattcagcttccgaagttcattgcctatctggaggagttctttaaga

SEQ ID NO: 29268 - DNA, 987 bp, Homo sapiens
  SIMILAR (552)..(758): 261254mologous to tomato yellow leaf curl virus coat protein,accession number AF168709,Smith-Waterman Score=83.
aatacagaggctctgaaatatttgctggatccatgaatggttgattggctttcattgggctgctgggaggattaaattatgaatgtataaaggtgattacatctcattcctatatacccattacattgatggataagtattaggttctctctcctcttgccagggactttaagaagctgctgaagaacccaagaggaaggtgggagctgttgatggtgagcgactcataccaccatccttcagggagggtgtggttggccatagcatggttaaggagagccaagagcagagatgcttctgagtacaacccagcagggtggaaagaaggaggggtctaccccagtgcacatttgttggaagaaggcagctttcgtgggctcccgacattccattattctagaactacaagttaagaacgagaggagacttggggagactctggtccaattcgtctttcttttttccaggtgtggaattagaggcctgatggagtggagagctttcctcctcatcacctggagcagtaatagtttacaatatacctacagtttcctgggcagatcatcgtgtgcagaccggctgcagagagaagggaactgtttcactttcatcttcctgaaggcaaaggaggagaaaggcacgtcttacatggcagcaggcaagagagcttgtggaggggaactcctatttataaaaccatcagatctcatgagacttattcactaccacgggaagagtatgacagaaattgcccctgtgattcaattaataagacttattcactatcacgagaacagtgtgagagaaattgcctccgtgattcaattatctccacctgcccttgacacacgggaattattaaaatttaagaagacccctccagagaaagcaacaaggcaccatcttggaagccaagagaggagcccttactggacaccaaacccgccagcacctccgtcttggacgttccagccttcagaaccatga

SEQ ID NO: 29269 - DNA, 1665 bp, Homo sapiens
  SIMILAR (1191)..(1250): 401254mologous to Homo sapiens A suppressor of cytokine signalling protein designated HSCOP-7,accession number Y53887,Smith -Waterman Score=40.
gctgcagtgagccgagatcgcgctactgcactgcagcctgggcgacaaagggagaccctgtttcacgcacctgcggcagccgggcccggcagggacgagggctcggcggcgcccccgggaagagcgcggtccgggccctgggtccccgtccaggaggcgccgctgccgcagtgagcacgtcgggccgggtcttgagctcgcgccggccgcgctccccgcgtcccgagctgtggcggccgcgtccccgggcggaaggctcacgctcggtgacgccgcgctgtcccagaacctcagcgactttgcagactcactggtgacccaacggtgcgccccgccgccgccgggcggaagtcccgcccctgccccggagaggaagttccgcctcatcgagcgcctgctcaagttcctgctggtgggcgacagcgacgtgggcaagggcgagatcctggagagcctgcaggacggcgcggcagagtccccgtacgcctacagtaacggtaaggcccggcccgcggcgcgcgctgctacgcggggcccgagcccggcgagctgggcacggagctcgcccgcccacagctccttcagctcacaccggatcgcttacctgcctggaagtcttgtctggcatgttcctcagacaggtgtgtgagcgtacattgccctctccagcttcacaaacaaatgagtcatcgaagtgacctttttcttagtacctggattaaggcagttccaccctcggcaccgtgtccccacaaaccttcctgggagcaagttttcctcccgccacgttggtcagggtgtgtgtgcccgggtcctggaagacttcagaaggggttaatcctggcttgactttatttctctctctgctgccagcaggacccacttcaccaggtcagcaaggaggaggcagcttcccttggggccacgccgtgcctcctccgtgtgcgctgctgccatggctgcttctgtcgataggcatgtacgtgaaaatgcacacccgtgggtgttcgctactgtcagcgtggattcagcaaggttttgttccctcgtggcatcagtcagcgtggattcagcaaggttttgttacctcgtggcattaatcagcgtggattcagcaaggttttgttcccttgtggcatcagtcagcgtggattcgcaaggttttgttccctcgtggcatcagtcagcgtggattcgcaaggttttgttccctcgtggcatcagtcagcgtggattcgcaaggttttgttccctcgtggcatcagtcagcgtggattcgcaaggttttgttccctcgtggcatcagtcagcgtggattcgcaaggttttgttccctcgtggcatcagtcagcgtggattcgcaaggttttgttccctcgtggcatcagtcagcgtggattcgcaaggttttgttccctcgtggcatcagtcagcgtggattcgcaaggttttgttccctcgtggcatcagtcagcgtggattcgcaaggttttgttccctcgtggcatcagtcagcgtggatttgcaaagttttgttcccttgtggcatcatactcctttcctgtttggtttgggactcccatggcccccttgatgttggagcctcttcaggtggcacctgcgtcctgggctatgccctgagttcccggagctccctgtgtcctg

SEQ ID NO: 29270 - DNA, 2436 bp, Homo sapiens
  SIMILAR (907)..(2130): 501254mologous to Mus musculus granuphilin-a,accession number AB025258,Smith-Waterman Score=973.
atgaattccaaagttcctgctctccggaaggtggagaccaagagaaagtactgccacatagttataaggaagctgaaaaatgaactcttagaagcaaaacgtagaagtgggaaaactcaacaagaggccagcagagtttgtgttcactgtcacagaaacctgggcctaatctttgaccggggagacccttgtcaggcttgctcactgagggtatgcagggagtgtcgagttgcaggccccaatggcagctggaagtgcactgtctgtgacaaaatcgcgcagctaaggattataactggtgagtggttttttgaagaaaaggcaaaacgtttcaagcaagtcaatgttctcggcactgatgttgtccgacagtccattttaagaagaagtccaggagctgaagaagtacagagccaagagcaaacccgccaggatgcggaaaagtcagacacttcacctgttgctgggaagaaggccagccatgatgggcccaagagaaagggatttcttcttagcaagttcagatcggcaaccagaggagaaatcataactcccaaaactgacactgggcggagctatagcttggacttagacggtcaacattttcggagtttaaaatcacctcctggttcagacaggggaagcactggctcatcagatctcaatgaccaggaacctggtcctaggaccccgaagaaaaatcggaacaatggtgtgaccccaggcactcagagttcaccagccccaagcacacgaactgtgacctcagtcatcagtagagagtatggttttgaaaattccatggatttggctgctattgaaggtacctctcaggagctcacaaagagtcaccgcagaaacacttctggcacaccttccatagcagtgtctggaacctctctctcctcagatcagagtcgatctgagttagatttgagtgagtcatttacagaagactcagaggatactgtaagcataagaagcaagtctgtccctggggctttagacaaggactccttggaagagactgaagaaagcattgatgccttagtgtcctcgcagttatctacaaacactcaccgtctggcaagtggcctatcaactaccagccttaacagcatgatgagcgtttacagtgaaacgggagactatggcaacgtgaaagtcagtggtgaaatccttctccatatcagctactgctacaaaactggtgggctgtacatttttgtcaagaattgcagaaatctggccataggagatgaaaagaaacagaggacagatgcttatgtcaagtcatatcttcttcctgacaagtcccggaacaacaagcgtaagaccaaaatcagaacaggcaccaatccagaattcaatgaaacactaaagtacactatcagccatacccagctggaaacaagaactctgcagctctcagtctggcactatgatcgatttggacgtaatagcttcctcggggaagtagagattccttttgactcatggaactttgaaaatccaactgatgagtggtttgtgcttcaacccaaggtggagtttgctcctgatattggccttcaatacaaaggagagctgacagttgttttacgttacattcccccagaagagaacctgatgcttccaccagaacaactccaaggaaataagacttttaaaaagggaaagaagaaggagtcacctgtaatctctggaggaatactagaagtgttcatcaaagaggcaaagaatttgacagcagtgaagtcaggaggcacttctgatagctttgtgaagggctacctgctccctgatgatagcaaagccaccaagcacaaaactctggtaataaaaaagagtgttaaccctcagtggaatcatacattcatgttcagtggcatccatccccaggatataaagaatgtttgcctagaacttactatctgggacaaggaggccttttccagcaacatctttctgggaggagttcgtttgaattctggaagtggtgtgagccatgggaagaacgtggattggatggactctcagggggaagagcagcgcctttggcagaagatggccaacaaccctggaactccctttgagggtgtactcatgcttcgttccagcatgggaaaatgcctgatcataggcgatgacgaagactttacctggcaggcttcactgggaaagctgccctccacacaccagacttggtgcacagccagcgtatggcagtctctgtggggtgttgcagtcaaagactcagaccccctggccaatcatgctctttcacatatttacattcctagccctgtgccttcatttctaggccctttatctgaggccttgggcaagaggtcttcaggttcctctgctgagatcttatggggggaaaatggaagagtgaagttgatgcttcctctggttttagactgtgactga

SEQ ID NO: 29271 - DNA, 2779 bp, Homo sapiens
  SIMILAR (1316)..(1810): 521254mologous to Drosophila melanogaster BcDNA.GH09817,accession number AF181640,Smith-Waterman Score=445.
tgtgcatctagatgatctggtggagtttacacttcagaggcactggtaatgccaaagatttatttgcctctcattcattaagaagaaaaaagaaagaaaatgtaactaattgaagagtctggatgacaattatctttttcaaaacccaccatcttcctggagtctgcgttgttctcttccagaatagatgttgagcttttaaacaaacctgcagtagaagcaagccctctccaggaaatcccaatctctttccaaacagggacagcaaaggttctctctgttgtggctggtttttccctctcttctgggaattggtttgccttctgagagcatcccaaggaaaggggaggtgcgccccaaattggcgaggctctgccaaataccaaaggctcttctttggaagaagactcctcctttggacaagctgctgaaccctgcccgaagaaaccacatgagccagcagttgctgccctcccgaagtggtcctcggaggcagcgcaccccttcattttggcgaaccgaggaggaagggaggaaccgtgtgggggaaatctagaacttctggttccccaaggacccagcagactgtgttctggctacaaggtgatcactgccaccaggctggagctcacctgggagactccaagtggaagccgagcctcggttctgcctctccaggcaacgcgggaggcccagcgggaaggcaggaggcggcggcggaggaggagctctactgagccgcaactgtggcgacagcaaccggagtcgcagccgccgccacctgcacctggcgcctagcccacgtaagccggcggaggcggagggagacgcggtacccctgggctgcgttagagcaggcgggaggacggccgcagggttcacgtgttgggggacagggctacggtccaggtggccggttggagacggtctcgagagcagtgtgtcggttgcccctggagagatcccgaaagggcgccctgggccaaggggcagttctaggctgcaaaccgcggccgccgagccatttaaatggtttccgagtggtttggaaagggctctgtggccgggacgcggacacccctctctctctgtttcgactctgcacttttccgggtgcgctctccaggccagagttgggcccactttgctgatcaagggagaagagttcttttcttccgtggcgggaagaaatccaactgccacgcaccaaccactcaccatctcgttagaggacctgttgacttaaggacctgcatatcgcggctatggtttgcctgtggcatatgactcaaagatgactaagaatggcacagtagaatcagaagaagccagcactcttacactggatgacatttctgatgatgacattgacctggacaacacagaggtagatgagtacttcttcctacaacctttgccaacaaaaaaacgaagagctctgctgcgtgcctctggagtgaaaaagattgacgtggaagaaaagcacgaactccgagccatccgcctctcacgagaggactgtggctgtgactgccgagtgttctgtgatccagacacgtgcacctgcagcctggctggcattaagtgccaggtggatcgtatgtctttcccatgcggctgcactaaagaaggatgtagtaacacagcaggtagaattgaatttaatcctatccgtgttcggactcactttttgcacacaataatgaaacttgaactggagaaaaaccgagagcagcaaatccccacgctgaatggctgccacagtgagataagtgctcacagtagttctatgggccctgtcgctcactccgtagaatattcaatcgcagacagttttgagattgaaactgagccccaggctgcagtgctgcacctgcagtcggctgaagaattagattgccaaggagaggaggaggaagaagaggaggatgggagcagcttttgcagcggagtcacagattctagcacgcaaagcttggcacctagtgagtcagacgaggaggaggaggaagaagaagaggaagaggaggaggaggatgacgatgatgacaaaggagatggcttcgtggaaggtttgggcacccatgccgaagttgtccctcttccttcagttctttgttattctgatggcaccgccgttcacgaaagccatgcaaagaatgcttctttttatgccaactcttcaactctgtattaccaaatagatagccacattccaggaactccaaatcagatctctgagaactattctgaaagagacactgtcaaaaatggtaccctttcgctggtgccttacactatgaccccggagcaattcgttgactatgcccgacaagcagaagaggcctatgggtgcctcccacttacccagctggccaacccctctgtaatcgtttgctgctcctcttccgaaaatggatagcgggtgttgccctgcaatagtttatatcctgaacacaggtccaatcaccctcaagtggaatttcactcatacttgaaaggcccctcccaagaagggtttgtctctgcattgaatggtgacagtcacatttcagagcatcctgctgaaaattctttgagccttgcagaaaagagcatattgcatgaagagtgcatcaaatcacccgtggttgagacagtccctgtttagtagcttaaattattctaggaccaactcttctcttatttaaggcactgtatttaattggatttcctgggctcatcatttgttaaactgaagaccaagaaaacttggacggtggttaatcttccagactgg

SEQ ID NO: 29272 - DNA, 369 bp, Homo sapiens
  SIMILAR (363)..(208): 391254mologous to Escherichia coli No definition line found,accession number U00006,Smith-Waterman Score=77.
  misc_feature (1)...(369): n = a,t,c or g
aatacaggcctttttcacaaaggaatgactgtgctgctccgtcttccttcttttttgtttgcgaggccacagggaaatctggatcctctggtgaaaaagcaaatcnnnnnnnnnnnnnnnnnnnnnnnnnnnnngctgccgccgccagttcttgtaaatgtcctcacttggtttctgggcagcaacttccttgacttgcctggggagcggatctgagctgcatttaccaagccatgcccaggggaagtgatcagtgtgggaccgtgaagctggatttccccaggagctccctccaagcttctgcgatgatgataagactcgggatgaaccaaggatctggaaccatgcgacaatgcgaagcctaaaccc

SEQ ID NO: 29273 - DNA, 1830 bp, Homo sapiens
  SIMILAR (1350)..(1640): 311254mologous to Homo sapiens Human myotonic dystrophy gene protein,accession number R41001,Smith-Waterman Score=77.
atgtcagccgaggtgcggctgaggcggctccagcagctggtgttggacccgggcttcctggggctggagcccctgctcgaccttctcctgggcgtccaccaggagctgggcgcctccgaactggcccaggacaagtacgtggccgacttcttgcagtgggcggagcccatcgtggtgaggcttaaggaggtccgactgcagagggacgacttcgagattctgaaggtgatcggacgcggggcgttcagcgaggtagcggtagtgaagatgaagcagacgggccaggtgtatgccatgaagatcatgaacaagtgggacatgctgaagaggggcgaggtgtcgtgcttccgtgaggagagggacgtgttggtgaatggggaccggcggtggatcacgcagctgcacttcgccttccaggatgagaactacctgtacctggtcatggagtattacgtgggcggggacctgctgacactgctgagcaagtttggggagcggattccggccgagatggcgcgcttctacctggcggagattgtcatggccatagactcggtgcaccggcttggctacgtgcacagggacatcaaacccgacaacatcctgctggaccgctgtggccacatccgcctggccgacttcggctcttgcctcaagctgcgggcagatggaacggtgcggtcgctggtggctgtgggcaccccagactacctgtcccccgagatcctgcaggctgtgggcggtgggcctgggacaggcagctacgggcccgagtgtgactggtgggcgctgggtgtattcgcctatgaaatgttctatgggcagacgcccttctacgcggattccacggcggagacctatggcaagatcgtccactacaaggagcacctctctctgccgctggtggacgaaggggtccctgaggaggctcgagacttcattcagcggttgctgtgtcccccggagacacggctgggccggggtggagcaggcgacttccggacacatcccttcttctttggcctcgactgggatggtctccgggacagcgtgcccccctttacaccggatttcgaaggtgccaccgacacatgcaacttcgacttggtggaggacgggctcactgccatggagacactgtcggacattcgggaaggtgcgccgctaggggtccacctgccttttgtgggctactcctactcctgcatggccctcagggacagtgaggtcccaggccccacacccatggaactggaggccgagcagctgcttgagccacacgtgcaagcgcccagcctggagccctcggtgtccccacaggatgaaacagctgaagtggcagttccagcggctgtccctgcggcagaggctgaggccgaggtgacgctgcgggagctccaggaagccctggaggaggaggtgctcacccggcagagcctgagccgggagatggaggccatccgcacggacaaccagaacttcgccagtcaactacgcgaggcagaggctcggaaccgggacctagaggcacacgtccggcagttgcaggagcggatggagttgctgcaggcagagggagccacagctgtcacgggggtccccagtccccgggccacggatccaccttcccatctagatggccccccggccgtggctgtgggccagtgcccgctggtggggccaggccccatgcaccgccgccacctgctgctccctgccaggccgggaatgctgctgctgctgctgctgctgctgctgctgctgctgctgctgctgctgctgctgctgctggggggatcacagaccatttctttctttcggccaggctga

SEQ ID NO: 29274 - DNA, 4263 bp, Homo sapiens
  SIMILAR (4163)..(441): 1001254mologous to Homo sapiens mitochondrial DNA polymerase gamma,accession number D84103,Smith-Waterman Score=6629.
gagtcttttttttccttctttttatttccactgccttggagcaggtttatcacgttagagcattaattctttccccttctagggcactgcatcagagcatgggggacagaacaaagaaccagccaagaagaaaaggaaaaaataaatgaaatgcctgagttaatgtgaactttggggcttctgcttcatttttacccaacaagcaacaatgccccttgtcctgtagtccacaccgatgttggcatcttggttctgaacccactgaattcaactgcaccttcagttagaaggaatcttcttggcaggtcctgctactgaaaaatggctggccttaggcaagccgttttgcaaaaagcacagctgaaagcctgagtttgggagcctgcacccaccccgatgaagctccacgggagcaaatacagagcctccaggcagtgctatggtccaggctggcttcgtttttccaaggagcctttggtgagttcaattatctggtaaatatccagcgcttcaccctggggaatcccgtatctcctttccatcccagttgggttggaaggggttttacaatccatggtcacttccttcctgaggcaccggtcaatatcgactgcactgaaaaaggcgactgactggggcaagtcattcagacccagcttgtaggcaaacatgcacctggtcaagaggttggtgatctgcaaggccagggcagcgcggtagcggtcctcctcccgcaccaggtagcgaacctcgtcatggatgctgatgcagaagcgcccatctatggcaaactcttcaaacagccacttcatggccacaagcatgaggtgtaagtagtcaacagcagagctctgtaccacccaattcacacggctggtcataaactcttcctggacagccgagggctccagggctcggctgatgcagcagcccagcaccggggtacgtggtatgtcagacgtagcaatgctctcaagcttattgaacatttctgactctgtgccccccttccatgcccgttcagcaaccacctcccacttcttccactgtgacttccttgcagtttctctctggaccttgcgcagatcctgcagggaaatccagccaccctcagtcctgtccactgggaggttcaactccctcaccagccactcgccctcatccgacagccgataccagcggaggcccttggtggcagcgtacatctgctgggccttctcagctgcctcctgctgtgtgagccggtggttaaactgcattagtaagcgctcagcaaagggctgcccagcaccatagatgcggccgtagttgaagattttggcatgctcacggctgatgcccacagtagtggctgtcttactgtgtagatcagtgcccctgctcttcctgccctgcagtgtcatccacccaaaggctgtgcagccatgcatgccggcaaagtgggcgtctccaagcacagctgcaatccacagctcttgggagtccacatcagcacccacaagggtgtagccaggtggggcctgcaccatggctttcaactcactgcctactcggtcaggccgggcattgctggcggtgagccatgtgggctccacagcccggcgagtgatggtgccggcagtcaccacttggggcaggatggccccatagaggccttcctcatcatagtcggggtgcctgatcacagcacggggcagagctgacctgggcagccacaccaccatctgggagctgatacgtttatgggcgttcctccagaaagaaatcattttgttgatttccagagcacggggcccactggcacctcctgggccagcctgcagggtgccatcctccatcttgggcaggaagtccttggcaaaggggcttcccacattacagctattaccatccttgtgaggcagcttgaaaaaccagcagccagggatgtccacgtcgttgtaaggtccattgccatggtgatagctgggctgggtgtccttggggccaccacgggcagtcagagctaggggttgacctggcactgcagctcgcaagttctccatcttggcctcagcctccacttctaagtaatccagttcttctaccgtttgccatatggcactattgtcagtgagcaggaactcctccgccaggccggcctcctggggcatcagctgctgcttcccctgttcgagacagtgcttcctgtacagggactcgatggctctgtaggggcagaccaccccagctgactccagggtggtacctgtcggcagcttggccaggttgtcccgccgcccaggcaccaagtagccccagccatgacgctctgagtagtgcagagggaagccatcccaggtaagtgccatgagtttaggtgtgacccgcatctgcaggctgaggaggctggggcccggggtccatgcagggtcgtctagccgggggcagagcttccggtaccatccagggtgtccaggaaggtgctggggccgcttgggcaggagctctgtggtccccttcagcttctgcaagcaggcgcgggccatgacatcttgttgaaactcctcctcctcactgcaggggccgaggtcttcctgatccatgggatcaccaggggccccagccccctcgatgggcaacttgctggctgtggctggttccttcttcaccttcttagctttcttctgcttaaattcttgcaggtcccactccaggtcccagagccaggggtcttctttgtacctctctcctgagagcagctggcaggcatcattggccagatccatcaacgacttcttcatctcccgctggagctcctcataagtgccctgtgcctctgccaggtaacgctcccagttctggttgacaggcaggtaggagacacccatctccagcatgccggccagagtcactgggtggggacacctctccaagaagagcggtagctgctgctggaaaacctcatgggtggcccacacgtcctgggcacagtactgcatcaggtcctggaagttctcacgaatgtccttcatggtgcccttcacaaacagttctcgaggctccttctctaagggaggcccccctacataaagtctgtgcacctctgccagactgttgacactgctgatgtccagccagtcccaggatgagatcgctgggcctcttctggctttcctctgggacttctggccttgttttgtggggggctggaccttgtgtttgccctgcttggctgctatccacagactgcgctggaagctgcttagccctgagatggccatgtgcatgctcatggtgtccaggaaacgcatgcgggaaccctggatcaggtactgctccctgatatgagctcggtcaaaggaaacattgtgccccaccactaactgctcctgccagtctctctgggtggggctgctggcaccagtagggacctccagggggatgaggtcagccggcgacagctggctggtccaagagtaacgctcttccaccagccgctggctgcaccaggaataccaggccgagggggatatggccaccgccaatgtggggcaagttccctctgccaagcagacctccacgtcgaacaccagggcccgctcctcggggatggccacgggtacggcctccccctcggggccgtaccgggtccagccctccgcccaggcccaagccgggggcttcgggggcagctgggcctgcaacagcaagttggccgcctccaggtagggcaggctctgcttctgggccaggaggcggaagtgctggtccaggttgtccccgtagaggggcggcaggcgcagctccacgtcgggcaagggcacggctggctgcccccagagcccgtgcttctgcaggtgctcgacgctgcggcgcaccgcggcctcgccaggcatctcccctccttgcccgaagatttgctcgtgcagccctctcgagagcatctggatgtccaatgggttgtgccgcagctgcccgccctccgaggatagcacttgcggctgctgaggctgctgttgctgctgctgctgctgctgctgctgctgctgctgctgccgccgccgctgcccgtcgctggggtcggacgcggggacggagctggagacccagcgccccggagctggaaccggccctggcccgacggtggcgccggccaccttcctccagagcaggcggctcatggttggtgcagggacccccacgctgggagtcagaacacctggctttgggctccagcttggcttcttttactggctggaagacgtggagagagacacgtcc

SEQ ID NO: 29275 - DNA, 781 bp, Homo sapiens
  SIMILAR (284)..(63): 931254mologous to Homo sapiens Human secreted protein, SEQ ID NO: 7182,accession number G03101,Smith-Waterman Score=363.
aactggtgcctgtggtggctcgttggtctttgtctcttagaaggtggggaataatcatcaccaatgaagaccaccaaattatcacgccccccgtgctgccctgaggaagtagaagctcctcgctgcttctggcacttcagcgggaagttggttggggcgggatcgcgcgccctctggtggcaccatggttcagcacagacgctcttgctcacagtttcgcggcggatgtgcgccccctcctggctgtcctgaaatacctttcctcgggcagcctcggggaccatgaagccacagcttccccagtcgttcctgaggagctgaggagaaggaggctgggtcgtccctggccacggtccccaggtgttcctagagagccagcggcgtctcccgagtaggtcctgaatgcctttttcacaaaggaatgactgtgctgctccgtcttccttcttttttgtttgcgaggccacagggaaatctggatcctctggtgaaaaagcaaatccagttgctgctgctgctgctgctgctgctgctgctgctgctgctgctgctgctgctgctgctgccgccgccagttcttgtaaatgtcctcacttggtttctgggcagcaacttccttgacttgccggctcaacgggacagacatgggacaagtgtgcctgatcatggtggcgttgccaagaagcagctgtcgcactgccatgggttctacgtgtttcttgggcagaggacgcatgggaccagaatgggcaccaggaatggtggtgaacaaaggccccat

SEQ ID NO: 29276 - DNA, 3590 bp, Homo sapiens
  SIMILAR (3228)..(442): 971254mologous to Homo sapiens Human androgen receptor,accession number R12223,Smith-Waterman Score=4798.
gtttgcttgttttttgttttgatttccccagataatcttagctctctaaacttcccgtggcataagataagtaaacggtttgtgtggctggcacagagtagtgctgtaaacaagcacaacttgacactgggccatatgaggatcatcacagatttaaaggcatacaacaccattcaaaacacagataggagccacaatgggaagcaaagtctgaaggtgccatgggagggttagatagggagggaagaagaaaaagaaaggagagaaagagaaaaaaaaagcccagcagatagaattcaggaacatgttcatgacagactgtacatcaatagaggaaattccccaaggcactgcagaggagtagtgcagagttataacaggcagaagacatctgaaagggggcatgagctggggtggggaaatagggtttccaatgcttcactgggtgtggaaatagatgggcttgactttcccagaaaggatcttgggcacttgcacagagatgatctctgccatcatttccggaaagtccacgctcaccatgtgtgacttgattagcaggtcaaaagtgaactgatgcagctctctcgcaataggctgcacggagtccaggagcttggtgagctggtagaagcgtcttgagcaggatgtgggattttttcttttgcatgcaatgatacgatcgagttccttgatgtagttcattcgaagttcatcaaagaatttttgatttttcagcccatccactggaataatgctgaagagaagcaaaaaaaaaaaaaaaattagcatggctttcatgcacaggaattcctggggggtgatttggagccatccaaactcttgagagaggtgcctcattcggacacactggctgtacatccgggacttgtgcatgcggtactcattgaaaaccagatcaggggcgaagtagagcatcctggagttgacattggtgaaggatcgccagcccatggcaaacaccatgagccccatccaggagtactgaatgacagccatctggtcgtccacgtgtaagttgcggaagccaggcaaggccttggcccacttgaccacgtgtacaagctgtctctctcccagttcattgaggctagagagcaaggctgcaaaggagtcgggctggttgttgtcgtgtccagcacacactacacctggctcaatggcttccaggacattcagaaagatgggctgacattcatagccttcaatgtgtgacactgtcagcttctgggttgtctcctcagtggggctggtggtgctggaagcctctccttcctcctgtagtttcagattaccaagtttcttcagcttccgggctcccagagtcatccctgcttcataacatttccgaagacgacaagatggacaatttttccttcggaatttatcaatagtgcaatcatttctgctggcgcacaggtacttctgtttcccttcagcggctcttttgaagaagaccttgcagcttccacatgtgagagctccatagtgacacccagaagcttcatctccacagatcaggcaggtcttctggggtggaaagtaatagtcaatgggcaaaacatggtccctggcagtctccaaacgcatgtccccgtaaggtccggagtagctatccatccaggggcccatttcgcttttgacacaagtgggactgggatagggcactctgctcaccatgccgccagggtaccacacatcaggtgcggtgaagtcgctttcctggcccgccagcccctgagggggccgagtgtagccgtagggggctacagctcccgcctcgccgccgccgccgccgccgccgccgccgccgccgccgccgccgccgccgccgccaccacccccaccaccaccacacggtccatacaactggccttcttcggctgtgaagagagtgtgccaggatgaggaagcggcggctgagggtgacccagaaccgggtcccgctgcacccgcgccatgcaggctcgccaggtccccatagcggcactgcgccgccgcagccgcccaggcgctgccgtagtccagcgggttctccagcttgatgcgagcgtggggatggggaggcggcggagggggcggcggtccggccagagccagtggaaagttgtagtagtcgcgactctggtacgcagctgcctcgtccagtgctccggacttgtagagagacagggtagacggcagttcaagtgtcccggagctccctgctgcagcgctgccagagcagcctaggctctcgccttctagccctttggtgtaacctcccttgaaaggggaatactcagcagtatcttcagtgctcttgcctgcgctgtcgtctagcagagaacctttgcattcggccaatggggcacaaggagtgggacgcacagcgggtggaactcccaaaagtggggcgtacatgcaatccccccgaagctgttcccctggactcagatgctccaacgcctccacacccaggcccatggacaccgacactgccttacacaactccttggcgttgtcagaaatggtcgaagtgccccctaagtaattgtccttggaggaagtgggagcccccgaggcctccctcgctctcccgctgctgctgccttcggatactgcttcctgctgctgttgctgaaggagttgcatggtgctggcctcgctcaggatgtctttaaggtcagcggagcagctgcttaagccggggaaagtggggcccagcagggacaacgtggatggggcagctgagtcatcctcgtccggaggtgctggcagctgctgcggcagccccttgctggcggccacggcggctccaggctctgggacgcaacctctctcggggtggcactccagggccgactgcggctgtgaaggttgctgttcctcatccaggaccaggtagcctgtggggcctctacgatgggcttggggagaaccatcctcaccctgctgctgctgctgctgcctggggctagtctcttgctgctgctgctgctgctgctgctgctgctgctgctgctgctgctgctgctgctgctgctggctgctgtgcagcagcagcaaactggcgccgggaggtgctgcgctcgcggcctctgggtgcctggggcccgggttctggatcacttcgcgcacgctctggaacagattctggaaagctcctcggtaggtcttggacggcggccgagggtagacccttcccagccctaactgcacttccatccttgagcttggctgaatcttccacctacttcccttaccccgcctccccttctcttgctcagaagagttcaacaggctgtgatgatgcggtagtcgctgcagctagctgcccacctgcgggaagctccagagaaggaaacttgcgggagcaaccacgcaaaaagcgctctgacagcctcaaagtctcgtgcagaagaagacacacggtggacaagatctgccctgctaggctcacagtctgtctcttaatacttgaagggtagattcaaaagatgcccagatcttaaaagaaaaaaacaaaatcctccaccttccaaattcagtgtccactgaagtaggtgcaaataagaactgagttatta

SEQ ID NO: 29277 - DNA, 1620 bp, Homo sapiens
  SIMILAR (562)..(759): 381254mologous to Vicia faba VfENOD-GRP2,accession number Z81320,Smith-Waterman Score=92.
atgcacggcgagggctctgtggctttggaaaatgctgccgaggtgtctcaggtggagccaaagattcttcctttctggggtgaacatggtctccccacaccaatatctgctcctttgtggggaagtgatgtggggcagaaagatcttgggccttggaatcagatgtatgtgcttccagtcctgcctctatggccctcgagcaagcaacttaacctttctgtgcctatacaaaacaggacccccatctccacccccaagcaggctagccaggggcttgtcagtgttgatgagcgactgtgccaaggggttggccaaaagcacaacttaaagccactgatggacaacgccctgtttctttgtcttgcagccgtctccaacctggacatagagagtaagctgagtgtgtactaccgcgccccgtggcaccagcagcgcaacatcttcctcccagccacaaggccaccctgcgtggaggagctgcaccgccacgcccggcagagcctgcaagccctgcgcagagcttttattgtgctgaatgcagtatctgccaagtcctacttgaaggcatctttgattaagggcctagtcttcccacttgtgaaccatccagagttggcaggagatgaaggtaagatactgaagaattccaagaagactggagggggcagtgctggaggagaagaaagcaacatagggcctggtgcaagcccatgcaggatggggccccttcccagaagtcctgagctagagccccggaatcctgccctggaatctctactggagctaccctctggcccttctttaagacgttcaaatgtcggagcagaagaggagaaggaagaaagggttgtcctctttgtcttgggtagtttgatgcctcagaaggagagcaaaggcgaaaacgttggccagccaaccctgcaggctacactgacagtgaaggcccagggtgtggctacagagggcaaggaagggtgtggcatgaggaagaagagcatggaggatggggcacccatcgtcctgcatctgcccaggatcctgctctgtgccctgctctccaggccatcaccacactcagtggaattgcaactcatttctggtcatggcttgcttactgggtgtaccccaacagcccggaggctatcaacttattcccgccccaagcaggtacagatgcagcctcaggacctagggcctgtgcacacatcccaccctgaagtgacaggacagctgcctgaggttccagaacatgattttagccatggggactcctgcttttgttggaggaagtctgaatctaagaaacatgtactcagcactgatatacagaaaaagcacatactactcacaacaatagctaatagtagtttagcccagaaaatgtcagatattgcactaaatcctcacaaccaccctatgaaaaacaccctcaggcaacagaacaaatggttgattgaagttttatttcttcgccccatttctccaatgctgggttttaaaagtagggaaatagctaaaaagcaggtaatggaagagaaaagagaaagaacaatacgaggaatagatgttgccagaattaacctgagccctgtcctctcacattctgatgtcaccctgtga

SEQ ID NO: 29278 - DNA, 599 bp, Homo sapiens
  SIMILAR (1)..(471): 1001254mologous to Homo sapiens dJ999L4.1 (ribosomal protein L12),accession number AL132821,Smith-Waterman Score=805.
atgctgccgaagttcgacccgaacgagatcaaagtcgtatacctgaggtgcaccggaggtgaagtcggtgccacttctgccctggcccccaagatcggccccctgggtctgtctccaaaaaaggttggtgatgacattgccaaggcaatgggtgactggaagggcctgaggattacagtgaaactaaccattcagaacagacaggcccagattgaggtggtgccttctgcctctgccatgatcatcaaagccctcaaggaaccaccaagagacagaaagaaacagaaaaacattaaacacagtgggaatatcacttttgatgagatcgtcaacattgctcgacagatgcggcaccaatccttagccagagaactctctggaaccactaaagagatcctggggactgcccagtctgtgggctgtaatgttgatggccgccaccctcatgacatcatagatgacatcaacagtgagaatgacaaacagccacgaaagagtaagatgagaacttcattcagtccccagattccagggcatgaacactttcactaccttctgcttcttcagcacgttcactgccagttagctttgacattaag

SEQ ID NO: 29279 - DNA, 507 bp, Homo sapiens
  SIMILAR (274)..(504): 721254mologous to Homo sapiens dJ999L4.1 (ribosomal protein L12),accession number AL132821,Smith-Waterman Score=294.
atgtggaactgtcttacaaacaagctgttattccaagaatctcttcaaaaaacagcaacaaggctttcagctttcagctgggaggaggccaaggtgcaactttcttgggtcgtcctgaatctagccacctctgccatgctgccgaagttctaccccaatgagatcaaagtcacatacctaaggtgtactggggatgaagtgggtgccacgtctgtgttggcccccaagatcagccccctaggtctgtcttcagaaaagccctcaaggaaccgccaagagccagaaagaaacagaaaaccattaaacacagtgggaaatatcacttttgatgagattgtcaatgttgctcaacacatgtggcaccgatctttagccagagaactctctggaatcattaaagagatcctggggactccccagtctgtgggctgcaatgttgatggctgccaccctcatgatatcatagatgacatcaacggtggtgctgtggaatgcccagctaattaa

SEQ ID NO: 29280 - DNA, 1272 bp, Homo sapiens; identical to SEQ ID NO: 6807
  SIMILAR (835)..(1269): 691254mologous to Homo sapiens ribosomal protein L12,accession number L06505,Smith-Waterman Score=465.

SEQ ID NO: 29281 - DNA, 3003 bp, Homo sapiens
  SIMILAR (2145)..(1024): 961254mologous to Cloning vector pBACe3.6 levansucrase,accession number U80929,Smith-Waterman Score=1904.
ctatcctgtcgtcatggaagtgatatcgcggaaggaaaatacgatatgagtcgtctggcggcctttctttttctcaatgtatgagaggcgcattggagttctgctgttgatctcattaacacagacctgcaggaagcggcggcggaagtcaggcatacgctggtaactttgaggcagctggtaacgctctatgatccagtcgattttcagagagacgatgcctgagccatccggcttacgatactgacacagggattcgtataaacgcatggcatacggattggtgatttcttttgtttcactaagccgaaactgcgtaaaccggttctgtaacccgataaagaagggaatgagatatgggttgatatgtacactgtaaagccctctggatggactgtgcgcacgtttgataaaccaaggaaaagattcatagcctttttcatcgccggcatcctcttcagggcgataaaaaaccacttccttccccgcgaaactcttcaatgcctgccgtatatccttactggcttccgcagaggtcaatccgaatatttcagcatatttagcaacatggatctcgcagataccgtcatgttcctgtagggtgccatcagattttctgatctggtcaacgaacagatacagcatacgtttttgatcccgggagagactatatgccgcctcagtgaggtcgtttgactggacgattcgcgggctatttttacgtttcttgtgattgataaccgctgtttccgccatgacagatccatgtgaagtgtgacaagtttttagattgtcacaccagtcacgcgccgcggccgaaaagggagggcactgtgtctctttgcctgaagatccctctccagccataggaacatgaggggtgggctgtaagttgccctgagaacagctctcaaccaaggacagacaagagttgctggataaacatcctagtttccttgggccttggtgggacagttctgaagtatgtcctacacagtctctcataaggtccccagaaggactgaccccagtggccatcagcggtaacttagttgatcctgatacataaccattcatgtgaataacgtttgagttaataccatcgatcgtcatttttgaaccgcgtgaatcagtgaacaagtaccatttgccgttcattttgaaaacattcgcgcgctcgatttcatcagttaccgtgtttgaagtgatcagcggcttcattacttttttcaatgtgtaatcattatttaactctatgataccgagggcgccgttcgctaactcagcatcgcgttttttagcgctctgctgaagcttctggctttctttacggaagaagttcgtgccgccgccgtagtacgctttgttaaataaagattcttcgccttggtatccgttttctgttcccgtgttggcttcgaatacaaggtatttatggcctttgtcttcaacgtagtgagggtctctcagcgtatggttgtcgccggatgtataattgccttcatcgataaactgctgaacgttctgatatgtttttccgtctccgtcaaaaatcgttttgtgatcttccactccgttgattttgagtgtgtcatcagattttgacacatttacctgcgctgttgtcaggctttgtttgccgtaatgtttaccggaatagtcagtgtagaataaacggatttttccgtcagatgtaaaggttgcagaaccggaccattcttgcgtctgatctttcaggatcggatcgttggcgtcgaacttatcgctgtctttaaagacacggcccgcgtttttccagctgtcgattgagttgtcgccgaccttttgataaaacatgtagattgatgtgtcatcagcgtctttcgggcttcccgcaagagcaaacacaacgtgatagccgttgtattcagctactgttccgtcagcgttttgcagcggccagctgtcccacacatcaagtccttttgcagactcaatatttttaatcgttgattgatcgaattgaggcacttggtatttttcgttttgctgctgtttagggatctgcagcatatcatggcgtgtaatatgagagacgccgtacgtttctttgtatgctttttggttattttctttcgcgaaggcttgagtcgctcctccaaccagctggcctctgttgtcacccgtcagctcacgatccagtccctctggatggtgacggtcagcgccgtgccggccaggtttgccaaggccactagggtggtcaccagtgcacagcaggccacagtgagccagccatcccagatttgttccatctgcctcttgtaggggagcacaaagcattagggacagtggcaacaaggccggggaccggaagccgttctggcttgcccaagcgagggatttaaccaaccggttgttcctttccatgtttagtgcttccttcaggagctcttttagggcaggcctggtggtgacaaaatctctcagcatttgcttgtctgtaaagtattttgtttctccttcacttatgaagcttagtttggctggatatgaaattctgggttgaaaattcttttctttaagaatgttgaatattggcctccactcttttgtggcttgtagagtttctgccgagagatcagctgttagtctgatgggcttccctttgtgggtaacccgacctttctctctggctgcccttaacattttttccttcatttcaactttggtgaatctgacaattatgtgtcttggagttgttcttctcgaggagtatctttgtagcattctctgtatttcctgaatttgaatgttggcctgccttgctagattggggaagttctcctggataatatcctgcagagtgttttccaactcggttccattctccccatcacttttagatacaccaattagatgtagatttgatcttttcacatagtcccgtatttcttggaggatttgttcgtttctttctcttcttttttctctaaacttctcttcacgcttcatttcattcat

SEQ ID NO: 29282 - DNA, 804 bp, Homo sapiens
  SIMILAR (367)..(801): 691254mologous to Homo sapiens ribosomal protein L12,accession number L06505,Smith-Waterman Score=465.
atgaacgacacatggttgatggcagagttcagacaacaattatttggagcagaccaggagcaaagacagctgattagaggatcagtacccagggcggtaccactcaccaaccagctggcctctgttgtcacccgtcagctcacgatccagtccctctggatggtgacggtcagcgccgtgccggccaggtttgccaaggccactagggtggtcaccagtgcacagcaggccacctaccgaaggaggggaaagggtcttacaaacaagctgttattccaagaatctcttcaaaaaacagcaacaaggctttcagctttcagctgggaggaggccaaggtgcaactttcttgggtcgtcctgaatctagccacctctgccatgctgccgaagttctaccccaatgagatcaaagtcacatacctaaggtgtactggggatgaagtgggtgccacgtctgtgttggcccccaagatcagccccctaggtctgtcttcagaaaagaacagagaggcccagattgaggtggtgacttctgcctctgccctgatcatcaaagccctcaaggaaccgccaagagacagaaagaaacagaaaaacattaaacacagtggaaatatcacttttgatgagattgtcaatgttgctcaacacatgtggcaccgatctttagccagagaactctctggaatcattaaagagatcctggggactccccagtctgtgggctgcaatgttgatggctgccaccctcatgatatcatagatgacatcaacggtggtgctgtggaatgcccagctaattaa

SEQ ID NO: 29283 - DNA, 812 bp, Homo sapiens
  SIMILAR (102)..(524): 391254mologous to Homo sapiens ribosomal protein L12,accession number L06505,Smith-Waterman Score=102.
  misc_feature (1)...(812): n = a,t,c or g
cggacgcgtgggcggaggaggccaaggtgcaaactaccttcgggtcgttccggaatccggtgtttattcgacacccagccgccttccaccattgccgccgaaagttcgacccccaacgagattcaagtccgtataccttgaggttgcaccgaaaggtgaaagtcggtgcccacttctgcccttggcccccaaagaatcggcccccctgggtcctgtctccaaaaaaaagttgggtgaatgacatttccaaggccaacgggtgaactggaaagggccctgaggaattacagtgaaactgacccattcagaacagacaggcccaagattgaggtggttgcctttctgcctctgccctgatcatcaaagccctcaagggaaccaccaagagacagaaagaaacagaaaaacattaaacacagtgggaatatcacttttgatgagattgtcaacattggctcgacagatggcggcaccgatccttatgccagagaaactctctggaaccatttaaagagatccttggggactgcccagtcagtgggctgtaatgttgatggccgccatcctcatgacatcatcgatgacatcaacagtggtgctgtggaatgcccagccgtaagtgacattttcattgttacagtaggggtgaaaggggggccacccagtgtattcacagagataagctgggaagttttggaaatggttactggtggggtgggataatccttttaaactttttactgannnnnnnnnnctttcccacagagttaagcacaaaggaaaacatttcaataaaggatcatttgacaact

SEQ ID NO: 29284 - DNA, 480 bp, Homo sapiens
  SIMILAR (1)..(183): 931254mologous to Rattus norvegicus zinc finger protein,accession number L03386,Smith-Waterman Score=290.
agggcgaagccgcgctcggtgaaagttgaagagggggaggcctcagacttctcgctggcctgggattcctccgtgacagcagcaggaggcctagaaggagagccagagtgcgatcagaaaaccagccgtgcgctggaagacaggaacagcgtgacaagtcaagaggagagaaatgaggatgatgaagacatggaggatgaatcaatttacacctgcgatcactgtcagcaggacttcgagtctctggcagacctgacggaccaccgggcccaccgctgtcctggaggtaatgcaaaacagccccaggactctgacaggtggttacacgggtaattggacatagcaacagcttgaagcctcaagtgagattaaagaattaataatgtaattttacagttaatgtcattttattgtggtgtcttgggtaccctgtatccgccttttaaatacaattaaaaataaaagcaacagctttccggc

SEQ ID NO: 29285 - DNA, 672 bp, Homo sapiens
  SIMILAR (156)..(61): 1001254mologous to Homo sapiens Smad- and Olf-interacting zinc finger protein,accession number AF221712,Smith-Waterman Score= 185.
ttactgcgtttccaaaaggccttccagaaattcagggtgcacatccacccattcatggcctccaggacagcggtgggcccggtggtccgtcaggtctgccagagactcgaagtcctgctgacagtgatcgcaggtgtaaattgattcatcctccatgttctgcttcatgttgactaaagaacatcgccagcagtttgaaatccgagttaagtgatggtttgaggaggagcagcccacttgtggggctccaaacaccctcttggggactgacgggaagtcggcagaaagccggcagaccccgagcagcagcatgataagtgagcttgcacttgcctgcacaggggtgagtgacagccagaccttctcattgcctgcagcatgtttctcctggcctggggctgtgtttagcatatttgttgtgggtaaaatgatctgtgcagactgtgtcaagtagggagtaattacctgcaaaacaggaaccattaaaaccaccttcaagggcttttggaaaaagataaatgccggcaacttgcgtgcgtttgggagccccttcttgacccacatttggccaaaattgggtttaatgaaatgaactctcgtctgcagactggcccatccgggggtgtccgcgccgcgcccccgttcccggctcccgctcagggacgtacccat

SEQ ID NO: 29286 - DNA, 594 bp, Homo sapiens
  SIMILAR (375)..(560): 641254mologous to Homo sapiens Secreted protein encoded by gene 94 clone HPMBQ32,accession number W88627,Smith-Waterman Score= 226.
tgagcttgagtcctgtgacctctctgaactctcttactctttagctctagtactgttttgtagaggccttacaacctttatgacatcgatggccctgtcgtctgcccatcaaggcagttctgattttctctgacagccgcctcctgcctgggcagactcccatccagtgctgtatagaacatgccgaggggaagcactcactctttcactgatgagtatgatgggagctgcactgtttcccggatgcgtctcataaggctgaagatgtttccttccattcctggtttgtgcagagtttttgctgtgaatagaggtagaagtgttggcaaatgtttttctacatcgaatgacgtgcccatatggttttcctcgttttgctaatgtattgttttaatttttttttttttttttagatggagtcttgctctatctcccaggctggagtgcagtggtgcgatctcggctcactgcaacttctgcctcccaggttcaagcgattctcctgcctcagcgtcccaagtagctgggattacaggggcccaccaccatttttgtatttttagtagacatggggtagaagcgacagagaattta

SEQ ID NO: 29287 - DNA, 1137 bp, Homo sapiens
  SIMILAR (940)..(413): 301254mologous to Plasmodium chabaudi circumsporozoite protein,accession number AF043636,Smith-Waterman Score=188.
ctattgacgggctctgatcctttgccgtgggatgccgctgtgactgacgttgccgtgtgttgcattttttgtgtttctggtgaggactgtcttcaggtctgttcgtagcgtgtggttgctagaatgagatgtctgttttgaagagagaacagctgggttcttctcgacccacagggatgcacggcccaccttgtaggttggagcgaggagcgtggaggacaagatcatctctttcactgatgagtatgatgggagctgcactgtttcccggatgcgtctcataaggctgaagatgtttccttccattcctggtttgtgcagagtttttgcttgtctccctttagttctctcagctttgcttcgtggttttgaaggtctctttgcaggtatatgcacaatagctgttttcatgtccttgtccactaattttattatttgtcttatgtccgggcctgtttttattggttggtttttctcctggtcagtgtctgggcgtgtttctattggttggtttttctcctggtcagtgtctgggcgtgtttctattggttggtttttctcctggtcagtgtctgggcgtgtttctattggttggtttttctcctggtcagtgtctgggcctgtttctattggttggtttttctcctggtcagtgtctgggcgtgtttctattggttggtttttctcctggtcagtgtctgggcgtgtttctattggttggtttttctcctggtcagtgtctgggcctgtttctattggttggtctttctcctgggcagtgtctgggcctgtctctattggttggtttttctcctggccagtgtctgggcctgtttctattggttggtttttctcctggccagaggtggttttctcccgcttcatcgcaggtctggttgtttttgtcagccattttgtattttactttattgggtgcaggattttgttatattcctttaaatgctgttgagacttgttttaggttgcagcaaagttaatcatagaccgtttcctcctcttgaggctggcgtttaagctgcgttccggcggctcctaacacggcttaaaagagcggccgttggtgtgaagcccactgttcagcccggacccttctgaccctgcttgctggtcactctt

SEQ ID NO: 29288 - DNA, 1065 bp, Homo sapiens
  SIMILAR (118)..(360): 981254mologous to Homo sapiens p53 binding protein p53UBC,accession number W11945,Smith-Waterman Score=442.
tctggctgcgcgcggagcgggctccggagggaagtcccgagacaaagggaagcgccgccgccgccgccccgctcggtcctccacctgtccgctacgctcgccggggctgcggccgcccgagggactttgaacatgtcggggatcgccctcagcagactcgcccaggagaggaaagcatggaggaaagaccacccatttggtttcgtggctgtcccaacaaaaaatcccgatggcacgatgaacctcatgaactgggagtgcgccattccaggaaagaaagggactccgtgggaaggaggcttgtttaaactacggatgcttttcaaagatgattatccatcttcgccaccaaaatgtaagtagctccctgttcagtgtcctggaagtcggcctgttcctgcggggattggagtcctctccaaagaggcccgtggctgtggccgtggcgccctggtccgggcgatccatggagctgggagggagtgagatcacagatttggaggtcggctttgatccctgatccccgcctcaggctgcagatgcgagtctgtttccagctccaggggtgggcggtgcacgtaatagacttagtctttcatcccagctaattggctgggaagctccagagtcctttgcagggagaggctgtgagatccaggctggagctcctgggctgggagtgcctggaccctcagtggttgttggcgatgaagacaggatttggtgcccacaagaccccagccctggatgggatggacgtgcagaagcgccaccactccgagtctcactggagggtttatcttgccccacctcactgctcttcctgtgggctctcgcagtctctcccacccggggctgcgtctgcagccgggcaggcatagagcaggggagcagcagagaaggcgcgagaagaaagggctgaggccaggttcgacattgagcctacagctaagttagtgatctcagtcagttcagcaaaactcaggagagggaggagagggccgccacgtccctagccgtcccattagctgggaaatcggcaggccctttctgtggtgagttccc

SEQ ID NO: 29289 - DNA, 919 bp, Homo sapiens
  SIMILAR (290)..(433): 391254mologous to Canis familiaris dopamine receptor D4,accession number AB044886,Smith-Waterman Score=61.
gcatgaccatgcttacgccatgcttggcacgagagctcggatctgatcgcactgagactacagcagggacccagcactccacatccatctggggccccagccctgcctagtccccacctgatggtatggtgaggaccctgccatgtcagccaccacagggtggcagctaccccccagccgcagcggcccagcctctgaacatctgtctcctcaccttggagcagaggccgcagcatgtgtcgcagaccagggctgggttggggccatggggaaggggtcctacctgcccccgcctcccggtgatctgggcgccgctcacaaggcctcccctggtagacccccggggtcggacgacggtttgcaagaagagagtccctgctgggccaagccaccgtatgttaagagcaagcctgcctgctgcggaccacgtccccgtgctgggggtggtaggagcccgctcgccacccatttgtaaggagggcttcatttctgtgtgcagtgccgcggacaggctccctcggctgaaaccgcgccctccttccaggaaagaaaggggtaaggggcgctgccggcctcctgcctgtcggggctcagcagatgcgtgcggcagtgccatggggataacagctcagatccccagctgtggcctggcccccgccccgtgaggacttgagctcagaaggtggtgctggcaaggttggggtgacagctgtgtccctaccgagggcatttctggttgagaaggaagcaggctgggcctggccaaaatgtaagtagctccctgttcagtgtcctggaagtcggcctgttcctgcggggattggagtcctctccaagagaagaaagggctgaggccaggttcgactttgagcctacagctaagttagtgatctcagtcagttcagcaaaactcaggaga

SEQ ID NO: 29290 - DNA, 774 bp, Homo sapiens
  SIMILAR (1)..(759): 991254mologous to Escherichia coli narX,accession number X13360,Smith-Waterman Score=1292.
atgcgcatcgagacagtggtactggtccatcgggtaatggcgttatttatggcacttttactggtgttcactattatctggttgcgggcgcgactgctacaaccgtggcggcaactgctggcaatggcgagtgccgtcagtcatcgcgattttacccaacgcgcaaacatcagcgggcgcaacgaaatggcgatgcttggaactgcgttgaacaatatgtctgcagaactggccgaaagttatgccgtacttgagcagcgggttcaggagaaaaccgccgggctggagcataaaaatcagatcctctcttttttatggcaggctaaccgccgtttgcattcccgcgccccgctgtgtgaacgcctgtcacctgtactcaacggcttacagaatttaaccctgctacgtgatatcgaattgcgggtgtatgacactgatgatgaagagaatcatcaggagtttacctgccagccagatatgacttgtgatgataaaggctgccagctctgcccgcgcggcgtattacccgttggtgatcgcggcacgaccctgaagtggcggctggctgactctcatacgcagtacggtattttgctggcgaccctgccgcaggggcgtcatcttagccatgatcaacaacaactggtggataccctggttgaacaactcaccgccacgctggcgctggatcgccatcaggaacgtcagcaacagttgatcgtgatggaagagcgtgccaccattgcgcggagcctgcacgcaaacgaatcctag

SEQ ID NO: 29291 - DNA, 1017 bp, Homo sapiens; identical to SEQ ID NO: 15623
  SIMILAR (92)..(142): 1001254mologous to Homo sapiens Homo sapiens clone D329_1,accession number W52989,Smith-Waterman Score=106.

SEQ ID NO: 29292 - DNA, 2568 bp, Homo sapiens
  SIMILAR (1341)..(1415): 441254mologous to Escherichia coli similar to phosphotransferase system enzyme I,accession number U00006,Smith- Waterman Score=44.
atggcctttaacacgcaacacgttgccatcgtggggcaatacgttgtgatgtaccaaccatgcacccatcgggccattggcattgccagtcaccggatcttccacaataccaatcgcaggcgagaacatgcgaccatcggtttcgtttttgcctgggcggatctggaacgggaagaaaccattgcagccaatctttttgctgatagcggtcagcgcattcagcggtggctccaagcccggcgtaccttgttccagcgaaatacgataatcatcggtgtgcgtttcgatagtacgccgatgtttccggccagcgagtttgccaaatgggccattcctaaacctaaacttggacgtcaatggggcgataccagcagctacctgcaagaacgtgccctggacgtacgcgacgtctgcttccagttactccagcaaatctacggtgagcaacgcttcccggcaccgggcaaactgacgcagcccgccatttgtatggctgatgaactgacccccagccagttcctcgaactggataaaaatcacctcaaaggattgttgctcaaaagcggcggcaccacctcacatacggtgatccttgcccgttcgttcaacattccaacgctggttggtgtggatattgatgcccttactccgtggcagcaacaaacgatttatatcgacggcaacgccggggcgattgtggttgagccaggggaagccgtagctcgttattatcagcaagaagcccgcgtacaggacgccctgcgtgagcaacagcgtgtctggctgacccaacaagcccgtaccgctgacggtatccgcattgaaattgccgctaacatcgctcactccgtggaagcgcaggccgcattcggcaatggtgcggaaggcgttggtttgttccgcactgaaatgctctatatggatcgcaccagcgcaccgggcgaaagcgagttgtacaacattttttgtcaggcgctggaatccgccaacggacgcagcattattgtgcgcactatggacattggcggcgacaaacccgttgattatctgaacattcccgcagaggcaaaaccgttcctcggttatcgcgccgtgcgtatttatgacgagttcgcgtctcgtgtttacacgcaattaagggcgaacttcgggcctcgaatgctgcgccgttcgtctcgtgtggcgcgggcctgcggcgcgcgcggggtgggggctggtgttccggcgggtgtcttcggcttcttcctcgtgggtgctgtgttgcgggtccctgacccgtctggcctggttccgtgtcggcgtgtgcgcctccggtttgtgcctgttgctgggcggtggtggctgcagatatgtattatttaccggtacaccggcgtgggcactggtctggtggggcccccggttttcccggctcgagtgtccgcgccgctgtttacccgcggcaaacttggacacgcaaatcctgcgccctttggggacgcccgatgtcagggctttcgctttccatgggggaagagtattccggcgttacgctggaacaagagtaatcgcgcaccgactgcctggccagacccgctgccggaacgtcagtgggaatacgcatcgccgaatgtctggtatctgttaccgatcaccgccaagcttatggtagaaacggaggcctccggctggctacctgcggcgctggatgaatgccgcctgatgcaaatgcgctccgaaatccgctttcacggtaaaacgctgctagcgctggtggaaaaagcgcagacattgccggaagatgccttaccgcagccgatgcttaacctgatggacatgccgggttatcgtaaagcgtttaaagcgattaagtcgctgattactgacgtgagcgaaacgcataagatcagcgccgaactactgcatcgcgtcggtccgctagttgtgcggtaccggaccaatcaccatatctttttgcaccgctttgcacatgtcataaatgagcgggatcagatcccaggtgcgttttgccgcctgaataccggcaatacgcgcagtggcaaatacgtcgcctttgtggtggcgaccatcaataatcatcgccagcgtctcgctgcgcatggtgacaaaggcttccgcccgcgcttcacgcacggtttccgctttggcggagacatccaccatgtgcgcttcgccagcggcgttgatatgggtcagttgcgacatacttatttcttcaaatgtggatggaaattacacggacgcgtacgggcatccagctgcggcgcgatgatattttcccatgcggtacggcacgctttggtcgaacccggcatggcgaaaatcagcgttttgttggcgacgcccgctaccgcacgagattgcaacgtggaagtgccaatctcttcaaacgacaacatccggaacacttcaccaaaaccttcaacttcacggtcgaacaacggcagcaatgctttggacgtcactccccttatgggttggctcatgcccgttccagctggaaccgccgcccgtgctgatgttcgcaagccgggaagcgttctgtgcgccgctccgttcccgcagtag

SEQ ID NO: 29293 - DNA, 2178 bp, Homo sapiens
  SIMILAR (543)..(169): 971254mologous to Escherichia coli K12 putative fimbrial-like protein,accession number AE000322,Smith-Waterman Score=617.
tcaatgagggttagagcatatgcgtctgtcggcaaacagacagggaaatacttgtgctggacgtagcgtaaacgcctgatccgtccaacggttcggattttgtaggcctgataagacgcggtagcgtcgcatcaggcatctgttgccggatgtttgtattgttgatggcaactgcattccgtcggttttttccatgccaattcccactccctgagcggttgatgacgtatccagtgccagaaaaccgggttgttcgctgtcttctacccccgtgagcgtgacttttacgttgtatcccgccggccctttgcaatctttcagcttaaagactacgggtacacgagcggactggcctgcaacgttcaaatcctgacgactgaccgtgggaaagcgcacctctgccagatattggccatccaccaccagcgcacaggatttacttaataaattaccggagaaatgcagattattatctgccgcgaataacgtgctactcattgccaatatcagccccgctaacaggacgtaaccaccggacggtacggcctccagcttcggcttttgcgtaaaatcagtggcgttgatagcaagcggagtattgagtttaaaacgctgaccatcgtgctgaagctcgataccaaaaccgggtacatcagtttcaattgctgcatcattaaaactggttcgtgtaccagtccaggtgagggtcatctcccaatctggatgacgggtcgtcgagtcacaagtgagttcatatggcacctctttacgaccatagttgccgttgatgtcgtcgataatgagatcgcgaaattcgacttcaatggttttaccaccgctgatgctacaggttggcggtgacaataatgtcccgtgaaaggtgatgtcttcatcagcagcatgagctatggcgaatgagttatcggcgctattttctatccgaatgcccagcccggtgatattggtactgagtaccgtttcgccgttaatcgttgaggtattgcccttaagttgcatccgcaagtcgttagcaagactgtttgtgcagttcaacgtgtatttcgcatcggaggtggagatccccagcagtacatcgccttcgcgacctaccgcttcaacgtagcgggagaaaatatcattgaaaccgaaatcattaccgacgcaggaaatatgactaacgtcagaaatagcaatcgccgggtagcccggacggttttcacggtagcgaccggtcaactcttcggcaaagtgcatagcgtcgcaatgggaaccgccgttgccgcaggaaagcactttgccacccgctttaaagctgtctgctaacaggaccgccgcgcgctgaatggcgtgaatattggcgtcatcttttaaaaagttagccagcgtttccgccgcttcgttcagttcgttacgaataagatcctggctcctacaagtaaggggcttaatgattcgaatcttgctcggtacccgatcagtgagcaacattacgcgcgagtgcgcaccttcaaacagctgttgtcgagttttcagcgtaaccgcgatctggttagcgtcggcgcgtatgccaaaggcagcgatccgatgctcgataaagccatcgccctgtggccgcagctggagggcctgaaagatctggcagaaaaagaggtagaggatgccgcgcgcctgctgggtgaaatgcgtcgcggatgtcagcaggcggaagaacagctcaaaatgctgattgattatcagaatgaatatcgcaataacctcaacagcgatatgagtgccgggataaccagcaaccgctggatcaactatcagcagtttatccagacgctggaaaaagccattactcagcatcgccagcaacttaatcagtggacgcagaaagttgacattgcccggcgacgttgacaccaccaaattggctggcgggaaatcagcggcagaaacaccggtagtcacaccttcagctgcttcaatggtcacggtaaaaccggtgccataggcgctggtgttattttctaccatcattggcagatcgagttgtttacggcgatcttcagtaatgcacaggcaaacaataccgctaccgtggcgaatggtcagcgccatctgctcaacagtcatggtttctgccgggaagatcatatcaccttcgttttcacggtcttcatcatcaagcaccat

SEQ ID NO: 29294 - DNA, 2448 bp, Homo sapiens
  SIMILAR (2424)..(1681): 971254mologous to Escherichia coli K12 putative fimbrial-like protein,accession number AE000123,Smith-Waterman Score=1255.
ctatgggcggttctccacggtgacctcgttaacataggggatcagccccgcaattgctatgccgctttcaaacgcgcccggtgggagttctgattcaaccgtgacgatatgctcgaacgtgttcttgagtttattgatgtgctgaatatgactgaccaacgctgcttgcgaaaggttatcgacctggtaacacaacacgccaggcagacggacagcggccttgctgctgcgattttcggactgttgttgaataaataaatggcggaaatgacgcaacgccagcgactgcgcgtcgttgccgagatgttgttttacctcaatacgattaagcggattatgctcatcctctttttttacctccggcaaagagaacacgcgggcaaccaatagcttgtgttgctcaagatgagcggcaaatatagccagctcttgttccatctggcgaaaggtagtgttgagtcggtttattttatagcacagtcgtggtgacttgaccatcgtgcgcgtagtgtcaggcagaggtaaattgcgggatgttatgccataacggccagctaaacgagaagcgggcaccacccagttcgctggtgtcacaattaaccgtaccgcccattgccagtgcggtacggcctccagcttcggcttttgcgtaaaatcagtggcgttgatagcaacgcggagtattgagtttaaaacgctgaccatcgtgctgaagctcgataccaaaaccgggtacatcagtttcaattgctgcatcattaaaactggtttgtgtaccagtccaggtgagggtcatctcccaatctggatgacgggtcgtcgagtcacaagtgagttcatatggcacctctttacgaccatagttgccgttgatgtcgtcgataatgagatcgcgaaattcgacttcaatggttttaccaccgctgatgctacaggttggcggtgacaataatgtcccgtgaaaggtgatgtcttcatcagcagcatgagctatggcgctactgacacaaagcagggttaagaaagtctttctcattgatagtccaccaccatggtcaaactggcgttaaactcgcccgcagcaagttgcgccccgcttgccttcacaggtacagccttcaactgtggctggttattgatattaaatggcgtccagctattttcaccgacggcaaacaatgagttatcggcgctattttctatccgaatgcccagcccggtgatattggtactgagtaccgtttcgccgttaatcgttgaggtattgcccttaagttgcatccgcaagtcgttagcaagactgtttgtgcagttcaacgtgtatttcgcatcttgccgataattggtgccatcaacgttatcagcaatcatattgccgaactctacctggctgcccttgattgaacagggtggcggagcatcgaccaacacgcgcagaattaaatccacggggttactaccagccgtagcgattaattcagccctggttccggagcctcgcccatatactttggtcttatcccccgttcgccttaggctgtcttccctgcagttcgttgctggaaagggccgtgccagttgttcaccgcctctcctccgccgttgcccagaccgggcgtcgcgggcaacggggacgaggaggagggaaaggagacagatacgaatcgagcttgatagggtaaccccatcggaggtgtcatcttcggtttcataatctatataaacagaattcgtatcattaggttttaatgtcattagcggatttttactggttgctaaaccttcaatgagtacgccaacgcctttggcggcagtgcttccagtaagcgtattaccaagcagttgtgtgttttgagtacctacttttccagtgacgagttttgtttcaatattacgcacacgaatacaattctgaagcgagatatcaaagggaacaggtgaagcgccatttttaattgtcccagagctatattctcccattctaaccgttgaaccattgactgatggcccggtaagtatggaggtaaaacatgttggtaaggttaatttgacattattcagtgtgaaattgacataaatgtggttgctgtgatctacaacttttgtaccaggactgtaggccttaaacgaataaaggtaatttgatgaactggataactggacttgctgattaagtgtaggatcgaaattagtatctgtataaaattcaacagttatgttgtgtactataccaccaatagcccaaaacttatcgtagtcgtctgctttgttgcaacccttagtttgtagatcgctgtctgtgacggaaaagaaaaattcttggttggaaggatctccgatatagattcctggcgattgaatgtcagttattgtatcgtatgcagaccagaaccttgatatgacatggtgtatcagaccagcaacgatgtataaaaagtaattcgccat

SEQ ID NO: 29295 - DNA, 2790 bp, Homo sapiens
  SIMILAR (1665)..(2642): 981254mologous to Escherichia coli narX,accession number X13360,Smith-Waterman Score=1660.
  misc_feature (1)...(2790): n = a,t,c or g
ggatgcggcggcggtgtttgtgccgtcagtgcttacatgccgctcaacagattgcccaacgcgcaggaggccaacaatgaatacaccagcttcgaaaactgcattaagtgcaccgtctgcaccaccgcctgccgcgtgacgctgcgtaataacgatccgaaactcccttatctggtcaaagctggattgaagatgaaaagggtaacaagatcacctcgccgttactgtgctgccgccagtgcaacgcatcgattcaatgatgaacgggcaggtaaagtgcagggaatgccggatatcaacaaattgccagccgatcgtgaaacatgttctactttaacgtgcgcgagatcccgccaaaatcaaacaaacccataccctgcaaatcgcgctgcaaacgcgtatcaagttgttctggcgaccaaggcgctggaaaaggtcagtatgaaaagtccgtggcagcacaaggtgagctcacccgcagcggtcaggcatttaccgtcaataacccaacgccgtactacgtgattatcagcaacgccagtgcgcagaaaaacggtaatccagctgcagggttctcgcctctggtcattgagccgaaaaccacggtaccgctgaatgtgaaaatggatagcgtaccggtgctgacttacgtcaacgactttggcgcacggatgccgctgttcttccagtgcaatggcaacagctgccagggcagccaggtagagttcggcaatatgattgctgataacgttgatggcaccaattatcggcaagatgcgaaatacacgttgaactgcacaaacagtcttgctaacgacttgcggatgcaacttaagggcaatacctcaacgattaacggcgaaacggtactcagtaccaatatcaccgggctgggcattcggatagaaaatagcgccgataactcattgtttgccgtcggtgaaaatagctggacgccatttaatatcaataaccagccacagttgaaggctgtacctgtgaaggcaagcggggcgcaacttgctgcgggcgacgccatagctcatgctgctgatgaagacatcacctttcacgggacattattgtcaccgccaacctgtagcatcagcggtggtaaaaccattgaagtcgaatttcgcgatctcattatcgacgacatcaacggcaactatggtcgtaaagaggtgccatatgaactcacttgtgactcgacgacccgtcatccagattgggagatgaccctcacctggactggtacacaaaccagttttaatgatgcagcaattgaaactgatgtacccggttttggtatcgagcttcagcacgatggtcagcgttttaaactcaatactccgcttgctatcaacgccactgattttacgcaaaagccgaagctggaggcgtaccgtaaatcctgtgcgctggtggtggatggccaatatctggcagaggtgcgctttcccacggtcagtcgtcaggatttgaacgttgcaggccagtccgctcgtgtacccgtagtctttaagctgaaagattgcaaagggccggcgggatacaacgtaaaagtcacgctcacgggggtagaagacagcgaacaacccggttttctggcactggatacgtcatcaaccgctcagggagtgggaattggcatggaaaaaaccgacggaatgcagaatttaaccctgctacgtgatatcgaattgcgggtgtatgacactgatgatgaagagaatcatcaggagtttacctgccagccagatatgacttgtgatgataaaggctgccagctctgcccgcgcggcgtattacccgttggtgatcgcggcacgaccctgaagtggcggctggctgactctcatacgcagtacggtatttcgctggcgaccctgccgcaggggcgtcatcttagccatgatcaacaacaactggtggataccctggttgaacaactcaccgccnacgtggcgctggatcgccatcaggaacgtcagcaacagttgatcgtgatggaagagcgtgccaccattgcgcgcgaactgcatgattctattgcccaatctctctcttgcatgaagatgcaggtgagttgttcacagatgcagggcgatgcgctgccagaaagcagccgcgaactgttaagtcagatccgtaacgaactgaatgcatcctgggcgcagttgcgtgaattgctcaccacattccgcttgcagctcaccgagcctggattacgtccggcgctggaggcgagttgcgaagagtacagcgccaaatttggcttcccggtgaagctggattatcaattgccgcctcgcctggtgccttcgcatcaggcaatccacttgttgcaaattgcccgtgaggcattaagtaacgccctcaaacattcgcaagcgagtgaagtcgtggtgacggtggcgcaaaacgataatcaggtcaaactgaccgtccaggataacggctgcggcgtgcctgaaaatgccatccgcagcaatcactacggcatgataataatgcgcgatcgtgcgcaaagtttacgaggcgattgccgcgtccgccgtcgtgaatcaggtggcaccgaagtggtggtcacctttattcccgaaaaaactttcacagacgtccaaggagatacccatgagtaatcaggaaccggctactatcctgctgattgacgatcacccgatgctgcgaactggcgtaaaacagcttatcagtatggcaccagatatcaccgtggctgccgaagcgagtaatggcgaacagggaattaaactggcggagtctctt

SEQ ID NO: 29296 - DNA, 1218 bp, Homo sapiens
  SIMILAR (688)..(632): 891254mologous to Homo sapiens Human secreted protein, SEQ ID NO: 7102,accession number G03021,Smith-Waterman Score=88.
atgctgaggatgactgaaccaatgtacttcttacatatatcgattgatgtctcatgtctccctaaaatgtataaaaccaagctgtgccctgaccaccttgcgcacatgtcatcaggacttcctgaagctgtgtcacggtcctgtactctgacctatcaagaggctttggctgccagtggaaaatgcagggcaccatgtggggaagaatgcagactccggagtcctgccagcaggacgtcaagtcagtatactgagacactggatttgcagcagagaaagatgtttgatcatgaggtcgcagaacaaagagatgggaaaagacctcaaatccatctccctgatgagtttggggctagggtctttaagggctttggagtgggccaaagtatggagattgttgattggttaaagagtacagggaactacaggcaaccatcaggtgatgttcaggcagttgttaatttctcaaataataagtggttgcagccagcactgggaaaggcagtctcccaactgatagaaacacctgaaactgctgatcagcagcttcccaataagatctcaggaattggaatgaagccacggaccctcgcggtgttacagttcttaaagatggtgtgtctggagtttgttccttcagatgctcagatgtgtccagagtttcttccttctggtgggttcgtggtctcactgacttcaggagtgaagctgcagactttcacagtgaatgttacagctcataaaggtagtgtggacccaaagcgagtgaagctgaagaccttggcagtgagtgttacagctcttaaggctgcgtgtctggagttgttccttcttcctggtgggttcgtggtctttgctggcttcaggagtgaagctgcagacctttgtgccgagggagccagctccggcctcggccagcccagagaaggtctcccacggtgcagcggcgggctgaagggctcctcaagtgcggccagaatgggcgccgaggccaagggggcaccgagagcgagccagggctgcgagggccgccatcacgctgtcacctctcacaggagcgatatgggagaggaggagggggaaagccaaaggtatttgagctgcccccagccatcctgtcccatcaacctcttgcaggaagatgccagcaaggtcattgtgtttgctgagagtggtatcaatccagatagtgtcctagatttgataatgctgcattga

SEQ ID NO: 29297 - DNA, 453 bp, Homo sapiens
  SIMILAR (328)..(305): 871254mologous to Homo sapiens Human secreted protein, SEQ ID NO: 7115,accession number G03034,Smith-Waterman Score=41.
atggtacagcctactacaaacctaggctatatgagcccactgaacctaggctacaaacctgcacagcatgttattgtacagaataacataggcaactgtaacacagtgcctattcaatatgaagatggtgaggatgatgacctttatgatgatccacttccatttaatgaatatgggttcatggtctcgctgacttcaggagtgacgccgcagaccttctcagtgagtgttacagctcttaaaggtggtgcgtccggagttgtttgttcctcctggtgggttcatggtctcgctgacttcaggaatgaagccgcagaccctcacggtgcaataaaaatatatttggaatgtaaatcttcaacactcagtctcaatgctcctaaattcttctatgattcatcacgtcataattatcgggtatggactcgctatttcctgcagcacactgtgtag

SEQ ID NO: 29298 - DNA, 1044 bp, Homo sapiens
  SIMILAR (275)..(144): 751254mologous to Homo sapiens Human secreted protein, SEQ ID NO: 7115,accession number G03034,Smith-Waterman Score=162.
atggctgcctgccctgggtccatcctgtctctcagtgggaacccctatggccaaggggttgagaaccaaaagacttacagccaattacgtgttctaggcaaacaggaacggacgtggacagacattcattaccctttaaaaattttaaatgggttcttggtctcgctgacttcaggagtgaagctgcagaccttcacggtgagtgttactgctcttaaaggtggtgcgaccagagttgtttgttcctcccagtgggttcgtggtctcgctgacttcaggaatgaggctgcagaccctcacaatctgttaggagcacaccagtcttctaggttccacagtgagagctgttccacctggctgcatctagttggccatcttgccctcactcagcttgggaattcttgtgtgaggttacgagtaatgccaggtgaaaagcctatacccacattcagctcccgagacgcgttcaacagttgtttgtgtaagcgatataccggaacacagcacaaccctggtaagtgtcgtcccaatagaggaccttcaggaaatgtccattttactgtttatcctcaaacatcacggtgttcaattttgcctgctcataaagccccgcagcagccgcctgctggtggatgtctctttgttcagaagtctgggtccaaactgctcccacttataaatgagaacatgctgtgcttgcaaactgttctgacctctggccatttttcacatggcagtttttatcctgttttcaggaataaagagggaaataagaatgcccttcttgcatctgttgttactcaagccacaggtgccagcagctacacagatatttctctgtttagccactggtttgcacagagaaagaggaaagggaagggagaaaagcattacctgtggtggggtggagaaggtgaggcactcagggaatccggagaaagacacacttgcagcaacattgaatcaaaagttcaggtggccacttgtcggtcacgaaggaatcttttccaacagatccatcagctctcaagtttccccttttaa

SEQ ID NO: 29299 - DNA, 952 bp, Homo sapiens
  SIMILAR (9)..(737): 971254mologous to Homo sapiens Human secreted protein clone yc25_1 protein sequence SEQ ID NO:26,accession number Y73402,Smith- Waterman Score=1244.
ggaccgagggccaaaagaatcttattgtggaagtgacttccaatgatgctgtgagattttatccctggaccattgataataaatactattcagcagacatcaatctatgtgtggtgccaaacaaatttcttgttactgcagagattgcagaatctgtccaagcatttgtggtttactttgacagcacacaaaaatcgggccttgatagtgtctcctcatggcttccactggcaaaagcatggttacctgaggtgatgatcttggtctgcgatagagtgtctgaagatggtataaaccgacaaaaagctcaagaatggtgcatcaaacatggctttgaattggtagaacttagtccagaggagttgcctgaggaggatgatgacttcccagaatctacaggagtaaagcgaattgtccaagccctgaatgccaatgtgtggtccaatgtagtgatgaagaatgataggaaccaaggctttagccttctcaactcattgactggaacaaaccatagcattgggtcagcagatccctgtcacccagagcaaccccatttgccagcagcagatagtactgaatccctctctgatcatcggggtggtgcatctaacacaacagatgcccaggttgatagcattgtggatcccatgttagatctggatattcaagaattagccagtcttaccactggaggaggagatgtggagaattttgaaaggctctttttcaaagttaaaggaaatgagagacaaggctgcgacgcttcctcatgagcaaagaaaagtgcatgcagaaaaggtggccaaagcattctggatggcaatcgggggagacagagatgaaattgaaggcctttcatctgatgaagagcactgaattattcatactagggtttgaccaacaaagatgctagctgtctctgagatacctctctactcagcccagtcatatt

SEQ ID NO: 29300 - DNA, 1776 bp, Homo sapiens
  SIMILAR (1099)..(1275): 1001254mologous to Homo sapiens Human secreted protein clone yc25_1 protein sequence SEQ ID NO:26,accession number Y73402,Smith- Waterman Score=311.
atggagttaagtgatgctgtgattgtggagggcttctactttgttgatccttctagccctaacagggagataagaggggagcgaaagatagggttgaatgtaaaaatcttgcaggatcctgaaaacatccaccacagagctgctgtaaatgcgaactatggaatcagtttgccatatattaatcagagaaaagcatgtgtaggggtgcagttgaggcagacaaagctgcttctgtacgtatcagcattccttgacaaaactcagtgcctgattgtgatgctatgggctgctggtttacagctgtctccggacaagaatggaggcccacccttgaattccaataagatgggcctgcatattccgcctgctataaaggtttcgaagttaatcaaagggtctaacatatccagcctcacggttctgccatcttctcattgcacagatccctatttcactcctataccagtcttacaagcagatgcccacaaagggattttaagtatgatagaacgagggctgattccaccaacagcaaggattacctttcagaatccacccattacacccagagcagctcctctgcatagttttgatgaagcacgtaagattccaactgtagctcagttcctaatgggccacagtacccagtctgtggcttgtgggttagggacccctgctatagaagactatgatagaacgatctatctagattgctacatcaataaaatagaatctagcacccttgcaattcaatttaacagacacaataagattcctcctagaaagaaaaaaggaggaaggaggatggagagaggggaagaaaaggagaggaaggagtaccttattatgccagaaggagcttctctaatgacgacaagggttagatcagacctcaggaaagctaaagggtgccaatctcacttaacactcaagggtctaccaaaaattgaagtgaaatattctatttttataaaaccggtcttctacttgacctttatcacggaagatgggtgtaccaaaaaaggtggtattcttaactacaacacaggaatgatcgtgtacaaaggaaatggggatcctgcagatgttgaggattataggaaccaaggctttagccttctcaactcattgactggaacaaaccatagcattgggtcagcagatccctgtcacccagagcaaccccatttgccagcagcagatagtactgaatccctctctgatcatcggggtggtgcatctaacacaacagatgcccaggttgatagcattgtggggctgttgcaaagatgcagtggaaccataatggaagattgggccagcaagatgtaccacaagggcctagagttgtcatcacagagtgattcagtagatggtcagatgagggcagtgatttcaactgatgactggggtcaaggtgtgtctggaattggttccttccagtgggttcttggtctcattgacttcaagaatgaagccgtgaaccctcgttgtgagtgtccggagtttcttccttctggtgggttcgtggtctcgctgacttcaggagtgaagctgcagaccttcgccgtgagtgttacagctcttaaaggtggtgtgtccggagttgtttgttcctcccagtgggttcttggtcttgctgacttcaggaatgaagctgcagaccctcacggaaaaggacaggtgcttgaggaagtgacctttactggcagaggaaaaggcacttgtgaaagcctgatctgcaaatgtgcttggcctgataaagatgagagatga

SEQ ID NO: 29301 - DNA, 1026 bp, Homo sapiens
  SIMILAR (595)..(1023): 891254mologous to Macaca fascicularis hypothetical protein,accession number AB047842,Smith-Waterman Score=699.
atgagcgctgcaggaggccttctgcaggctggcgccctgcccctgggctcacctttcatgggactcgacggactggataatacctttacctggaaggaggatgttcgcatgtttaacccaaatcccgtacttttatttcagatcatcagaaaagcccttactgaggaaaaacgtgtctcaacaaaaacatcagctgcagatcttgtgacagaaacagatcaccttgtggaagatttaattatttctgagttgcgagagaggtttccttcacacagggaatggcagatggagagagcgttccagacagctctgtggttgctgcagccggaagtcgtcttcatcctgggggatatctttgatgaagggaagtggagcacccctgaggcctgggcggatgatgtggagcggtttcagaaaatgttcagacacccaagtcatgtacagctgaaggtagttgctggaaaccatgacattggcttccattatgactttgtgatggtcaacagcgtggcgctgaacggggatggctgtggcatctgctctgaaacagaagcagagctcattgaagtttctcacagactgaactgctcccgagagcattatcctctgtatcggagaagtgatgctaactgttctggggaagacgctgctcctgcagaggaaagggacatcccatttaaggagaactatgacgtgctttcacgggaggcatcacaaaagccgcgcctggttctcagtggccacacgcacagcgcctgcgaggtgcaccacgggggccgagtccccgagctcagcgtcccatctttcagttggaggaacagaaacaaccccagtttcatcatgggtagcatcacgcccacagactacaccctctccaagtgctacctcccacgtgaggatgtggttttgatcatctactgtggagtggtgggcttccttgtggtcctcacactcactcactttgggcttctagcctcaccttttctttctggtttgaacttgctcggaaagcgtaagacaagatga

SEQ ID NO: 29302 - DNA, 645 bp, Homo sapiens
  SIMILAR (215)..(613): 1001254mologous to Homo sapiens Similar to hypothetical protein FLJ11585,accession number BC002877,Smith-Waterman Score= 719.
  misc_feature (1)...(645): n = a,t,c or g
gggactcgacggactggataatacctttacctggaaggaggatgttcgcatgtttaacccaaatcccgtacttttatttcagatcatcagaaaagcccttactgaggaaaaacgtgtctcaacaaaaacatcagctgcagatcttgtgacagaaacagatcaccttgtggaagatttaattatttctgagttgcgagagaggtttccttcacacagggaatggcagatggagagagcgttccagacagctctgtggttgctgcagccggaagtcgtcttcatcctgggggatatctttgatgaagggaagtggagcacccctgaggcctgggcggatgatgtggagcggtttcagaaaatgttcagacacccaagtcatgtacagctgaaggtagttgctggaaaccatgacattggcttccattatgagatgaacacatacaaagtagaacgctttgagaaagtgttcagctctgaaagactgttttcttggaaaggcattaactttgtgatggtcaacagcgtggcgctgaacggcgatggctgtggcatctgctctgaaacagaagcagagctcattgaagtttctcacagactgaactgctcccgagagcangcacgtggctccagcccggtgtgacctgg

SEQ ID NO: 29303 - DNA, 975 bp, Homo sapiens
  SIMILAR (268)..(417): 781254mologous to Homo sapiens brain myo-inositol monophosphatase A2b; IMPase A2b,accession number AF200432,Smith- Waterman Score=199.
atggacggcctggaggctgcgctggctccctgcctgccatgccagttggctggttctgtcctttgctctgagggtgaatgtgtggacacggtgaaagcagctgttctcttctctgctcagtgtgcctcaaaaattgacatcaaatgcagttgtttttcaacatatttatgtgaaggaagtatttttggtgcctccaaagaccgagcacggttcacgcctctgctggccttcacaccgctgcagccacacagtgcagaagcctgctccctgctgcccacaagcatgaggcaggctgggttcttccactgcaggttcattgcagaagaggccgcggcttctggggccaagtgtgtgctcacccacagcccgacgtggatcatcgaccccatcgacggcacctgcaattttgtgcacagaagcactgaggtggacactgcgggttgtgaggttcaggagggggaatggcagatggagagagcgttccagacagctctgtggttgctgcagccggaagtcgtcttcatcctgggggatatctttgatgaagggaagtggagcacccctgagggaagtatttttggtgcctccaaagaccgagcacggttcacgcctctgctggccttcacaccgctgcagccacacagtgcagaagcctgctccctgctgcccacaagcatgaggcaggtaatagaaattgggggcacctgggcagagaaagcaatcagatatgctcttgtctcacgcaagcctcagagggatgacatcgagatctgtctgtactttgtccgtaaggaattttcttgtgggcaaattgtgagggagggattcggttttgccatgttgcccaggcagaacactgtcctgatatttgggcagcaggagggtgccctgcttcgagaaggaaaattaccagggacccgtgtgctctgtgaaatatgtaaggctctacacaaggaaggaaagcagttccactga

SEQ ID NO: 29304 - DNA, 429 bp, Homo sapiens
  SIMILAR (279)..(335): 351254mologous to Rattus norvegicus cdc2-related protein kinase,accession number L02121,Smith-Waterman Score=38.
gtgttcaaggccaaaaaccgggagactcatgagatcgtggctctgaaacgggtgaggctggatgacgatgatgagggtgtgccgagttccgccctccgggagatctgcctactcaaggagctgaagcacaagaacatcgtcaggcttcatgacgtcctgcacagcgacaagaagctgactttggtttttgaattctgtgaccaggacctgaagaagtattttgacagttgcaatggtgacctcgatcctgttcttccttcccttcagaacttgaagtttctcccactgcctcctctccagtggtctcccaggtgccagacccaaaagcttttcctacagtgataccctttatttttacttccccttgactcatatgttttaacatgattttaacaaactgcacttattaagaaatgtgtttgccctgta

SEQ ID NO: 29305 - DNA, 441 bp, Homo sapiens
  SIMILAR (36)..(230): 981254mologous to Homo sapiens serine/threonine protein kinase,accession number X66364,Smith-Waterman Score=326.
cgccgctgacgtgtacctctagagcggccgccgcgatgcacaaatacgagaaactggaaaagattggggaaggcacctacggaactgtgttcaaggccaaaaaccgggagactcatgagatcgtggctctgaaacgggtgaggctggatgacgatgatgagggtgtgccgagttccgccctccgggagatctgcctactcaaggagctgaagcacaagaacatcgtcaggtgtgcgggaggcgggtgctccttgccggtgtggccgcttgggggaggcgggggctgacactggacgtctgtcaggcggacctgcctggctgagcccttcttttgccctaggcttcatgacgtcctgcacagcgacaagaagctgactttggtttttgaattctgtgaccaggtgaaaggcggggtttggaggacagtagccttgggaaggt

SEQ ID NO: 29306 - DNA, 846 bp, Homo sapiens
  SIMILAR (355)..(720): 881254mologous to Homo sapiens serine/threonine protein kinase,accession number X66364,Smith-Waterman Score=577.
atggtgaacagattaatggttgccagtagttttgaagggaacagggatgaagaagtaggagtggctataaaagggcaacaagagaaactggagaagattggggaaggcacctatgggacagtgttcaaggccaaaaactgggagactcatgagattgtggctctgaaatgggtgaggctggatgacaatgatgacggtgtgccgagttctgccctccgggagatctgcctactcaaggagctgaagcacaagaacatcgtcaggcttcatgacctcctgcacagcgacaagaagctgactttggttttcaaattctgtcaccagcacctgaaaaagtattttgacagttgcaatgatgtcttctttggggccaagctgtactccacgtccattgacttgtggtcagctggctgcatctttgcagagctggccaatgctggatggcctctttttccaggcaatgacgtcgatgaccagttgaagaggatcttctggctgctagggatgctcaccaaggagcagtggccctccatgaccaagctgccagactataagctgtacccattgtacccggccacaacatccctggtgaacatcgtgcccaaactcagtgccacagggagggatctgctgcagaatcttctgaagtgtaacccctgccaatgtatctcagcagaagaggccctgcagtacccctacttttccgacttctgtccgccctgggcccagggacccccagccacaagctggggcctggcctatttaagccttaggaggggggggacagtgggggtgcccattatagacaaccttggacccaggggtacggaaagttttactttttaa

SEQ ID NO: 29307 - DNA, 1077 bp, Homo sapiens
  SIMILAR (1)..(873): 841254mologous to Homo sapiens serine/threonine protein kinase,accession number X66364,Smith-Waterman Score=1297.
atgcagaaatacgagaaactggaaaagattggggaaggcacctacggaactgtgttcaaggccaaaaaccgggagactcatgagatcgtggctctgaaacgggtgaggctggatgacgatgatgagggtgtgccgagttccgccctccgggagatctgcctactcaaggagctgaagcacaagaacatcgtcaggcttcatgacgtcctgcacagcgacaagaagctgactttggtttttgaattctgtgaccaggacctgaagaagtattttgacagttgcaatggtgacctcgatcctgagattgtaaagctactaaaagggctgggattctgtcatagccgcaatgtgctacacagggacctgaagccccagaacctgctaataaacagggtacttcttgggaagaagaatggggagctgaaattggctgattttggcctggctcgagcctttgggattcccgtccgctgttactcagctgagtcctctaagtgggaggtccctttcggggggggtctcctccaggtggtcacactgtggtaccgcccaccggatgtcctctttggggccaagctgtactccacgtccatcgacatgtggtcagccggctgcatctttgcagtgatccttgactccgtggacacactgctggggacgcccaccgaggagcagtggccctctatgaccaagctgccagactataagccctatccgatgtacccggccacaacatccctggtgaacgtcgtgcccaaactcaatgccacagggagggatctgctgcagaaccttctgaagtgtaaccctgtccagcgtatctcagcagaagaggccctgcagcacccctacttctccgacttctgtccgccctaggccccgggacccccggcctccaggctggggcctggcctatttaagccccctcttgagaggggtgagacagtgggggtgcctggtgcgctgtgctccagcagtgctgggcccagccggggtggggtgcctgagcccgaatttctcactccctttgtggactttatttaatttcataaattggctcctttcccacaatgtatt

SEQ ID NO: 29308 - DNA, 948 bp, Homo sapiens
  SIMILAR (385)..(945): 751254mologous to Xenopus laevis neuronal cyclin-dependent kinase 5,accession number U24397,Smith-Waterman Score=690.
ggcacgagttaaaaccgagggcccgcaggggtccccgcggccgccgcgatgcagaaatacgagaaactggaaaagattggggaaggcacctacggaactgtgttcaaggccaaaaaccgggagactcatgagatcgtggctctgaaacgggtgaggctggatgacgatgatgagggtgtgccgaagttccgccctccgggagatctgcctactcaaggagctgaagcacaagaacatcgtcaggcttcatgacgtcctgcacagcgacaagaagctgactttggtttttgaattctgtgaccaggacctgaagaagtattttgacagttgcaatggtgacctcgatcctgagattcgtaaagtcattcctcttccagctactaaaagggctggggattctgtcatagccgcaatgtgctacacagggacctggaagccccagcaacctggctaataaacagggaatgggggagctggaaattgggtggattttgggcctggggttcgagccttttggggatttcccgttccgctgttactcagctgaggttggtcacacttgtggtaaccgctcaccggatgtacatctttggggccaagctgtactccacgtccatcgacatgtggtcagccggctgcatctttgcagagctggccaatgctgggcggcctctttttcccggcaatgatgtcgatgaccagttgaagaggatcttccgactgctggggacgcccaccgaggagcagaggccctctatgaccaagctgccagactataagccctatccgatgtacccggccacaacatccctggtgaacgtcgtgcccaaactcaatgccacagggagggatctgctgcagaaccttctgaagtgtaaccctgtccagcgtatctcagcagaagaggccctgcagcacccctacttctccgacttctgtccgccctag

SEQ ID NO: 29309 - DNA, 478 bp, Homo sapiens; identical to SEQ ID NO: 12982
  SIMILAR (121)..(264): 931254mologous to Homo sapiens peptidylprolyl isomerase,accession number X52851,Smith-Waterman Score=227.
  misc_feature (1)...(478): n = a,t,c or g

SEQ ID NO: 29310 - DNA, 1226 bp, Homo sapiens; identical to SEQ ID NO: 27267
  SIMILAR (756)..(1223): 811254mologous to Homo sapiens peptidylprolyl isomerase,accession number X52851,Smith-Waterman Score=698.

SEQ ID NO: 29311 - DNA, 867 bp, Homo sapiens; identical to SEQ ID NO: 27508
  SIMILAR (385)..(864): 851254mologous to Homo sapiens peptidylprolyl isomerase,accession number X52851,Smith-Waterman Score=737.

SEQ ID NO: 29312 - DNA, 1416 bp, Homo sapiens
  SIMILAR (1)..(417): 731254mologous to Homo sapiens peptidylprolyl isomerase,accession number X52851,Smith-Waterman Score=512.
atggtcaaccccgtgttctttgacatcaccgtggatggtgagcccctgggccgcatctccttcgagctgtttgcagacaaggttccaaagacaacagaaaactttcgtgctctgagcactggacaaaaaggatttggttgtaagagttcctgctttcacagaattattccagggtttatgtatcaggtggtgacttcacacgccataatggcactggtggcaagtccatccaatggggagaaatttgatgatgagaacttcatcctaaagcatacaggtcctggcaccttgtccatggcaattgctggacccaacacaaaaggttcccagcttttcatctacactgccaagagtgagtggttggatggcaagcatgtggtctttggcaagttgagtcgtggggacagcttgaaggagccaacctcaattgcagagagcagccgtcaccccagctaccgctcagagcccagcttggaaccagagagcttccgttctcctacctttggcaaaagttttcacttcgatccactatccagtggctcacgctcctccagcctcaagtcagcccagggcacaggctttgagctgggccagttgcaatccattcgttcagagggcaccacctccacctcctataagagcctggccaaccagacacgcaatggaagcctatcttatgacagcttgctcacaccttcagacagccctgattttgagtcagtgcaggcagggcctgagccagacccacctttaggctatacctctcccttcctgtcagccaggctggcccagcaacgggaagctgagaggcacccacgtttggtgccaactggcccaacacaccgagagccctcaccagtccgttacgacaatctgtcgcgccacattgtggcctctctccaggaacgagagaagttgctgcgccagtcacccccactcccgggccgtgaggaagaaccaggcttgggggactcaggcattcagtcaacaccaggctcgggccatgcccctcgtactagttcctcctcagatgattcaaagagatcacctttgggcaagactccactgggacgcccagctgtcccccgttttggcaagccagatgggctaaggggccggggagtagggtcccctgaaccaggcccaacagccccatacctgggccgatcgatgtcttacagcagccaaaaagcccaacctggtgtctctgagacagaagaagtggccttgcagccattactgacacccaaagatgaagtacagctgaagaccacctacagcaaatccaacgggcagcccaagagcttaggctcagcctcccctggcccaggccagccacctctcagtagccccacgaggggaggagtcaagaaggtgtcaggggttggtggtaccacctatgagatttcggtgtga

SEQ ID NO: 29313 - DNA, 3129 bp, Homo sapiens; identical to SEQ ID NO: 27137
  SIMILAR (1492)..(2790): 941254mologous to Homo sapiens putative p150,accession number U93563,Smith-Waterman Score=2130.

SEQ ID NO: 29314 - DNA, 980 bp, Homo sapiens
  SIMILAR (310)..(738): 381254mologous to Homo sapiens peptidylprolyl isomerase,accession number X52851,Smith-Waterman Score=138.
ggcacgagggacgccaccgccgaggaaaaccgtgtactattagccatggtcaaccccaccgtgttcttcgacattgccgtcgacggcgagcccttgggccgcgtctcctttgaggtaaggggcctggataccaagaagtgactgctcatctaatccataaagctatgttaacagattggaggtagtagcattttcattacaagtgactaaaagaacagctgtttacccctgatcgtgcagcagtgcttgctgttccttagaattttgccttctgtttgcagacaaggtccccaaagacagcagaaaattttccgtgcctctgagccactggagagaaaggattttggttatagagggttccctgctttcacagattatttcccagggttttatgtgtcaaggggtggtgacttcacaccgccataaatggcactgggtggcaagtccatctaatggggaagaaatttgaaagatgacgaacttcatccctaaagcataccgggtccttggcatcttggtccatgggccaaatgcttgggacccaaacacaaaatgggttcccaagttttttcaatcttgcactgcccaagactgcagtggttggatggcaagcaatgtggtgtttggcaaaagttgaaagaaggcatgaataatttgtgggaggccaatggaagcgcctttggggtccaggaattggcaagaccaggcaagaagaatcaccaattgtgcctggtggacaactccgaataaagtttgaccttgtgttttatcttaaccaccaagatcattcccttctgtagcttcaaggagagcacccctccaccccatttgctcgcaagtatcctagaatctttgtgctctcgcttgcagttcccttttgggttccatgttttccttgttccctgccatgcctaggtggattaaaaagttcccctttatgattattgaaataaaaactaaataacaaaaaaaaaaaaaaa

SEQ ID NO: 29315 - DNA, 704 bp, Homo sapiens
  SIMILAR (160)..(702): 691254mologous to Mus musculus zinc finger protein,accession number AJ278340,Smith-Waterman Score=627.
gccgccctcctcgccctcggcccgcggaacccgtggaccctgtggacgccgttgaccccgaactatcccgaccgccagccctggaccgacaaacacccagatctgttgacctgcggccgctgcctgcagaccttcccgttggaggccatcactgccttcatggaccacaagaagctgggctgtcagctcttcagaggccccagccgcggccagggctcagaacgagaggagctgaaggccttgagctgcctgcgctgtggcaaacagttcacagtggcctggaagctgctgcgtcacgcccagtgggaccacggactgtccatctaccagacagaatcagaggccccggaggccccgctcctgggcctggccgaggtggctgcagccgtgtcggcagtggtggggccagcagctgaggccaagagcccccgtgcaagtggcagcggcctcacccggcggagccccacctgtcctgtgtgcaagaagaccctcagctccttcagcaacctcaaagtgcacatgcgctcacacacaggcgagcggccctatgcttgcgaccagtgtccctacgcctgcgcccagagcagcaagctcaaccgccacaagaagacccaccggcaggtgccgccccagagccccctcatggccgacaccagccaggagcaggcctctgcagcccctccggagccggctgtccatgctgc

SEQ ID NO: 29316 - DNA, 1741 bp, Homo sapiens
  SIMILAR (853)..(1605): 271254mologous to Mus musculus zinc finger protein,accession number AJ278340,Smith-Waterman Score=155.
tcgcggcgggtcgccgcagtcactcacctgagcgcgcacggtccgcgcgtcctccgctcgtgcgtcctccgcccgcccgcctgcctgcctgcccgcccgctcgctcgcccggcccgcgactcatgtcccgccgcaaggccggcagcgcgccccgccgagtagagcccgcgcccgccgccaacccagacgacgagatggaaatgcaggacctcgtcatcgaactcaagcccgagccagacgcgcagccccaacaggccccaaggctggggcccttctccccgaaggaggtgtcctcggcggggcggttcggcggcgaaccccaccactcccctggccccatgcccgccggggccgccctcctcgccctcggcccgcggaacccgtggaccctgtggacgccgttgaccccgaactatcccgaccgccagccctggaccgacaaacacccagatctgttgacctgcggccgctgcctgcagaccttcccgttggaggccatcactgccttcatggaccacaagaagctgggctgtcagctcttcagaggccccagccgcggccagggctcaggagtgcctatcccacagaaggtgtccagctggcagctgtccgcactaacactctgcctctttttcttaccagaacgagaggagctgaaggccttgagctgcctgcgctgtggcaaacagttcacagtggcctggaagctgctgcgtcacgcccagtgggaccacggactgtccatctaccagacagaatcagaggccccggaggccccgctcctgggcctggccgaggtggctgcagccgtgtcggcagtggtggggccagcagctgaggccaagagcccccgtgcaagtggcagcggcctcacccggcggagccccacctgtcctgtgtgcaagaagaccctcagctccttcagcaacctcaaagtgcacatgcgctcacacacaggcgagcggccctatgcttgcgaccagtgtccctacgcctgcgcccagagcagcaagctcaaccgccacaagaagacccaccggcaggtgccgccccagagccccctcatggccgacaccagccaggagcaggcctctgcagcccctccggagccggctgtccatgctgctgcccccaccagcacccttccatgcagcggtggtgagggggctggagccgccgccacagcaggtgtccaggaacccggggctcctggcagtggggctcaagccggccctggtggagacacttggggagccatcaccacggaacaaagaactgaccctgcaaacagccagaaggcatcacccaaaaagatgcccaagtcagggggcaagagccgcgggcccgggggcagctgtgagttctgcgggaagcattttaccaacagcagcaacctgacggtgcaccggcgctcacacaccggggagcgcccctacacctgtgagttctgcaactacgcctgcgcccagagcagtaagctcaaccgccaccagccgcatgcacggcatgacgcctggcagcacccgcttcgagtgcccctactgccatgtgcccttcggcctgcgagccaccctggacaaacaactgcggcagaagcaccctgagagcggccggcgaggcctgagcccaggaaagcccccctcactgtccctggtaccgctgccaacacccattgacctcctcgtttttgcccgccttctccaagtaaattttcccttttatttaaaaaaaaaaaaaaaaa

SEQ ID NO: 29317 - DNA, 456 bp, Homo sapiens
  SIMILAR (253)..(11): 301254mologous to Rattus norvegicus high sulfur protein B2E,accession number AB003753,Smith-Waterman Score=118.
gtgaagacctggttccagaaccagagaatgaaatctaagaggtggcagaaaaacaactggctgaagaatagcaatggtgtgacgcagggatgcctggtgaacccgactgggaaccttccaatgtggagcaaccagacctggaacaattcaacctggagcaaccagacccagaacatccagtcctggagcaaccactcctggaacactcagacctggtgcacccaatcctggaacaatcaggcctggaacagtcccttctataactgtggagaggaatctctgcagtcctgcatgcagttccagccaaattctcctgccagtgacttggaggctgccttggaagctgctggggaaggccttaatgtaatacagcagaccactaggtattttaatactccacaaaccatggatttattcctaaactactccatgaacatgcaacctgaagacgtgtga

SEQ ID NO: 29318 - DNA, 352 bp, Homo sapiens
  SIMILAR (2)..(73): 481254mologous to Mus musculus TCE2,accession number AF220294,Smith-Waterman Score=58.
  misc_feature (1)...(352): n = a,t,c or g
ntccaggctgcctgtgtcggggcagggccgcgtcttcaaagctggctggctctggccctgtcatgaaagccctgtgatgacatggggcgtagctggacaattcaggatcacctctccagtcttgaaannnnnnnnnnnnnnnnnnnnnnnnnnnnnnnnnnnnnnnnnnnnnnnnnnnnnnnnnnnnnnnnnnnnnnnnnnnnnnnnnnnnnnnnnnnnnnnnnnnnnnnnnnnnnnnnnnnnnnnnnnnnnnnnnnnnnnnnnnnnnnnnnnnnnnnnnnnnnnnnnnnnnnnnnnnnnnnnnnnnnnnnnnnnnnnnnnnnnnnnnnnnnnnnnnnnnnnnngtgccgaa

SEQ ID NO: 29319 - DNA, 543 bp, Homo sapiens
  SIMILAR (283)..(408): 1001254mologous to Homo sapiens dA311J7.1 (PUTATIVE Homeobox protein),accession number AL023574,Smith-Waterman Score=214.
atgaatccaacctatgcccaaagcctgccttgttctgaagcatccaactgtaaagaatcttcacctacgccggtgacttgtgggcctgaagaaaactatccatccctgcaaatgtcttctgctgagatgcctcactcagagactgtctctcctcttccttccgccatggatctgcttatccaggacagccctgattcttctaccagtcctaaaggcaaaaaacccacttctgcagagaagagcaccacaaaaaaggaagacaaggtcctggtcaagaaacagaagaccagaactgtgttccgttccacccagctgtgtgtactcaatgatagatttcacggacagaaatacctcagcctccagcagatgcaagaactttccaacatcctgaaccttagctacaaacagcctccactcttcctaccacaagggatgcctggtgaacatgactggaaaccttccaatgtggagcaaccagacctggagcaattcaacctggagcaaccacacccggaacatccattcctggagcaaccactcctg

SEQ ID NO: 29320 - DNA, 1357 bp, Homo sapiens
  SIMILAR (444)..(608): 941254mologous to Homo sapiens dA311J7.1 (PUTATIVE Homeobox protein),accession number AL023574,Smith-Waterman Score=263.
  misc_feature (1)...(1357): n = a,t,c or g
ttattatgcaggcaactcactttatcccaatttcttgatacttttccttctggaggtcctatttctctaacatcttccagaaaagtcttaaagctgccttaaccttttttccagtccacctcttaaattttttcctcctcttcctctatactaacatgagtgtggatccagcttgtccccaaagcttgccttgctttgaagcatccgactgtaaagaatcttcacctatgcctgtgatttgtgggcctgaagaaaactatccatccttgcaaatgtcttctgctgagatgcctcacacggagactgtctctcctcttccctcctccatggatctgcttattcaggacagccctgattcttccaccagtcccaaaggcaaacaacccacttctgcagagaatagtgtcgcaaaaaaggaagacaaggtcccggtcaagaaacagaagaccagaactgtgttctcttccacccagctgtgtgtactcaatgatagatttcagagacagaaatacctcagcctccagcagatgcaagaactctccaacatcctgaacctcagctacaaacaggtgaagacctggttccagaaccagagaatgaaatctaagaggtggcagaaaaacaactggccgaagaatagcaatggtgtgacgcagaaggcctcagcacctacctaccccagcctttactcttcctaccaccagggatgcctggtgaacccgactgggaaccttccaatgtggagcaaccagacctggaacaattcaacctggagcaaccagacccagaacatccagtcctggagcaaccactcctggaacactcagacctggtgcacccaatcctggaacaatcaggcctggaacagtcccttctataactgtggagaggaatctctgcagtcctgcatgcagttccagccaaattctcctgccagtgacttggaggctgccttggaagctgctggggaaggccttaatgtaatacagcagaccactaggtattttagtactccacaaaccatggatttattcctaaactactccgtctcaaaaaaaaaaaatttcaagactggaagaggtgatccttgaattgtccagctacgccncccatgtcatcacagggctttcatgacagggccagagccagccagctttgaagacgcggccctgccccgacacaggcagcctggagaagctgggcaggacaagtaggacatccctggagcctccagaagggactggcctctgcccacaccttgacttcagtatttctgacctcctaaactctaataaagtcatgcttacagccagaaaaaaaaaaaaaaaaaaaaaaaaaaaaaaagtcgtatcgatgt

SEQ ID NO: 29321 - DNA, 439 bp, Homo sapiens; identical to SEQ ID NO: 18593
  SIMILAR (293)..(436): 771254mologous to Homo sapiens neutral protease large subunit,accession number M27826,Smith-Waterman Score=186.
  misc_feature (1)...(439): n = a,t,c or g

SEQ ID NO: 29322 - DNA, 302 bp, Homo sapiens
  SIMILAR (117)..(248): 481254mologous to Human T-cell lymphotropic virus type 1 Gag,accession number S74562,Smith-Waterman Score=141.
gtgtcagaccacgcagggacgcctgccttggtccttcacccttagcggcaagtcccgcttttctgagggaggggcaagtacccctcaaccccttctccttcacccttagcggagcttgctacaagtgcccgaaatctgaccaccaggccgaggaatgcctgcagcccaggattcctcccaagccgtgtcccatctgtgcgggaccccactggaaatcggactgttcaactcacctggcagccactcccagagcccctggaactctggcccaaggctctctgactgactccttctctgcttag

SEQ ID NO: 29323 - DNA, 663 bp, Homo sapiens; identical to SEQ ID NO: 1392
  SIMILAR (70)..(192): 901254mologous to Homo sapiens calbindin D28K,accession number S46006,Smith-Waterman Score=204.

SEQ ID NO: 29324 - DNA, 1047 bp, Homo sapiens
  SIMILAR (571)..(756): 821254mologous to Homo sapiens neutral protease large subunit,accession number M27826,Smith-Waterman Score=252.
atgactcggaccacaagggtagacttggaggtggtgaaagtggtcagattaaggatgcacttgaaaatggagttgtcaggacctgctgatggctatggcatggctgtgaaggaaagtgaagaatcaggatgcctcccagaaacctcaaggcagttgtatatgtcgtcagtaggtctatgggcctggacaaggcattctggtgtagtgaaagtcaacgtccctggagtcattcaaactgagttggactctcaagtcttcactttccagctcagggatattggccgcttatccaccttcccaagctcagtaaatgataattccactctaggagttttccagctcaaaaacctcactgtcagccttgactccttccttcacacccatgccatgccaactgtagatgcagccagctctgtggatatctgggaaggaggcttccaggtggagaatagcaagggacgcctctctgattatacactcacgtttcaagggtgtcagaccacacgcagggacgcctgccttggtccttcacccttagcggcaagtcccgcttttctggggaaggggcaaaccatcacggacgccaagctttgggttactctcacagtggaaggtaagcccgtccccttcttaatcaatatggaggctacccactccacattaccttcttttcaagggcctgtttcccttgcctccataactgttgtgggtattgacggccaggcttctaaacctcttaaaactccccaactctggttctatattcagctctgccatgaagaagctgcgttcctacagaaactgagaaactgcttctcctgcagccctgtgcatgggagtgtgtcaggggaaagggaccggatacggcagtgtaccgagccctacgatgacattttcagccaagaagaagaagaatgcttcatcaaatctcccatcagcccaagactagattgtaccaagattttgcaatatgaacataatgttctctactgtccaggatctaatccttttccatcggggaacacatttgcaaacaatgactcctaa

SEQ ID NO: 29325 - DNA, 833 bp, Homo sapiens
  SIMILAR (599)..(826): 781254mologous to Homo sapiens neutral protease large subunit,accession number M27826,Smith-Waterman Score=276.
cccgcctgcacccaggtgaaataaacaaccatgttgctcatacagagcctgtttggtggtctcttcacatggacgcgtatgaaatttggtgccgtggctcggatcggaggacatcccttgggagatcaatcccccttcctcctgctctttgctccctgagaaggatccacctacgacctcaggtcctcagatcgaccagcccaagaaacatctcaccgatttcaaatccgggacacctctctgattatacacccacgtttcaagggtgtcagaccatgcagggacgcctgccttggtccttcacccttagcggcaagtctcgcttttctggggaaggggcaaccacatctccggcacacaagaacttccaaacacctgaaccgcagtggccaggcattcctccagaacctcctcccacaggagcttgctacacgtgccggaaatctggccactgggccaaggaatgcccgcaggccaggattcctcctaagccgcatcccatctgtgtgggaccccactgaaaatcggactgttcaactcacctggcagccactcccagagcccctggaactctggctcaaggttctctgactgactccttcttgacttaccggctgaagactgatgctgcctgatcgcctcagaagccccgtagaccatcacggatgccgagctttaggtaactctcacggtggagggtaagtccgtccccttcttaatcaatacggaggctacccactccacattaccttcttttcaagggcctgtttcccttgcctccataactgttgtaggtattgacggccaggcttctaaacctcttaaaaacgaaa

SEQ ID NO: 29326 - DNA, 1201 bp, Homo sapiens
  SIMILAR (600)..(286): 391254mologous to Homo sapiens neutral protease large subunit,accession number M27826,Smith-Waterman Score=115.
ccaggtgagtgataacaggctttaatctttataaagcatgctgcaggacgggatattggcgttgagtggggtaagggtgattaggttttaatgagatggtaaggggtgcatgatcggtcaccaaggagggagtagaggtatcttatacttgtgggttaaggtcgggggatacaagaggaggacgcaaaggaggctttggattgggaagaagggcggcaatgagatatagctgtagtccaggaatagtcagggaagcagataatttagttaaagtgtcctcagcctaataagggaacctggcacgatggggataactaaaaaggagtgcttaaaacgacgtattgtctaatgttggcaccagacgttggggagttttaagaggtttagaaagcctggcccgtcaatacccacaacaggttatggaggcaagggaaacaggccctttgaaaaaaaggtaatgtggagtgggtagcctccgtattgattaagaagggaaagggcttaccttccactgtcgagagttacccatagctcggcgtccgtgaatggtctagggggcttccgaggcgatcgtgcagtgtcagtcttcaggctgctaagccaagaagatctgggaaggagtcagtcagagagccttgggccatagttccaggggctctgggagtggctgccaggtgagttgaacagtccgattttcagtggggtcccacacagatgggacgcggcttaagaggaatcccgggctgccggcattccttgtgccagtggccagatttccagcacatgtagcaagctccttccagaaaagcgggaaaggggttgggtcgtggaaataaggggttggggtgcagagataagaggtcggggcatggaaataagggattggggcacagagatataagaggttggggtgcagaaataagggattgggccacagagataagaggtcggggcgtggaaataagggactggggcacagagatacgaggttggggtacttgctcctctagaaaagcggacttgccactcagggtgaaggagaaggggttgggtgtttcttgccccccagaaaggcggagaaggggtagagacacagagagaaggggttggggtacttgccccttccccagaaaagcgggacttgccgctaagggtgaaggaccaaggcaggcgtccctgcgtggtctgacacctctgaaac

SEQ ID NO: 29327 - DNA, 7938 bp, Homo sapiens
  SIMILAR (7459)..(7935): 1001254mologous to Escherichia coli hydrogenase-2 operon protein HybD,accession number U28377,Smith-Waterman Score=790.
atgtcaaataaaacgaaggcccttgccccaagtgaagtcatcagcaaatatctctttgctttccgggggactgtgttctctcacaacatcttttggaattatcacttcatactgaaacaagggtttgatcttttcatgagatgtatggtgatgaaattaaggccaggggctctggggacagaagagaaggctggcgccactcgtatgccctggagaaacagtgagatgaagagcacagcctctagagccagagtgtctggatctaaaattggctctgccaacaagcattatgtccggaattggtgggttcttggtctcgctgacttcaagagtgaagccgcggagcctcgcggagtgaagctgcagaccttcgcggtgagtgttacagctcttaaaagcggcgcgtctggagttgttctttccttccggtgggttcgtggtctcactggcctcaggagtgaagctgcagaccttcatggagtgaagctgcagaccttcacagtgagtgttacagctcataaaggcggcgcggacccaaaggcgagtaacagcaagatggctgccacgggacctagaaaggggagaagccatgttgcccaactccagagcccgtccagagtctctccatggcctggccctgagagacaaggctgtgaggctgcccacctggagcctaatgccagcttcaagaactcccagtgggcaccacccttaccaggccgcacacagcttccgccctcaggaagccagggacagcgccaggcgggacgctttgcgcagctgcaggcctcccccgccgcattcggccttcaagcccgcacatgctccctggggcccctgcgggattacgaggggaaaatggattctacatctttcttaccaacatttttagatgtggatctgacaatatcacatattaaatgtcttcccaaggatattctggtgaaatttcaaggcataaagagtaatgaatgtgagtttgactaccatgtattgcagagagaaatacaacatactccaaaagtgaaaaataatgtggaaattgatgaattttgtttggtggaagaaagagtatctggagaatggcagagaggaagagtcatggaaaagaaaaatgaactctatacagtgctcctcatagatcgcggagaagaactaagagttgctggtccacagattgcttcagcctgtggcaatttatttgagtaccgccacgggttgtatttggtatttttgcgaatatactaccagttggggaaaaatgtgccaaaaattatatctcaggctctcgagttacaattaggaagacttgttgatggagattcatttcgtcttattgtggaaatgttagaagaattccctcaacaaatgccagatttattacaacataaaaggcctgaattgtcattaggtaataaagatacttcacttgatattcagcatgttctggataagttgcagccatctttgtcagtaggaagtactgaaagtgtaaaggtatcatctgcattgagcccaagtaaattttattgtcagttaattaaatggactccagagctagaaaacttgacagcacatatgactttgcattatgataccgtctgtcaagaaactagtcccacgtgtgataattttggactgctttgtgttgccagaaggcgaaatggacagtggcatagaggaattcttcagcagctcttgcccccaaatcaagtaaaaatttggtttatggattatggcagtagcgaggctataccctcaatttatgtaaagaaacttaaacaggattttattttagtaccattattttcatttccatgttctctgacatgtttgcacagtccagatagagatgcaagaatatttcaactgagtatatttaaacaggccttattaggacaagtggtatatgcacacattgattggttcaataaggatgagtgtttgtattatgtgacattacaaactcaagagtctacagttaattctaagtgtctactgaagactgtaggcacacaagtactttgtccgatgtctgattcaaaaatctccaatatcttgagtgagacaagtgtgtctgatgtaaacagctttgcagttgagagttttatgggaaatattgaatggtcaatagactctctaaataaaaaaggcattttaaaagtaggttttcccattaaaacagtacaaatggagatagaggctgcctacatagcttttatagcatatgtattaaacccatcaaatttctgggtacgcactaatgaccatcggaatgaatttcaagaaataatgaaaaacataaacaaattttatgatttgtgtgaaaacgatgaaatgattctaagaaaacctgaacctggattattttgttgtgctagatatagcaaggacagacgtttttacagagctgtcatcactgaaattaatggttataagattaatgtttattttttggattatggtaatactgattccataccattttttgatgtaaaaattttgcttccagaattttgtgagttgcctgccttagcgatgtgctgttcacttgcacatatatttcctgttgaagatttatggactaaggctgcaattgattattttaaaaaattagttttgaacaaagcaattttgcttcaggttatagcaaaaaaagatgacaagtacactgtaaatattcaaagtgttgaagcctcagaaaatattgatgttatctctcttatgttacaagctggatatgcagaatattttcaagtagaactagaatattttccaaaatctgtaagtgaatattcaatgctaaattcagaatctaaaaacaaagttaatattaaaaaagtcatatctgcccttcttgaaggacctaaatctaaaaagtaccattcaaataacctggtggaaaataacttgtctttgccaaagtccctagctgttaatatctcagaatttaaaaatcctttcaccttgtctgtgggacctgagtcatcctggccttataaagaatatatttttagaccaggaacagttcttgaagttaaatgttcctgttattatggcccaggtgacttttcatgccagctccaatgtaagtcagaagacctaaaattactaatggagcaaattcagaattactatagtattcattctgatccttatgagattgggcagactgcttgtgttgctaagtattctgggaagtggtgtagagctgctgttttgactcaagtatcaaaagaagttgacatagtgtttgttgattatggttaccaaaaaagggttttaattgaagatctttgtgcaattaacccacgttttctcttgttagaaagccaagccttcagatgttgtcttaaccattttattgagcctgttagttgtaaattattcagttggacaagaaaagcattcagagacttgtggaattttatctcttcatctagagggttattgacttgtatcatctatgccttagttattatacatccaaaccatttatataacttagtggatttacagtcctcatttactagtgcaaaagaatttcttatgaatcgtggctctgctcagtatatcacattatcagagacattcccatctttatttagtctttacagttactgttattcttcctttaatatacaaattggaagtgaagaagaagtatatatatctcacatatatagtccccaaaagttttattgccagcttggcagaaataataaagatctagagatgatagaaacaaaaatcacagagagtgttaacctccaaaattttccaaaatatgattctaataaaatgagagtgtgcatatctaagtatgtagaggatggtctctcatacagagctttagcaataccaacagattcatcatctgagtttcaagtctattttgtagactttggaaataagcaattagtaggagaaaatatgttgagggccatttcagctcagtttccagagttgttgtttacacctatgcaagctattaagtgttttttgtcagatcttagggatgtagatattccagcagaaatcagtagttggtttaaagacaatttcttgggaagatcattaaaggcgataatattgtcccaggagtcagatggacagcttggtatagaattgtatgatggatctcaatatataaatgagaaaattaaagtgttgcttcatgcttatggaaaaagacattgtgaccaagcatgctgcatggaaaagagtaataaaataaatgagaataagagatttactacttctttgaaaggcaaaacaggaaacaactatcgccataatgtgataaataaacctagtccagtaacatattccgaaagaaaaatagaccaattgatgcatcccaaaaatatacatgccaggtttttgaagccatcagtttgttataaaatggaacctgtgtcaaaaaacaaaatgaagacttctttgaatgatgggcttaaaggtataaaaattgtccctggagctgcacatattcttgagaacaggcgtgtgggccaaaaatcagtaaaggttgtatcacagtcttttatcagagcattaaatcaaacaacctcacaaaacccatatgaccttattaggccacagatcaaagaccttcctcaaccgcaaatttatttgaatgccaaagttaaagggtatgtatctaatatcagtaatccagcgaatttccatattcagcttgctgagaatgaaagtgtaattatcagacttgctgatgctctaaatgcaacagcaaggagattgagagagagaaaatcagttaaacctctagtgggagatcttgtagttgcagaatattctggtgacaatgccatttacagggcagttattaagaaaattttgccaggaaattcttttgaagtagaatttattgactatggtaactctgcaatagtaaacacatctaaaatttacgaacttcagagggaatttttaactgttcctcagctaggaatccatgcttttcttagtggagtaaaatggaatgagcctgatgaaatatgggatgacaaaactgtggattattttacttcgaaagtacataacaaaacagtttattgtgaatttttgaaaaagcatgatcagaaatgggaagtaaatatgatttgtgatgaaaaatgtgtcattaatgaactactgaaatggaaagcatgttcaaaactgcagaagtcagcattgcagatgcctcaggttctctctcaaaaggtgaggccaggtgataatgaaatgaagaaaggaaaatcaaatgagtctgaaggttctatgaattcaaaccaacagctgtttaaaattcctttggaagaattcaaacttggacaacttgaaaaagctgaaatgcttaatgtttcaaaaagtggaagattttatgtgaagttatccaaaaataaaaaaattttatcagatttaatagtattaattacgaaagaagaaaaaaaatccccttttttatcaatggaaagtattgaaaaaggtttagaatgcttggcaaaatctaaaaataccttgaaatggcatcgatcaaaagtagaagaaaagtatgttgatgataaagtacttgtttttttagtagattgtggtatctatgaaatagtacctgtatgtaataccaagctgcttagtaatgaaataagaaacattcctagacaagctgtaccttgtaaatggatttggtttgaaaattctaagaacatatcatttgagtgcttatttgctgatttggaaataaatattcttttcctgaaatatttagatgctgtttgggaagtagaaattttggtagatgacctgttacttttggaatacttaaatttgaatacagttcctgttgaagaaaacaaacttagacttgcagaaattgtttacaacattgaatctaagactcctgtatcatcatgcacaataaaatcatttacttgggttcaattccaaaatgataggcagtattctggtattgcaactgctgtttctgatccatcagacttcagtattcagttagaagatttctttgacataatgaaatacctttttatgttgctttctgatctaccagagaccttacaaacattgcctcaggagttcataattcccggttctagttgtttgttcaaatataaatcggaagatcagtggaatagagtagaaatttctgaagtctcacctcagtctttatgtcttgtgttggttgactatggattttctttttatatacgttattcagaaattataaatcttaaagttgttcctgaggaacttttgaatttgccaaggctgagttatccatgtattttatatggtatcttacctgctaaaggaaaacattggagtgaagaagccaaaatcttttttcgagatttcctaagtaaaccagacttagtttttcagtttagggaatatcattctgaaacaaaactgaaagtagatgtcattcatgagaaaaacaatttggcagatatattagttgcatctggtctcgcaacttattctaaagattcacctcatcttgatgcaattactgctactgaatctgctaaaaatccaatataatgccacgcacgttgcacgtggaatcgccgtcgccggaggtatttattcgcgataagctcatggagcggcgtaaccgtcgcacaggaaggacagagaaagcgcggatctgggaagtgacggacagaacggtcaggacctggattggggaggcggttgccgccgctgctgctgacggtgtgacgttctctgttccggtcacaccacatacgttccgcttttcctatgcgatgcacatgctgtatgccggtataccgctgaaagttctgcaaagcctgatgggacataagtccatcagttcaacggaagtctacacgaaggtttttgcgctggatgtggctgcccggcaccgggtgcagtttgcgatgccggagtctgatgcggttgcgatgctgaaacaattatcctgatgacaagcggcgatatcccgatgtttgccgttggccggataaggcgtttacgccgcatccggcaaatgcccatactcattcaggctttggttcgttgttcggtgcaacaacaataaccggcatatcggcatcaattagcgccagcggaccgtgtttcagttcgccagcagctgcactgatcaccaatatcggcaaaggcgatcacaccacctttgtgaagccgaacattccggcaacgggtgaattcaaaggtgttggcttcctcgaagcgccgcgcggtatgctctctcactggatggttattaaagacggtatcatcagcaactaccaggcggttgttccatcaacctggaactctggtccgcgtaacttcaatgatgacgtcggtccttacgagcagtccctggtgggtacaccggttgccgatccgaataaaccgctggaagtgctgcgtaccattcactcctttgacccgtgcatggccttcttaggggtcggcaatattttgctgaccgatgaagccatcggtgtgcggattgtcgaagcgttagagcaacgatacattctgccggattatgttgagatcctcgatggcggcacggcgggaatggagctgcttggcgacatggcaaatcgcgatcatttgattattgcggatgccattgtctcgaaaaagaacgcgccgggaacgatgatgatcctgcgggatgaagaagttccggcgttgtttaccaacaaaatctctccgcatcagcttggcctggccgacgtcttgtcggccctgcgcttcaccggcgagtttccgaaaaagctgaccctggtcggcgtgatcccggaatcgctggagccacacatcggcttaacgccgacggttgaagcaatgattgaacctgcgcttgagcaggttctggctgcgctgcgtgaatctggcgtggaagccatcccacgggaggcgattcatgactga

SEQ ID NO: 29328 - DNA, 489 bp, Homo sapiens; identical to SEQ ID NO: 12713
  SIMILAR (1)..(486): 801254mologous to Homo sapiens peptidylprolyl isomerase,accession number X52851,Smith-Waterman Score=687.

SEQ ID NO: 29329 - DNA, 495 bp, Homo sapiens
  SIMILAR (1)..(492): 1001254mologous to Homo sapiens dJ328E19.1 (cyclophilin- like),accession number AL022240,Smith-Waterman Score=872.
atggtcaactccgtcgtcttttttgacatcaccgtcgacggcaagcccttgggccgcatctccatcaaactgtttgcagacaagattctaaagacagcggaaaactttcgtgctctgagcactggagagaaaggatttcgttataagggttcctgctttcacagaattattccagggtttatgtgtcagggtggtgacttcacacgccataatggcactggtgacaagtccatctatggggagaaatttgatgatgagaacctcatccgaaagcatacaggttctggcatcttgtccatggcaaatgctggacccaacacaaatggttcccagtttttcatctgtgctgccaagactgagtggttggatggcaagcatgtggcctttggcaaggtgaaagaacgtgtgaatattgtggaagccatggagcactttgggtacaggaatagcaagaccagcaagaagatcaccattgctgactgtggacaattctaa

SEQ ID NO: 29330 - DNA, 680 bp, Homo sapiens
  SIMILAR (297)..(458): 921254mologous to Homo sapiens dJ269M15.1 (similar to peptidylprolyl isomerase (cyclophilin)),accession number AL021395,Smith-Waterman Score=280.
ccggcgcgcccacgcgtgcgcgaggagaaggagaaagaaagaaatgcttggggtaaatgttttaactagtcattcttcccaggagcggatgaagctgacttttaaaaagaaggctgtgaactttgcagatgctgctgccgcccagggccccctgcttccagccatggtcaaccccaccatgtttttccacattgctgtcgatggcgagcccttgggctgtgtctccttcgaggtaaggggcctggaaagcaagaagtgactgctcatctaatccataaaactatgttaacagattggagctgtttgcagacaaggttccaaagacagcagaaaatttccatgctctgagcactggagaaaaaggatttggttataagggttcctgctttcacagaattattccagggtttatgtgtcagggtggtgacttcacacgccataatggcactggtggcaagaccagcaagaagatcaccattgctgactgtggacaactcgaataagtttgacttgtgttttatcttaaccaccagatcattccttctgtagctcaggagagcacccctccaccccatttgctcgcagtatcctagaatctttgtgctctcgctgcagttccctttgggttccatgttttccttgttccctcccatgcctagctggattgcagagctaagttt

SEQ ID NO: 29331 - DNA, 925 bp, Homo sapiens
  SIMILAR (169)..(621): 441254mologous to Homo sapiens peptidylprolyl isomerase,accession number X52851,Smith-Waterman Score=204.
aaaccgtgtactattagccatggtcaaccccaccgtgttcttcgacattgccgtcgacggcgagcccttgggccgcgtctcctttgaggtaaggggcctggataccaagaagtgactgctcatctaatccataaagctatgttaacagattggagctgtttgcagacaaggtttccaaagccagcagaaaactttcgtgcctctgaagcattgaagagaaaggatttgggttataaggggttccctgctttcacaggaattattccagggttttatgtgtcaaggggtggtgacttcacaccgccataaatggcacctggtggccaagtccatctaatggggaagaaatttgaaagatgacgaacttcatccctaaagcataccgggtcctgggcatcttgtcccatgggcaaatgcttggacccaaacacaaatgggttcccagtttttcatctgcactgcccaagactgcagtggttggatggcaaagcatgtggtggttttggcaaaagtgaaagaaaggcatgaaatattgtgggaggccatgggagcgcttttgggtcccaggaaatggcaagacccagcaagaagatcatcagcattgctgactgtggacaactcttaataagttttgacttgtgtttttatcttaaccaccaagatcattcccttctgtgctctcctctcagggagagcacccctctaccccatttgctcgcaggatcctaagaattttgtggctctcgcttgcagttcccttttgggttccatgttttccttgttccctcccatgcctaggtggattaaaaagttcccctttatgattattgaaataaaaactaaataacaacaacaataaaaagctagggaaagaaaataaagaatgaaaacaaaataaggcctctgcctctgcctctgcctctcc

SEQ ID NO: 29332 - DNA, 380 bp, Homo sapiens
  SIMILAR (94)..(213): 521254mologous to Homo sapiens Human secreted protein, SEQ ID NO: 7848,accession number G03767,Smith-Waterman Score=112.
ctctgctgcagcccgtgccgccgccgcctcctgggaagagaggaagcgggagaggagcccacgtcgcctgtcacccaatatctccagccgcgcagtcccgaagagtgtaagatgttcgcctgcgccaagctcgcctgcaccccctctctgatccgagctggatccagagttgcatacagaccaatttctgcatcagtgttatctcgaccagaggctagtaggactggagaggtgctgcaacagtaggagtggctggttctggtgctggtattggaacagtctttggcagccttatcattggttatgccagaaacccttcgctgaagcagcagctgttctcatacgctatcctgggatttgccttgtctgaagctatgggt

SEQ ID NO: 29333 - DNA, 385 bp, Homo sapiens
  SIMILAR (305)..(382): 731254mologous to Homo sapiens mitochondrial ATP synthase subunit 9 precursor,accession number U09813,Smith-Waterman Score= 88.
cccacgcgtgcgcactccttcgacctctgacgcagtccgtgccgtcgtcgcctcctgggaagagaggaagcgtgagaggagcccacgtcgcctgtcacccaatatctacagccgcgcagtcccgaagagtgtaagatgttggcctgcgccaagctcgcctgcaccccctctctgatccgagctggatccagagttgcatacacacccacttctgcatcagtgttatctcgaccagaggctagtaggactggagagggctctacggcttttaatggggcccagaatggtgcgcttcatctaatgacaaagggagcttcacaccagtgcgatcaggagagacattgatacttggtgcaaatttattggctgcagtgctgcaaccgaa

SEQ ID NO: 29334 - DNA, 472 bp, Homo sapiens; identical to SEQ ID NO: 13569
  SIMILAR (8)..(208): 981254mologous to Homo sapiens mitochondrial ATP synthase subunit 9 precursor,accession number U09813,Smith-Waterman Score= 325.

SEQ ID NO: 29335 - DNA, 427 bp, Homo sapiens
  SIMILAR (19)..(408): 991254mologous to Rattus norvegicus ribosomal protein S15a,accession number X77953,Smith-Waterman Score=666.
tcttttcgcgccgccacaatggtgcgcatgaatgtcctggcagatgctctcaagaggatcaacaatgccgaaaagagaggcaaacgccaggtgcttattaggccgtgctccaaagtcatcgtccggtttctcactgtgatgatgaagcatggttacattggcgaatttgaaatcattgatgaccacagagctgggaaaattgttgtgaacctcacaggcaggctaaacaagtgtggggtgatcagccccagatttgacgtgcaactcaaagacctggaaaaatggcagaataatctgcttccatcccgccagtttggtttcattgtactgacaacctcagctggcatcatggaccatgaagaagcaagacgaaaacacacaggagggaaaatcctgggattctttttctagggatgtaatacatata

SEQ ID NO: 29336 - DNA, 1500 bp, Homo sapiens
  SIMILAR (592)..(906): 1001254mologous to Homo sapiens mitochondrial ATP synthase subunit 9 precursor,accession number U09813,Smith-Waterman Score= 516.
atgacatcctggggatctgtccattatgacagtgacctttgtatacgttataagtttttgttgttagctgcacttgatgtgctgagtgacagtagcctagtactagtccctacagaggttgctactcagaagtttctgcctctggacacagtggcaactttcaagctttttacatgctggactgaaaaccaggagtctgatctgacttttaaaatccagaagagtcctgttataaatttagactggggtgagaaaccagatgatgattttggagcacagcctaataagaacctggggtttgcctcttctttcggcattgttgatgctcttgagagcatcaggcaggacattcatgtgcaccattgtggcggcacgaaaagatggcggaaagagccaaacgacaaccctttcattgctcttgacaccccacagtcctatttcacagaggaagagaatgaccagcaagtcaacttctactacagagaagcagcaactgataaaaggccaaatcttacaagagaggaagcgggagaggagcccacgtcgcctgtcacccaatatctccagccgcgcagtcccgaagagtgtaagatgttcgcctgcgccaagctcgcctgcaccccctctctgatccgagctggatccagagttgcatacagaccaatttctgcatcagtgttatctcgaccagaggctagtaggactggagagggctctacggtatttaatggggcccagaatggtgtgtctcagctaatccaaagggagtttcagaccagtgcaatcagcagagacattgatactgctgccaaatttattggtgcaggtgctgcaacagtaggagtggctggttctggtgctggtattggaacagtctttggcagccttatcattggttatgccagaactaagttgggtagatgcatcatggaacaagacaggcaaagaagaggtctacaagaagtttcctgcgtttgtaaagagaagactgtaaagaattttaggactcttggggatattgaggaatgcaaaaaactgcttcccgcccttcgggctccttgtccaatcatgagcgcccgagtgctctttgatgcccgtcccctctacccgccctgccgaagacccgccttcttctccttaagcctgacggaatcacctgactcggaggcgctccctcagaaggaaggcaagaaggggcgtgtgggtgaaggggaggggcgccagaaggaagcccttggggcgattgtggctgtgctgccacctcggcggcccgcgcggtgtgggctttgggaacctgactggctgggccggaccgttagcaaatggctatatttggatatcactaacctgtgggtagaatctctgctgaaatgtgcaaacactgctaatggcaaatttcctgcacccggtcccatcgaccgcccaagggctgaggagtgcgggtgcgcggagcgggactggcgggcagctcgcctgccgccccagcgcgggatccactag

SEQ ID NO: 29337 - DNA, 916 bp, Homo sapiens
  SIMILAR (262)..(432): 561254mologous to Homo sapiens Human secreted protein, SEQ ID NO: 7817,accession number G03736,Smith-Waterman Score=102.
tggagggcacagggagcccggcctggccagggcggagcggcgcccagtagggacccattcattgtgccggcgcctcactgggcacggggcccaagctgacggcgtgcacgggagcctgcggagcctgggtgggaagaacaggcccctggagggcacttgaccttaagcctcttttcctccgcagagaggaagcggtgagaggagcccacgtcttcctgtcaccccaatatctccagccgcgcagtccctgaagagtgtaagatgttcgcctgcgccaagctcgccatgcgacccccatctctgatccgagctggatccagagttggcatacagaccaatttcatgcatcagtagttatctcgacccagaggctaagtaggactggaagagggctctaccggtatttaaatggggccccagaatggtgtgtctccagctaatcccaaaggggagttttcagaccagttgcaatcaggcaggaggacatttgattactggttgccaaatttatttgggtgcagggtgcttgcaacagtagggagtgggctggtttctggtggctggtattgggaacagtcttttgggcaagccttatccattgggttatggccagaaaaccctttcgcctgaaagccagcagctggttcctccataatgctatcctggggattttgcccttgccctgaagctgaaggctatgggtctccttttgttttgatggttgctttcttgattttgtttgccgatgtaacagaaattactgcttgacatgttgggcattcatattaattacgggatgtaattctgtgtatcttactgtgactccgaaaactgtagtattggtgtcatgggaatgtacgttattttccaaagttcatttcattaaaggtggaaaactttaaaaaaaaaaaagaaa

SEQ ID NO: 29338 - DNA, 879 bp, Homo sapiens
  SIMILAR (583)..(762): 631254mologous to Homo sapiens ribosomal protein L37,accession number L11567,Smith-Waterman Score=206.
tcaaccgcgtttttgctgctcccttggcttggaatgctcttccctagagacattcgtggctcccttcctcacttcactctggtctttgcccgaataacctctcagtggtgtcttcttcgaccacctgttcagtatacctccctctacacgtacttcactttcggtcctttcatcagctctagtttcttttgtcaacttaaaatcacaatagctcaaaacatatttctttgtcatattttgaaaaggccctgtgaagctgttcttcatgggggaaaatttgcatctgtaaagaatctctgttaacatagctagatctttttcttccacactttcccaatcgggcacttttcctggggccccactggctgcgttcagctctgtgggtgtcagctggtggctcggtgtcgggccttcctgggacgctaatggggcaccttgataggagaggtcagggacattccctgggtgcacatgtgtgcatgcttgtttgcggggttgggagatgaagccatgtgtgaggggaggcccagaggcagcatgaagccagtggaagctgagggcagaagtggtgcgaatcagggtacaatgcgttgctgcaataagtctgctcagagagagccccaccttcagaagtcgacctatggcaaatgtggctacactgccaagcgcaagagaaagtataactggagtaccaaggctaaaagacgaaataccaccagaactggtcaaatgaggcacctgactcagaccttccagcaattcacggatccacttcaggacttctgttttctcaccatgctggccactgaccgccacagcacctttgcttggaggatcctttgagcagtcatgccgctctttctcaagccgcctctccat

SEQ ID NO: 29339 - DNA, 480 bp, Homo sapiens
  SIMILAR (259)..(477): 781254mologous to Homo sapiens ribosomal protein L37,accession number L11567,Smith-Waterman Score=299.
atggatacaattctagcaaagcagaccctgattctcaatacatactatgattggagtaaataccaggttctcctgagtactcaaccctgctcagaaaaggtatccaatatcaagaggctagcaactgcctacctcaggcacaatgaaatactaggttcctgtatgtcagtaattgaaaaagtagcaagcatgcaggaaaagaaagaatccagaggggtcaggacccagcctgaggacccgatggaggaggaggaggagaaaggaagtcagcaagaaaagtcgacctgtggcaaatgtggctatgctgccaagcgcaagaggaagtataactggagtgccaaggctaaaagacaaactaccactggaactggtcaaatgaggcacttaaaaattgtatacagcaaattcgggcatggattctgtgaaagaacaccacctaaacccaagagggcagctgctgcagcatccagttcatcttaa

SEQ ID NO: 29340 - DNA, 643 bp, Homo sapiens
  SIMILAR (41)..(343): 531254mologous to Homo sapiens ribosomal protein L37,accession number L11567,Smith-Waterman Score=216.
  misc_feature (1)...(643): n = a,t,c or g
ctgcggtgcacgcccggatcgacccacgcgtccgagcgagatgaccgaagggaaccgtcatcgatttggaaaagcgtcggcaataagacggcacactgttgtgccagccgctgtggctcttaaggcctacccaccttcaagaagtcgacctgtggcaaatgtggctaccctgccaagcgcaagagaaagtataactggagtgccaaggctaaaagacgataatactttcggaactggtcgaatgaggcacctaaaaattgtataccgcagattcaggcatggattccgtgaaggaacaacacctaaacccaagagggcagctgttgcagcatccagttcatcttaagaattgtcaaccgattaagtcatgccaataaatgctcctggttttaaaaaatacatatctggttttggagtttggattcataatacaagagaagcacagggcaaagacactgcattaacctccaagaactaaggaatgggaggactgggccaggcctgggtgggtgcacacctggtaattcccagctacttcaggaggctgaggcgagagaatcgcttgagcctggggggcagaggttgcagtgagctgagagaacggcgggcggcagacgagacttctctnaaaaaaaaaaaaaag

SEQ ID NO: 29341 - DNA, 779 bp, Homo sapiens
  SIMILAR (424)..(504): 1001254mologous to Homo sapiens survival of motor neuron,accession number AF092925,Smith-Waterman Score=138.
atggacaaagcagaaggggagcagaagcggcaaaaagagaaagggaaaagaacaagaaagagagaaggggagagaagaggagagaagaaaatgaagctggggtgcgtggccatcttcgttcctggatttctgccgccggtccgggattccgccaagtcccagagtggttacggtgctgcccgccgtatttgtgtttcaaaggggccttttgcaggcatcacccctatagaccgtcccacaagtacaaacacatccacccgaagtgttacaccactccaaggagtggacactatccacggcacccacacttcttctcttctctccttgctccctctctccttatctagctgcaagccccgggcggcggaagtcgtcactcttaagaagggacggggccccacgctgcgcacccgcgggtttgctatggcgatgagcagcggcggcagtggtggcggcgtcccggagcaggaggattccgtgctgttccggcgcggcacaggccagcctcgggacagcatcaagtcgatccgctcactggagttgtggtccgcgtttttctacgtcttttcccactccgttccctgcgaaccacatccgcaagctccttcctcgagcagtttgggctccttgatagcgttgagtggaggccctgccgcgacttggcagtagcttattttgttcactcctctctggctggtgtgggggagagcgatgattctgacatttgggatgatacagcactgataaaagcatatgataaagctgtggcttcatttaag

SEQ ID NO: 29342 - DNA, 1685 bp, Homo sapiens
  SIMILAR (1390)..(1082): 731254mologous to Homo sapiens putative open reading frame; duplicate of the functional spinal muscular atrophy gene, cDNA clone BCD514, GenBank Accession Number U18423; it is not known if this copy of t,accession number U21914,Smith-Waterman Score=383.
taaaaaaaaattaaatatttttattatatacttttaaacatatagaagatagaaaaaaacagtacaatgaacagccatgtccaccagttagattctgtaacattttgccacatacgcctcacatacattttgttaaaccatttgaaacattttaagacactctaacacttcattcctaaatgcttaagtatgcaaattaagacagtcttttataaactacaacacccttctcacagctcataaaattaccaataattatccaatatcattcaaaatctaatccacattcaaattttctcaactgcctcaccaccgtgctggcctcccacccccaccccagtcttttacagatggtttttcaaaatagagtccagtaaaatatttcacattgcatttggttattacataacttttaatcaagaagagttacccattccacttccttttttctttcccaacacttgatattttgaagaaatgaggccagttatcttctataacgcttcacattccagatctgtctgatcgtttctttagtggtgtcatttagtgctgctctatgccagcatttctccttaatttaaggaatgtgagcaccttccttctttttgattttgtctgaaacccatataatagccagtatgatagccactcatgtaccatgaaattaacatacttcccaaagcatcagcatcatcaagagaatctggacatatgggaggtggtgggggaattattggtggtccagaaggaaatggaggcagccagcatgatagtaagtggggtggtggtggtggcggtggcggtggtgggccattgaattttagacctggctttcctggtcccagtcttggccctggcatggggggtggtggagggagaaaagagttccatggagcagatttgggcttgatgttatctgatttatttccaggagacctggagttctcactttcatctgttgaaacttggctttcattttcattctcttgagcattctgttctatattattagctacttcacagattggggaaagtagatcggacagattttgctacatatttatttccatttccaggggtagaccacaacacaggtttctctcttaaaatcaaattgaagcaaatgggtagctgggtaaatgcagccgtcttctgaccaaatggcagaacatttgtcccccaacttttccactgttgtaaggaagctgcagtattcttcttttggcttttattcttcttagcaggttttcttttagggtgtggtttttggtttacccgaagtttcacaaatgtcaccattctttagagcatgcttaaatgaagccacagctttatcatatgcttttatcagtgctgtatcatcccaaatgtcagaatcatcgctctctgctttctctgagaggcagtcaagctatcctctttcctctttcccttgctaatttcctgggttttcttcatgtttttctggcgggcaagttctcgttgatttccacctccaaacaaggaccctcctggggcggccgtgtccacatctccggggtgtgttctttaccgcacaaactcgcacctgaggggcaggcacccgtccggcctgaaaagccggaccggaaccacccgcgagctctctctctgccgactgaagcggggatccccgcactgcgcgacccagggggattacgaaa

SEQ ID NO: 29343 - DNA, 2997 bp, Homo sapiens
  SIMILAR (2392)..(2952): 861254mologous to Homo sapiens neuroendocrine-specific protein-like protein 1,accession number AF119297,Smith-Waterman Score=777.
atgaataatacgatggctttcatggataaagtcaacagcatgcaagaacagatggacagtgtaagacaggtggaaattctacgaaagaaccaaaaagaaatactagagatggaaaacatgaggacagaaatgaagaatgtgtttggcggattacttagtgccagtttcccagagcatcctgcttttctctcaaagaaaattggtcaagtggaagagcaaatagataaagagaccaagaacccaaatggggtatcaagtagggaggctaaaactgcattggatgctgatgacagattcactttgctgacagcccagaaaccacctactgagtactctaaggtagaaggcatttatacatattctttgtctccatccaaagtttcaggagatgatgttattgaaaaggattcccctgaatcaccatttgaagtaattattgacaaagcagcatttgacaaagaatttaaagactcatataaggagagcacagatgattttggtagctggtctgtgcacactgataaagaatcatccgaagacatttcagagactaatgacaagctttttccactgagaaataaagaggcaggacgttacccaatgtctgcattgctcagtaggcagttttcacacacaaatgcagcactggaagaggtgtccagatgcgtgaatgatatgcataactttactaacgaaatactgacttgggatctggttccccaagtgaaacaacagaccgataaatcttctgactgcatcacaaaaactacaggacttgacatgagtgaatataattcagaaattccagttgtaaatcttaaaactagcactcatcagaaaactcctgtatgttctattgatgggagcactcccatcactaaatcaacaggtgattgggcagaagcatctctccagcaagaaaatgctattactggaaaacctgtacctgactctttgaattccacaaaagaattcagtatcaaaggtgtgcaaggcaatatgcagaaacaggatgacacacttgcagaattacctggatctccacctgagaaatgtgactctttgggttctggagtggccacagtgaaagtggctttacctgatgaccacctgaaagatgaaatggactggcagagctctgcattgggagaaatcacagaagctgatagttctggtgagtctgatgacacagtaatagaggacatcacagcagatacatcatttgaaaataacaaaattcaggctgaaaaacctgtttccattccaagtgctgttgtaaaaacaggtgaaagagaaatcaaagagattcccagttgtgagagagaagaaaaaacatctaaaaactttgaagaattggtcagtgactctgagctgcatcaagatcagcctgatattcttggaaggagtccagctagtgaggcagcatgttcaaaagtacccgatacgaatgtctccttagaagatgtgagtgaagttgctcctgaaaagcctattactactgagaaccccaaacttccttcaacagtgtctccaaatgtttttaatgagacagaattctcattaaatgtgacaacatctgcctatttggagtcattacatgggaaaaatgttaaacatatagatgattcctccccagaggacctgatagcagcctttacagaaaccagagataaaggaatagtagatagtgaaagaaatgcttttaaagcaatatcagagaagatgacagactttaaaacaactcctcctgtagaagtcttacatgaaaatgagtccggtggttctgaaattaaagacattggaagcaaatacagtgaacaaagcaaagaaacaaatggaagtgagcctctaggtgttttccctacccaaggtactccagtagcatctcttgacttagaacaagaacagctcacaattaaggctcttaaagaattaggtgaaagacaggttgagaagtcaacttctgcacagcgtgacgcagaattgccttctgaagaagtactgaagcaaactttcacatttgctccagaatcttggccacagagatcatatgacatcctagaacgtaatgtcaagaatggatctgatcttgggatttcccagaagcccatcactatcagagaaactactagggtagatgctgtttccagccttagcaagactgaattggtaaaaaagcatgtcctagcaagacttctgacagacttctcagggctgagctttccactggcccataaagcagaaggagggggcccaaagtcagttgggcgtttctgctggcgtggagagcgctaccaggtgcccccggattttgatcgggagtcgcttttgcctttccgtggacaagccttcctccgccagcagatgccccgggcaggaagagaagcggtggtgcacgatctgattttctggagagatgtgaagaagactgggtttgtctttggcaccacgctgatcatgctgctttccctggcagctttcagtgtcatcagtgtggtttcttacctcatcctggctcttctctctgtcaccatcagcttcaggatctacaagtccgtcatccaagctgtacagaagtcagaagaaggccatccattcaaagcctacctggacgtagacattactctgtcctcagaagctttccataattacatgaatgctgccatggtgcacatcaacagggccctgaaactcattattcgtctctttctggtagaagatctggttgactccttgaagctggctgtcttcatgtggctgatgacctatgttggtgctgtttttaacggaatcacccttctaattcttgctgaactgctcattttcagtgtcccgattgtctatgagaagtacaaggatgcacgtgtgctagcgctgagcaggcaagagtcccacactgaagtatcagagaagctccagggcaaaaagcaagaggcaccaggtgtgggccaggtgcaatcacactgcacccatgccaaggcagcagagcctgcatag

SEQ ID NO: 29344 - DNA, 3223 bp, Homo sapiens
  SIMILAR (141)..(500): 901254mologous to Homo sapiens Extended human secreted protein sequence, SEQ ID NO. 229,accession number Y35980,Smith- Waterman Score=524.
cggggaattccgacgaggtcctcggagcaggcggagtaaagggacttgagcgagccagttgccggattattctatttcccctccctctctcccgccccgtatctcttttgacccttgtcccacccttcgctcgcgtagccatggcggagccgtcggcggccactcagtcccattccatctcctcgtcgtccttcggagccgagccgtccgcgcccggcggcggcgggagcccaggagcctgccccgccctggggacgaagagctgcagctcctcctgtgcggattcctttgtttcttcctcttcctctcagcctgtatctctattttcgacctcacaagagggattgagctctctttgctctgatgagccatcttcagaaattatgacttcttcctttctttcatcttctgaaatacataacactggccttacaatactacatggagaaaaaaagccatgtggtaagggagccagcctattttagccaaagaaggaaaagaccacttggatcttctagatatgaaaaagatggaaaagcctcaggggaccagcaacaacgtatcagactcttcagtttctcttgcagcaggagttcattgtgaccgtccttctattccagccagtttcccagagcatcctgcttttctctcaaagaaaattggtcaagtggaagagcaaatagataaagagaccaagaacccaaatggggtatcaagtagggaggctaaaactgcattggatgctgatgacagattcactttgctgacagcccagaaaccacctactgagtactctaaggtagaaggcatttatacatattctttgtctccatccaaagtttcaggagatgatgttattgaaaaggattcccctgaatcaccatttgaagtaattaattgaccaaagcagcatttgacaaagaatttaaagactcatataaggagagccacagatgattttgggtagcctggtcctgtgcacactgataaagaatcatccgaagacatttcagagactaatgacaagctttttcccactgagaaataaagaggcaggacgttacccaatgtctgcattgctcagtaggcagtttttcacacacaaatgcagcactggaagaggtgtccagatgcgtgaatgatatgcataactttactaacgaaatactgacttgggatctggttccccaagtgaaacaacagaccgataaatcttctgactgcatcacaaaaactacaggacttgacatgagtgaatataattcagaaattccagttgtaaatcttaaaactagcactcatcagaaaactcctgtatgttctattgatgggagcactcccatcactaaatcaacaggtgattgggcagaagcatctctccagcaagaaaatgctattactggaaaacctgtacctgactctttgaattccacaaaagaattcagtatcaaaggtgtgcaaggcaatatgcagaaacaggatgacacacttgcagaattacctggatctccacctgagaaatgtgactctttgggttctggagtggccacagtgaaagtggttttacctgatgaccacctgaaagatgaaatggactggcagagctctgcattgggagaaatcacagaagctgatagttctggtgagtctgatgacacagtaatagaggacatcacagcagatacatcatttgaaaataacaaaattcaggctgaaaaacctgtttccattccaagtgctgttgtaaaaacaggtgaaagagaaatcaaagagattcccagttgtgagagagaagaaaaaacatctaaaaactttgaagaattggtcagtgactctgagctgcatcaagatcagcctgatattcttggaaggagtccagctagtgaggcagcatgttcaaaagtacccgatacgaatgtctccttagaagatgtgagtgaagttgctcctgaaaagcctattactactgagaaccccaaacttccttcaacagtgtctccaaatgtttttaatgagacagaattctcattaaatgtgacaacatctgcctatttggagtcattacatgggaaaaatgttaaacatatagatgattcctccccagaggacctgatagcagcctttacagaaaccagagataaaggaatagtagatagtgaaagaaatgcttttaaagcaatatcagagaagatgacagactttaaaacaactcctcctgtagaagtcttacatgaaaatgagtccggtggttctgaaattaaagacattggaagcaaatacagtgaacaaagcaaagaaacaaatggaagtgagcctctaggtgttttccctacccaaggtactccagtagcatctcttgacttagaacaagaacagctcacaattaaggctcttaaagaattaggtgaaagacaggttgagaagtcaacttctgcacagcgtgacgcagaattgccttctgaagaagtactgaagcaaactttcacatttgctccagaatcttgggccacagagatcatatggacatcctaggaacgtaatgttcaaggaatgggtcttgatcttggggatttcccaggaagcccatcactattcaggaggaaactactaggggtaggatgctgtttccagccttaggcaagactgaattgggttaaaaaagcatgtcctagcaagacttctgacagacttctcaggagcagagcgtttaatagacaagaaagaaggaaggaagaagaaaacagctcccctaataatgcgatttttaaaaaaacatatgcacgtatcagaatgggtagataactggcttggttatccgatctgctattatttccctttgccatccaagagacagtttgctgcattatcagctgatgcacatctttctccacctaccaaatggggggccgtgccatctctgcctctcggcttataccagctgctgtgtggaaaatggactgaagagaggcaaaggagaaagcagggagaccagataggcggcatctacaataacccaagagagctagcctggaccagggtggtagcaatggagattgacagaattggtcagactttggatatctttttgaaggtagaatcaagagcatttgctgatggcttctatgagggacagaaaggaatcaaggataactccaaggtttttgatttgagcaaaagaaggaaagaacagaatggccatttattgagattgagaagactgtga

SEQ ID NO: 29345 - DNA, 899 bp, Homo sapiens
  SIMILAR (153)..(899): 611254mologous to Homo sapiens 28-APR-1998 Human transmembrane protein cDNA clone HP02061,accession number Z38319_cd1,Smith-Waterman Score=630.
aaattcccgggtcgacgatttcgtctgtcctcggagcaggcggagtaaaagggacttgatcgagttcagttgccggattattctatttcccctcccatctctcccgccccgtatctcttttcacccttctcccaccctcgctcgcgtacgcattggcggagccgtccggcgtccacatcagtcccattccatctcctcgtcgtccttcggagccgagccgtccgcgcccggcggcggcggggagcccagggagcctgccccgcccctggggaccgaagagctgcagctcctccctgtgcggtgcacgatcctgatttttctggagagatgtgaagaaccactgggcttgtctttgggcaccacgctgatcatgctgctttccctgggcagcttttcagtgtcatcagtggtggtttcttaacctcatcctgggtttttcttcttctgttcaccatcagctttcagggatctaacaaagttccgtcattccaagctgtaacaggaagttcaggaagaagggccatccatttcaaaagcctaactggaacgtagacattactctgtcctcaaaaagcttttccataaataacatgaatgctgccatggtgcacatcaacagggccctgaaactcattattcgcctctttctggtagaagatctggttgactccttgaagctggctgtcttcatgtggctgatgacctatgttggtgctgtttttaacggaatcacccttctaattcttgctgaactgctcattttcagtgtcccgattgtctatgagaagtacaagacccagattgatcactatgttggcatcgcccgagatcagaccaagtcaattgttgaaaagatccaagcaaaactccctggaatcgccaaaaaaaaggcagaataa

SEQ ID NO: 29346 - DNA, 211 bp, Homo sapiens
  SIMILAR (27)..(83): 421254mologous to Homo sapiens Human G-protein receptor HCEGH45,accession number W07600,Smith-Waterman Score=34.
  misc_feature (1)...(211): n = a,t,c or g
aaggcttgaatctgtattacccngaagccctgctgatgaactgtctcattgtgttgagcctgagccatctcaggtgccaggtggagttctagagaccgtcagcaaggttcagaagaagaacccagtcctgttttgaaaactttggaaaggagtgccgctagaaaatgccttccaaaagtctagaagacatttcatcagattcatcaaatca

SEQ ID NO: 29347 - DNA, 3159 bp, Homo sapiens
  SIMILAR (3087)..(2719): 471254mologous to Homo sapiens unnamed protein product,accession number AK000170,Smith-Waterman Score=242.
tcactgtgagttaaaaaattttaaatgctcactggaaggatttctccagctctctgcattagaactggtgtttccatctgaaaaatcagactcagagaaaccttctttttcttcctctttctcttgtttcatatatggcgatgctagagtcaattcaactttacttgtttttgtagagttttctttgttcatcaggagaggaatgggttgcctatttctggacacactaattgcttcagaagcctctccaaagccaggttcctgaagagtcccttgtccccctgcaaccccactttcactgtccctgtcctctgggggggttacagttttaatggtccctatttcatgagccacataaagttgtggggttctagggatctcaactccacttctggaaccacaaaaatcactttcagctttcttgaggagagctgtatttccaaaagtttcatctctcactggaaaaggagctagtatttctctcttatcagctgaagtattgtgactctgttctatcccttttccaaaaaatctcccctcttccagcttagagttggttccagtgataacgggcgccaacttggcttgcaagggagagggtgaagttccagttgcttccttcaggagtttgtctagactagcagtcaaagagttccgtttaacctttggatgaactactgttttgtcaacatgctcattaatgatcttctcaggtcctttgacttcttcctcagtatcaccaaaatctgttttttgaggccatgtcctattttcagaaacacttggttcaagcacttgttttccatgaacttttccaccagagggttgaattgctggtgttgaggtttctgaaagcagtttctgcaagctgtcattaaaagtgtctttgcagtctttagacaaaacattggtttttattatggattcttgaatctcttgttctgagtaatccttttcttccttaaacactggagtaacaatcccttccgtattcttttccacattttcctttgatgactcatttcctggcaactgataagtatactttctaagtggactcaaaggaaatgtgatttcatctggtagcacctggagtatgccctttgaatttaatttctccatttcctctcttgccataactttttttgggcttagaagcacctctgcttcatgggtatttttacctgataatttaatgtcgctgaattccttgtgtttctgcctattaaaaggtgcagaatttttttggcttgtggtggtaatattcttgtcattatccttactgtttgaattagcttctaagtcccaaaactttctcaaattctcaaactgagagggattatagacctgttctgcattgggttcatccattctttcttttagggacataactttaaagttggcatttgattcacgaactagaggtctgtctttctccaatggagcatgtcgttcactcccgacatttgagggaggttgcagtgctggtaaagtaatgtttcttctagaaggcaaactgtctgccacttgtgatctttttataggctcatttttcttattctgaaacagagacactttatctgattgctcagctgaaagatagtatctggatggacctgctatttgtggcttggtctctttagatttatttgaggaataagaattggagagctgggatgcttgatcatcctcatctaagaccactcgtttgggaatggcctgattatattcactctggtctgtagataaactgtccatggatgatacgccctgtgacttcttcacaggctgatatgctttagcagaaggttgttcctggctacatgaagatgtgggtttttcatgagttatcttagcaccagctttctctccttcccaaaaggatattctgtcactcactcttttgtatttctctctctgcacttggttcttgggaacctcaccagcttcttgctggaattggacctcaggcttcttccaaggagagccattgttggcaaccccaggtgttgacttaatattctctggctctaaggaggctttcaggatataggtatttcctactttgctctttctctctgcattcatgttatctttcaaacctggttctttgacaactgttgaagagtcaaaattcacttctgagtgtcctctattttcttcatgagcatgaaacttgggttcttcttcacccaagttgccaatattattagtgttgcatggaacttggttttctgcatcagattccttgagaacactgtaggaatagttactatttgaaggagatgccccattcccttttcctgggctttttgaatcttggctatagtccatatttttactcccttgacttggggtgccatagctttcaaatggttgcaatatacctgggccttcctttggggtgcctttttgggacaaattcatgaatttggatttgatattcacattattatcttggcaactttcagaaaccagcatatctccctctgcttggaatggtgagtcagatctcacaggcttcaattcaattttgctgggtgatagggtctttgagccattttctcttaaagtagtgtcatctgtcaccaagtcaacagcaacctgtgattttgagtctgttttttctttggactctattcctcggggatgttggaggaatgacttattgtcatctgaataagaacttcggttaaaccagtctagaactttaaatatggaatcatcagttgacttctttatctcagtggcatatggaccagaacgtgaagatgtcttagcttttagagccgggagaggagggggcttaccttgctgacggtctctagaactgccacctggcacctgagatggctcaggctcaacacaatgagacagttcatctgcaacatagaaatacttttcatccacagaagatttacctaagatcagctttatgatcatcttcctcgggcttgctggtgctgcatcctcttctggctcttctacaacgccagccagctctggaggaaggaaagcatctttgttgacattattcacccagctttcctttgccccattttctctgtctttactctgctcagctgaacatctctgataattagcagcaactgaatgataactaactaccaggcactgtgctgagttctttgcatgcat

SEQ ID NO: 29348 - DNA, 4371 bp, Homo sapiens
  SIMILAR (148)..(4140): 161254mologous to Streptococcus parasanguinis fimbriae- associated protein Fap1,accession number AF100426,Smith-Waterman Score=186.
atgctcttttcttatttagaaaagtatttctatgttgcagatgaactgtctcattgtgttgagcctgagccatctcaggtgccaggtggcagttctagagaccgtcagcaaggtaagccccctcctctcccggctctaaaagctaagacatcttcacgttctggtccatatgccactgagataaagaagtcaactgatgattccatatttaaagttctagactggtttaaccgaagttcttattcagatgacaataagtcattcctccaacatccccgaggaatagagtccaaagaaaaaacagactcaaaatcacaggttgctgttgacttggtgacagatgacactactttaagagaaaatggctcaaagaccctatcacccagcaaaattgaattgaagcctgtgagatctgactcaccattccaagcagagggagatatgctggtttctgaaagttgccaagataataatgtgaatatcaaatccaaattcatgaatttgtcccaaaaaggcaccccaaaggaaggcccaggtatattgcaaccatttgaaagctatggcaccccaagtcaagggagtaaaaatatggactatagccaagattcaaaaagcccaggaaaagggaatggggcatctccttcaaatagtaactattcctacagtgttctcaaggaatctgatgcagaaaaccaagttccatgcaacactaataatattggcaacttgggtgaagaagaacccaagtttcatgctcatgaagaaaatagaggacactcagaagtgaattttgactcttcaacagttgtcaaagaaccaggtttgaaagataacatgaatgcagagagaaagagcaaagtaggaaatacctatatcctgaaagcctccttagagccagagaatattaagtcaacacctggggttgccaacaatggctctccttggaagaagcctgaggtccaattccagcaagaagctggtgaggttcccaagaaccaagtgcagagagagaaatacaaaagagtgagtgacagaatatccttttgggaaggagagaaagctggtgctaagataactcatgaaaaacccacatcttcatgtagccaggaacaaccttctgctaaagcatatcagcctgtgaagaagtcacagggcgtatcatccatggacagtttatctacagaccagagtgaatataatcaggccattcccaaacgagtggtcttagatgaggatgatcaagcatcccagctctccaattcttattcctcaaataaatctaaagagaccaagccacaaatagcaggtccatccagatactatctttcagctgagcaatcagataaagtgtctctgtttcagaataagaaaaatgagcctataaaaagatcacaagtggcagacagtttgccttctagaagaaacattactttaccagcactgcaacctccctcaaatgtcgggagtgaacgacatgctccattggagaaagacagacctctagttcgtgaatcaaatgccaactttaaagttatgtccctaaaagaaagaatggatgaacccaatgcagaacaggtctataatccctctcagtttgagaatttgagaaagttttgggacttagaagctaattcaaacagtaaggataatgacaagaatattaccaccacaagccaaaaaaattctgcaccttttaataggcagaaacacaaggaattcagcgacattaaattatcaggtaaaaatacccatgaagcagaggtgcttctaagcccaaaaaaagttatggcaagagaggaaatggagaaattaaattcaaagggcatactccaggtgctaccagatgaaatcacatttcctttgagtccacttagaaagtatacttatcagttgccaggaaatgagtcatcaaaggaaaatgtggaaaagaatacggaagggattgttactccagtgtttaaggaagaaaaggattactcagaacaagagattcaagaatccataataaaaaccaatgttttgtctaaagactgcaaagacacttttaatgacagcttgcagaaactgctttcagaaacctcaacaccagcaattcaaccctctggtggaaaagttcatggaaaacaagtgcttgaaccaagtgtttctgaaaataggacatggcctcaaaaaacagattttggtgatactgaggaagaagtcaaaggacctgagaagatcattaatgagcatgttgacaaaacagtagttcatccaaaggttaaacggaactctttgactgctagtctagacaaactcctgaaggaagcaactggaacttcaccctctcccttgcaagccaagttggcgcccgttatcactggaaccaactctaagctggaagaggggagattttttggaaaagggatagaacagagtcacaatacttcagctgataagagagaaatactagctccttttccagtgagagatgaaacttttggaaatacagctctcctcaagaaagctgaaagtggtgagtgccagctaagcacacagaatttgattcaggtggctgcagaagattctcatccattggatccaacttcccagctttccagaaagggttcttttggggatgtggccagccctccccaagatatgctttttccccagggtgctcatcttgttccccaggctagggtacacccttctcaaatggaaatttcggagactgtagagaaagtcattcttccacccagacctgtattgaatgatgtaagtgctgcattacagaagctgtgtggagaagtatggttaagttatccagctggaagggaagtaggtcctggagaagtgaacccagaatttcctgaagcagtacagccagtatgtagccccctaaatcctccaggagtgatatcaccatgggctacgatggacaccatagttccagacaggaaggatttttattcctccaatgtagttcctgataaaactcatgaagttggatcttatttagctgcccaaatgtctccatcagaccagacgcttagctcatttgcttccattgttgctcaatatggcaaaggcctccctcaggaagtggaagaaattgtgagggaaacaattgttcaacccaaatcagagttcctcgaattcagtgctggcttagaaaaactactgaaggaagaaactgaaaccttcccctcaaaatatgaaagtgatacagggaatctttctccatcaaagttaataggtagtacagaggagcccaggcgagccacttctgaatgccatcctgaggaattaaaagaaacagtagaaaaggccgaggctccattaataactgagagtgcttttgatgctggttttgagaaacttcttaaagaaataactgaagctcctccttatcagccccaggtgtcagtgagagaagaaactcacgagaaggagtcctcacagtcagagcagaccaggttcttggggacagtgccccatttttacagggcagcctcacagacctctgaaatgaaggataaaagtaatggtttggaatctcaagtcaaccaatgtgataaaatgttgggaggagacgcacttgtgactgatttattggtagatttttgtggttccagaagtggagttgagatccctagaaccccacaactttatgtggctcatgaaatagggaccattaaaactgtaacccccccagaggacagggacagtgaaagtggggttgcagggggacaagggactcttcaggaacctggctttggagaggcttctgaagcaattagtgtgtccagaaataggcaacccattcctctcctgatgaacaaagaaaactctacaaaaacaagtaaagttgaattgactctagcatcgccatatatgaaacaagagaaagaggaagaaaaagaaggtttctctgagtctgatttttcagatggaaacaccagttctaatgcagagagctggagaaatccttccaagtatgactttggccagatgactcacctgatgccacctaagggcattgcctggccaggttcagaagaagaacccagtcctgttttgaaaactttggaaaggagtgccgctaggaaaatgccttccaaaagtctagaagacatttcatcagattcatcaaattcccaggggtttgaagacagtattcccaatttggaatgtagtcctgactatcccaaggatcttggaatctcagggttagaagggatcttaaaaatcacccattttaacctcccctcaatgcaggaattctctctaaagcctcctcaacaggcggccaacccccatatccgcctgaatgcttccagagaaggcgagtcgaatcctttgttggacagccctgattgtttttcctga

SEQ ID NO: 29349 - DNA, 6450 bp, Homo sapiens
  SIMILAR (5404)..(6435): 851254mologous to Homo sapiens putative p150,accession number U93574,Smith-Waterman Score=1502.
  misc_feature (1)...(6450): n = a,t,c or g
agccatgttaaccatttgttaatttcttctgaacagatcaagcaaaagtagataatcagccagaaaaattagtgcgtagtgctgaagatgtttccacagtgcctacacaacctgataatccattttctcaccctgacaaactcaaaaggatgagcaagtctgttccagcatttctccaagatgagagtgatgacagagaaacagatacagcatcagaaagcagttaccagctcagcagacacaagaagagcccgagctctttaaccaatcttagcagctcctctggcatgacgtccttgtcttctgtgagtggcagtgtgatgagtgtttatagtggagactttggcaatctggaagttaaaggaaatattcagtttgcaattgaatatgtggagtcactgaaggagttgcatgtttttggggccccagtggaaggacttaacagcagcggatggaaaaaaacaggcgtcataccatattgaaagggctaatttgctaccaaacaaaggccaaatgggcaagaagaaaacactcgtagtgaagaaaaccttgaatcctgtgtataacgaaatactgcggtataaaattgaaaaacaaatcttatagacacagaaattgaacctgtccatttggcatcgggatacatttaagcgcaatagtttcctaggggaggtggaacttgatttggaaacatgggactgggataacaaacagaataaacaattgagatggtaccctctgaagcggaaggctaaggcccttcagaggttccaactgaaagccatgggaaatagttctcaaaatcagcatgcatctgattcacctgaaggacttattaaatcacagattctggggctggcagctccctatccggcgaggaaaaacactgagacttcgagagaagccaaaccttcccccaaaggtgttttcagagacgccgtagtagtattagacatagacttgttgaatggttttgaccaaaatgctgatattgatgtggacaacgaagtccagattgaggtggtctcagatggagatgaagaacttgttgggaactggagcaaagctcatcatgctttggtgagtggcagtgtgatgagtgtttatagtggagactttggcaatctggaagttaaaggaaatattcagtttgcaattgaatatgtggagtcactgaaggagttgcatgtttttgtggcccagtgtaaggacttagcagcagcggatgtaaaaaaacagcgttcagaccctgccttgcacagtgcctggtacataactggtgaatggctaaataaacgaaggccaattgagccagtgccaggagaagcagcaacagataaaaagtatttctatgttgcagatgaactgtctcattgtgttgagcctgagccatctcaggtgccaggtggcagttctagagaccgtcagcaaggtaagccccctcctctcccggctctaaaagctaagacatcttcacgttctggtccatatgccactgagataaagaagtcaactgatgattccatatttaaagttctagactggtttaaccgaagttcttattcagatgacaataagtcattcctccaacatccccgaggaatagagtccaaagaaaaaacagactcaaaatcacaggttgctgttgacttggtgacagatgacactactttaagagaaaatggctcaaagaccctatcacccagcaaaattgaattgaagcctgtgagatctgactcaccattccaagcagagggagatatgctggtttctgaaagttgccaagataataatgtgaatatcaaatccaaattcatgaatttgtcccaaaaaggcaccccaaaggaaggcccaggtatattgcaaccatttgaaagctatggcaccccaagtcaagggagtaaaaatatggactatagccaagattcaaaaagcccaggaaaagggaatggggcatctccttcaaatagtaactattcctacagtgttctcaaggaatctgatgcagaaaaccaagttccatgcaacactaataatattggcaacttgggtgaagaagaacccaagtttcatgctcatgaagaaaatagaggacactcagaagtgaattttgactcttcaacagttgtcaaagaaccaggtttgaaagataacatgaatgcagagagaaagagcaaagtaggaaatacctatatcctgaaagcctccttagagccagagaatattaagtcaacacctggggttgccaacaatggctctccttggaagaagcctgaggtccaattccagcaagaagctggtgaggttcccaagaaccaagtgcagagagagaaatacaaaagagtgagtgacagaatatccttttgggaaggagagaaagctggtgctaagataactcatgaaaaacccacatcttcatgtagccaggaacaaccttctgctaaagcatatcagcctgtgaagaagtcacagggtgtatcatccatggacagtttatctacagaccagagtgaatataatcaggccattcccaaacgagtggtcttagatgaggatgatcaagcatcccagctctccaattcttattcctcaaataaatctaaagagaccaagccacaaatagcaggtccatccagatactatctttcagctgagcaatcagataaagtgtctctgtttcagaataagaaaaatgagcctataaaaagatcacaagtggcagacagtttgccttctagaagaaacattactttaccagcactgcaacctccctcaaatgtcgggagtgaacgacatgctccattggagaaagacagacctctagttcgtgaatcaaatgccaactttaaagttatgtccctaaaagaaagaatggatgaacccaatgcagaacaggtctataatccctctcagtttgagaatttgagaaagttttgggacttagaagctaattcaaacagtaaggataatgacaagaatattaccaccacaagccaaaaaaattctgcaccttttaataggcagaaacacaaggaattcagcgacattaaattatcaggtaaaaatacccatgaagcagaggtgcttctaagcccaaaaaaagttatggcaagagaggaaatggagaaattaaattcaaagggcatactccaggtgctaccagatgaaatcacatttcctttgagtccacttagaaagtatacttatcagttgccaggaaatgagtcatcaaaggaaaatgtggaaaagaatacggaagggattgttactccagtgtttaaggaagaaaaggattactcagaacaagagattcaagaatccataataaaaaccaatgttttntctaaagactgcaaagacacttttaatgacagcttgcagaaactgctttcagaaacctcaacaccagcaattcaaccctctggtggaaaagttcatggaaaacaagtgcttgaaccaagtgtttctgaaaataggacatggcctcaaaaaacagattttgctgatactgaggaagaagtcaaaggacctgagaagatcattaatgagcatgttgacaaaacagtagttcatccaaaggttaaacggaactctttgactgctagtctagacaaactcctgaaggaagcaactggaacttcaccctctcccttgcaagccaagttggcgcctgttatcactggaaccaactctaagctggaagaggggagattttttggaaaagggatagaacagagtcacaatacttcagctgataagagagaaatactagctccttttccagtgagagatgaaacttttggaaatacagctctcctcaagaaagctgaaagtggtgagtgccagctaagcacacagaatttgattcagatggctgcagaagattctcatccattggatccaacttcccagctttccagaaagggttcttttggggatgtggccagccctccccaagatatgctttttccccaggatgctcatcttgttccccaggctagggtacacccttctcaaacggaaatttcggagactgtagagaaagtcattcttccacccagacctgtattgaatgatgtaagtgctgcattacagaagctgtgtggagaagtatggttaagttatccagctggaagggaagtaggtcctggagaagtgaacccagaatttcctgaagcagtacagccagtatgtagccccctaaatcctccaggagtgatatcaccatgggctacgatggacaccatagttccagacaggaaggatttttattcctccaatgtagttcctgataaaactcatgaagttggatcttatttagctgcccaaatgtctccatcagaccagacgcttagctcatttgcttccattgttgctcaatatggcaaaggcctccctcaggaagtggaagaaattgtgagggaaacaattgttcaacccaaatcagagttcctcgaattcagtgctggcttagaaaaactactgaaggaagaaactgaaaccttcccctcaaaatatgaaagtgatacagggaatctttctccatcaaagttaataggtagtacagaggagcccaggcgagccacttctgaatgccatcctgaggaattaaaagaaacagtagaaaaggccgaggctccgttaataactgagagtgcttttgatgctggttttgagaaacttcttaaagaaataactgaagctcctccttatcagccccaggtgtcagtgagagaagaaactcacgagaaggagtcctcacagtcagagcagaccaggttcttggggacagtgccccatttttacagggcagcctcacagacctctgaaatgaaggataaaagtaatggttttggaatctcaagtcaaccaatgtgataaaatgttgggaggagacgcacttgtgactgatttattggtagatttttgtggttccagaagtggagttgagatccctagaaccccacaactttatgtggctcatgaaatagggaccattaaaactgtaacccccccagaggacagggacagtgaaagtggggttgcagggggacaagggactcttcaggaacctggctttggagaggcttctgaagcnnttaagtatgactttggccagatgactcacctgatgccacctaagggcattgcctggccagatcaagcaaaagtagataatcagccagaagaattagtgcgtagtgctgaagatgatacaagtaggaaaagtcgccagaagacaagagctgtagggaaaaccaccaaccctatcttcaaccacactatgggtgtatgatgggttcaggcctgaagatctgaatggaagcctgtgtagagcttactgtctgggaccattacaaattaaccaaccaatttttgggaggtcttcgtattggctttggaacagaaatacaaaccaccatcagagaatactataaacacttctatgcaaacaaactagaaaatctagaagaaatggataaattcctggacacacacaccctcccaagactaaaccaggaagacgttgaatccctgaatagaccaataacaagttcagaaatggaggcagcaattaatagcctagcaaccaaaaaaagtccaggaccagatggattcacagccgaattctaccggaggtacaaagaggagctggtaccattcgttctgaaactatcccaaacaacagaaaaagagggactcctccctaactcattttgtggggccaacatcaacctgataccaaaccctggcagagacaacacaagaaaagaaaatttcagaccaatatccctgatgaacattgataccaacattctcaataaaatactggcaaacagaatccagcagcacatcaaaaagcttatcgactatgatcaagtcagcttcatccctgggatgaaaggctggtgcaacatatgcaaatcaataaacgtaatccatcacgtaaacagaaccaatgacaaaaaccacatgattatctcaatagatgcagaaaaggccttcgaaaaaattcaacagcccttcttgctaaaaaccctcaataaactaggtattgatggaacgtatctcaaaataataaaagctatttataacaaacccacagccaatatcatactgaatgggcaaaagctggaagcattctctttgaaaactggcacaagacaaggatgccctctctcaccactcctattcaacatagtattggaagttctggctaggacaatcaggcaagagaaaaaaaaaaatggtattcaaataggaagagaggaggtcaaattgtctctttttgcagatgacatgattgtatatttagaaaacctcatcgtctcagcccaaaatctccttaagctgataagcaacttcagcaaagtctcaggatacaaaatcaatgtgcaaaaatcacaagcattcctatacaccaataataaagagccaaatcatgagtga

SEQ ID NO: 29350 - DNA, 1453 bp, Homo sapiens
  SIMILAR (401)..(1429): 871254mologous to Homo sapiens putative p150,accession number U93572,Smith-Waterman Score=1488.
gatattcgaacccatcgcaaggaagctaaaaaccttgaaaaaagattagacgaatggctaactagaataaacagtgtagagaagaccttaaatgacctgatgcagctgaaaaccatggcacgagaacttcatgatgcatgcacaagcttcaatagccaattcgatcaagtggaagaaaggatcaacaaaattgatagactgctagcaagactaataaagaagaaaagagagaataatcaaatagatgcaataaaaagtgataaaggggatatcaccactgatcccacagaaatacaaactaccgtcagagaatactataaacacctctatgcaaataaactagaaaatctagaagaaatggataaattgctggacacatacaccctcccaagactaaaccaggaagaagttgaatcccttcagtagactaataacaggctctgaaattgaggcagtaattaatagcctatcaaccaaaaaaaagtccaggaccagatggattcgacgagccgaattctaccagaggtacaaagaggagctggtaccattccttctgaaactattccaatcaatagaaaaagagagaatcctacctaactcattttatgaggccagcatcatcctgataccaaatcctggcagagacagaacaaaaaaagagaattttagaccaatatccctgatgaacatcaatgcaaaaatcctcagtaaaatactggcaaaccgaatccagcagctcatcaaaaagcttatccaccatgatcaagttggcttcatccctgggatgcaaggctggttcaacatatgcaaatcaataaacgtaatccatcacataaacagaaccaatgacaaacaccacatgattatctcaatagatgcagaaaaggccttcaacaaaattcaacagcccttcatgctaaaaactctcaataaactaggtattgatggaacgtatctcaaaataatgagagctatttatggcaaacccacagccaatatcatactgaatgggcaaaaactggaagcattccctttgaaaactggcacaagacagggatgccctctctcaccactcctattcaacatagtgttggaatttctggccagggcaatcaggcaggagaaagaaataaagggtattcaattaggaaaagaggaagtcaaattgtccctgtttgcagatgacatgattgtatatttagaaaaccccatcgtctcagcccaaaatctccttgagctgataagcaacttcagccaagtctcaggatacaaaatcaatgtgcaaaaatcacaagcattcctatacatcaataacagacaaacagagagccaaatcatgagtgaactcccattcacaaagagaataaaatacctaggaatccaacttacaagggatgtgaaggaccttttcaaggagaactacgaaccttacccccaactccgtgctctctga

SEQ ID NO: 29351 - DNA, 3361 bp, Homo sapiens
  SIMILAR (2783)..(3070): 1001254mologous to Homo sapiens KIAA1597 protein,accession number AB046817,Smith-Waterman Score=505.
atgctcttttcttatttagaaaagtatttctatgttgcagatgaactgtctcattgtgttgagcctgagccatctcaggtgccaggtggcagttctagagaccgtcagcaaggtaagccccctcctctcccggctctaaaagctaagacatcttcacgttctggtccatatgccactgagataaagaagtcaactgatgattccatatttaaagttctagactggtttaaccgaagttcttattcagatgacaataagtcattcctccaacatccccgaggaatagagtccaaagaaaaaacagactcaaaatcacaggttgctgttgacttggtgacagatgacactactttaagagaaaatggctcaaagaccctatcacccagcaaaattgaattgaagcctgtgagatctgactcaccattccaagcagagggagatatgctggtttctgaaagttgccaagataataatgtgaatatcaaatccaaattcatgaatttgtcccaaaaaggcaccccaaaggaaggcccaggtatattgcaaccatttgaaagctatggcaccccaagtcaagggagtaaaaatatggactatagccaagattcaaaaagcccaggaaaagggaatggggcatctccttcaaatagtaactattcctacagtgttctcaaggaatctgatgcagaaaaccaagttccatgcaacactaataatattggcaacttgggtgaagaagaacccaagtttcatgctcatgaagaaaatagaggacactcagaagtgaattttgactcttcaacagttgtcaaagaaccaggtttgaaagataacatgaatgcagagagaaagagcaaagtaggaaatacctataagccacaaggtctggtgccaagttatttccatggttcgatacacagcctggtttccttaattccatgtggagccatttttcaggccagcagtgaaggagacatcaggaggtcacagaagagcactggagaattacatttgcctgaaaaaattaaggatgaccagcagctgaagaatatgagtggccaatggttttatgaagccaaggcaaaaaggcacagggacaaaatccatggcgcagatatcatcagagcatctatgagaaagaagaggccccagatagcagctgagcagagtaaagacagagaaaatggggcaaaggaaagctgggtgaataatgtcaacaaagatgctttccttcctccagagctggctggcgttgtagaagagccagaagaggatgcagcaccagcaagcccgagttccagtgtggtaaatccagcttccagtgtgattgatatgtcccaggaaaacacaaggaaaccaaatgtgtctccagagaagcccagccgcccaaaagcgtttgatcaggtttgtggctcaattgatgtaagtcagcctgctatggaattttatcatttttatatactgttaagaggaaatgctaaacatttcaatctcttcaaaatcaacttgaagaagattccacaagcattaaagagtgatgaattgtcagagtcaaaagaaaagtcaactgtcgcagatacttcaatccaaaagttagagaaatcaaagcagactttgccaggcctttcaaatgggtcccaaatcaaggctccaatccccaaagccaggaagatgatctacaaatcaactgatttaaacaaagatgataaccagtcttttcctagacaaaggacagactccctgaaagcgagaggggctccgagagggatcctcaagcgcaactccagttccagtagcacagactcagaaacccttcgttataatcacaactttgaacccaaaagcaaaattgtgtcacctggcctaaccatccatgagagaatttctgagaaggagcattctttagaagacaactcttccccaaactccctggagccattaaagcatgtgagattctctgcagtgaaggatgagcttccacagagtcctgggctaatccatggtcgggaagtaggagaatttagtgttttagaatctgacagattgaaaaatggaatggaagatgcaggggacacagaaggagtttcagagtgaccctaaagccttcttcaatacagaaaagccttcgctttttcatcaatcaacctcaagcccatatgtatcaaaaagtgaaacacatcagccaatgacttctggttcttttccaattaatgggctgcattctcattcagaagttttaactgcaagaccacagtctatggagaattcaccaaccatcaatgaacccaaagataaatcatcagaattaacaaggcttgaatctgtattacccagaagccctgctgatacaagtaggaaaagtcgccagaagacaagagctgtagggaaaaccaccaaccctatcttcaaccacactatggtgtatgatgggttcaggcctgaagatctgatggaagcctgtgtagagcttactgtctgggaccattacaaattaaccaaccaatttttgggaggtcttcgtattggctttggaacagcaaacagtctttttcgacgcatcttgaatgtgacaaaggctcgcatagctgctggcttaccaatggcagggataccttttcttacaacagacttaacttacagatgttttgtaagttttcctttgaatacaggtgatttggattgtgaaacctgtaccataacacggagtggactgactggtcttgttattggtggtctataccctgttttcttggctatacctgtaaatggtggtctagcagccagacatttgcctgaaaaaattaaggatgaccagcagctgaagaatatgagtggccaatggttttatgaagccaaggcaaaaaggcacagggacaaaatccatggcgcagatatcatcagagcatctatgagaaagaagaggccccagatagcagctgagcagagtaaagacagagaaaatggggcaaaggaaagctgggtgaataatgtcaacaaagatgctttccttcctccagagctggctggcgttgtagaagagccagaagaagatgcagcaccagcaagcccgagagtgcaaagtgaaaagacagcaggaagagctaactacacttctacttgctctcatttacgcgcagcgctgctggtagctagcgtgtcaccgcgtcgtgcttctcctgacaccgggacatttacttcaccccctcccccggaataccagtaccttatgctctcctcccagcagcctggttgcttgaccattaggctccatagtgccaagaagtctgtaattgcagtttctaaacttgcacaaatagaaagacttattttcacgaaggtgtacaagaaggaaaattcctag

SEQ ID NO: 29352 - DNA, 687 bp, Homo sapiens
  SIMILAR (274)..(8): 371254mologous to Mus musculus msg1,accession number X71629,Smith-Waterman Score=115.
atggaccggcccctgtcgtcgtcggcggaggcggaggaggaactggagtggcaagtggcgagtcgcaggaggaaggcctgggccaagtgccgcagctcctggcaagcgtcggagacggaggatctgtccacagaagcgacgacgcaggacgaggaggaggacgagggggaggaccttcccggcgcgcagctgccggcagcggggggaagagtgctcctgggtggtaacgtgctgtcccctctctctacccccaggaaacgtgcccaacgagaagatcgcgatatggctcaaggactgccggtgagtgctccctggtccgcccgcgtcccgggggagatccgtgcggacgggacgccggagcagagccactcgggccgcgtccctgtgggtcccgcgaccgttgacaggtccagaaatgctatccaggagccaaggcctggaatcaggagcccaaagagcccacctagtgctctaccccattgtgaccaggctgtttccatgccacaagacaaagtctcctttactcttctgtttccatttctcaagcagaatgagtctctcaccacagccatgacagctgggaatgtgctagtcacacctgaagccagcacatctctgagttacacccaaggcccacagcgagtactgcctatcactgctgattattcaggcccaagggctctttaa

SEQ ID NO: 29353 - DNA, 1714 bp, Homo sapiens
  SIMILAR (1012)..(1194): 1001254mologous to Homo sapiens Human secreted protein, SEQ ID NO: 6760,accession number G02679,Smith-Waterman Score=297.
tttcgtgaggaggaactggagtggcaagtggcgagtcgcaggaggaaggcctgggccaagtgccgcagctcctggcaagcgtcggagacggaggatctgtccacagaagcgacgacccaggacgaggaggaggacgaggaggaggacctccccggcgcgcagctgccggcagcggggggaagaggaaacgtgcccaacgagaagatcgcgatatggctcaaggactgccgtacacctttgggagcctcactggatgaacaaagcagtagtacactcaagggtgtgcttgtgagaaatggaggaagttttgaagatgatttgtcattgggagctgaagccaaccacctccatgaaagtgatgctcaaattgaaaactgcaataatatcttggccaaagagagaagattacagtttcatcagaaagggagaagtatgaattccactggatctgggaaaagtagtgggacagtttcaagtgtttcagaattgttggaactttatgaggaagatcctgaagaaattctttataatcttggatttggacgtgatgaaccagatattgcttctaaaattccttccagattttttaattcatcatcctttgccaaagggatagatattaaagtatttttgagtgctcagatgcaacggatggaagtagaaaacccaaattatgctttaacaagccgttttcgtcaaattgaagtgcttactactgtggccaatgcgttttcttctttatattctcaagtctccgggacgcccctgcagagaattggaagtatgtcctcagtgacctctaacaaggagacagacccacctccacctttaactcgaagtaacactgcaaatcgtttaatgaaaacactctcaaaactgaatttatgtgttgataaaacagagaaaggagaaagtagtagtccttctccatcagctgaaaaaggaaagattctaaatgtttcagtgattgaagaaagtggcaataaaaacgatcaaaagtctcaaaaaattatgaagaagaaagagtcatcttctatgttggctacagttaaagaagaagtctctggtagttcagcagctgttacggagaatgctgatagtgatagaatttctgatgaagcaaatagtaattttaaccaaggaactgaaaatgaacaaagtaaagaaactcaaagtcatgagagtaaactgggtgaggaatctggtattgtagaatccaaattagatagtgatttcaacatatccagccacagtgagctggaaaatagcagtgagctgaaaagtgtccatatatccacacctgaaaaagagccttgtgcaccactgacaataccatccataagaaatataatgacacagcagaaggactccttcgataatggaagaggttcaaagtacggagggagaagctcctcatgttccagccacttaccagctaggtcttacgaagtcgaaaagagatcatctgttacgtactgcaagtcagcattccgatagcagtggttttgctgaagattctacagactgcctatcccttaatcatcttcaggttcaggaatccttgcaggctatggggagtagtgctgatagttgtgacagtgaaacaacaattacgtcacttggtgaagaccttgccccaccaaccacacaagacccgccctattttaatgaatcacaagaagaatcttttgtcccctttttcaaaagggactag

SEQ ID NO: 29354 - DNA, 2772 bp, Homo sapiens
  SIMILAR (1)..(2769): 1001254mologous to Homo sapiens nuclear transport receptor,accession number AJ133769,Smith-Waterman Score=4805.
atggaaggagcaaagccgacattgcagctcgtgtaccaggcagtgcaggcgctttaccacgacccagatcccagcggaaaggagcgcgcctctttttggcttggggagctgcagcgttcggttcatgcatgggagatctcagaccagttgttacagatccggcaggatgtggagtcatgctattttgctgcacagaccatgaaaatgaagattcagacctcattttatgagctccccacagactctcatgcctctttacgggactcattgctaacccatatccagaacttgaaagacttgtcacctgttattgtaacgcagctggctttagcaatagcagatcttgccctacagatgccttcctggaagggatgtgtgcaaacactggtggaaaaatacagcaatgatgtgacttctttgccttttttgctggagatccttacagtgttacctgaagaagtacatagtcgttccttacgaattggagctaatcggcgcacagaaattatagaagatttggccttctactctagtacagtagtatctctattgatgacctgtgtagaaaaagcaggaacagatgagaaaatgcttatgaaggtttttcgctgtttgggaagttggtttaacttgggagttttggacagtaacttcatggctaacaataaattactagcactcctttttgaggttttgcaacaggataagacctcgtctaacctacatgaagctgcttcggactgtgtatgctcagctctctatgccattgagaatgtggagactaacttgccattagccatgcaactttttcagggagtgctgacattggagactgcctatcatatggccgtggcacgtgaagatttagacaaagttctgaattactgccgtattttcactgaactatgtgaaacttttcttgaaaaaattgtttgtactccaggccaaggtcttggggaccttcgaactctggagctgctgcttatctgtgcaggccatcctcaatatgaggtagtagaaatttcatttaacttttggtaccgactgggggaacatttgtacaaaactaacgatgaagttattcatggcatcttcaaagcttacattcagaggctgcttcacgccttggctcgacactgccagctggaaccagaccatgagggggttcctgaggagactgatgactttggggagtttcgcatgagggtatcagacctggtaaaggacttgattttcttgatagggtctatggagtgttttgctcagttatattctactctgaaagaaggcaacccaccctgggaggtgacagaagcggttctctttatcatggctgctatagcaaagagtgttgatccggaaaacaatccaacacttgtggaagtcctagaaggagttgtccgcctcccggagaccgtacatacggctgtgcgatacaccagcattgaattggttggagagatgagtgaagtcgttgatcgaaatcctcagttccttgaccctgtgttgggctatttgatgaaaggcctgtgtgaaaagcccctggcttctgctgcagccaaagccattcataacatttgctctgtctgccgagatcacatggctcagcactttaatggactcctggagattgcccgctccctcgattccttcctgttgtctccagaagctgctgtgggcttgctaaaagggacagcacttgtcctagcccgattacctttggataagattaccgaatgtcttagtgaactatgttctgttcaggttatggcattgaaaaagctgttgtctcaagagcccagcaatggcatatcctcagatcccacagtgttcttagatcgccttgcagtgatatttaggcataccaatcccattgtggaaaatggacagactcatccgtgtcagaaagtcatacaggaaatatggccagttttatccgagactctaaataagcaccgagctgataatcggattgtagagcgttgttgcaggtgcctgcgctttgctgttcgctgtgtaggcaaaggatctgcagcactgctgcagccactagtcacacagatggtgaatgtgtaccacgtacatcagcattcctgcttcctgtaccttggcagtatccttgtggatgaatatggcatggaagaaggctgtcggcagggactgctagacatgctccaggcactgtgcatccccacctttcagctcctagaacagcagaatggtctccagaatcaccctgacactgtagatgacctgttccggctagccaccaggtttattcagcgtagccctgtcaccttgctgcggagccaagtggtcatccctatcttacagtgggccattgcctctactaccctggaccaccgggatgccaattgtagtgtcatgaggtttctacgagacctcattcatacaggggtagccaatgatcatgaagaagactttgaattacggaaagaactgattggacaggtgatgaaccagcttggacagcagcttgtcagccagctgctgcacacctgctgcttttgcctccccccctataccctaccagatgtggctgaagtgctctgggagatcatgcaggttgacagaccgactttttgtcgatggttagaaaattccttaaaaggtttgccaaaggaaacaaccgtgggagctgtcacagtgacacacaaacaacttacagacttccacaagcaagtcactagtgctgaggaatgtaaacaagtttgctgggccttgcgagacttcaccaggttgtttcgatag

SEQ ID NO: 29355 - DNA, 3062 bp, Homo sapiens
  SIMILAR (134)..(466): 851254mologous to Homo sapiens nuclear transport receptor,accession number AJ133769,Smith-Waterman Score=482.
tgtaccgatctcgtgatggcgccagtcagggagcggccgtggcccagacagtgatgaagcgcgaaggcggagcaaccgaggaatcctccggagaagaatcagagccgtcgctaccgccactaccgccaccaccatggaaggagcaaagccgacattgcagctcgtgtaccaggcagtgcaggcgctttaccacgacccagatcccagcggaaaggagcgcgcctctttttggcttggggagctgcagcgttcggttcatgcatgggagatctcagaccagttgttacagatccggcaggatggggagtcatgcttttttgctgcacagaccatgaaaatgaagattcatacctcattttatgaactccctatagactctgatgcctttttacgggactcattggtttcccataatcagaacttggaggacttgttctctgatattgtaacgcaacttggctttagcaatagcagatcttgccctacagatgccttcctggaagggatgtgtgcaaacactggtggaaaaatacagcaatgatgtgacttctttgccttttttgctggagatccttacagtgttacctgaagaagtacatagtcgttccttacgaattggagctaatcggcgcacagaaattatagaagatttggccttctactctagtacagtagtatctctattgatgacctgtgtagaaaaagcaggaacagatgagaaaatgcttatgaaggtttttcgctgtttgggaagttggtttaacttgggagttttggacagtaacttcatggctaacaataaattactagcactcctttttgaggttttgcaacaggataagacctcgtctaacctacatgaagctgcttcggactgtgtatgctcagctctctatgccattgagaatgtggagactaacttgccattagccatgcaactttttcagggagtgctgacattggagactgcctatcatatggccgtggcacgtgaagatttagacaaagttctgaattactgccgtattttcactgaactatgtgaaacttttcttgaaaaaattgtttgtactccaggccaaggtcttggggaccttcgaactctggagctgctgcttatctgtgcaggccatcctcaatatgaggtagtagaaatttcatttaacttttggtaccgactgggggaacatttgtacaaaactaacgatgaagttattcatggcatcttcaaagcttacattcagaggctgcttcacgccttggctcgacactgccagctggaaccagaccatgagggggttcctgaggagactgatgactttggggagtttcgcatgagggtatcagacctggtaaaggacttgattttcttgatagggtctatggagtgttttgctcagttatattctactctgaaagaaggcaacccaccctgggaggtgacagaagcggttctctttatcatggctgctatagcaaagagtgttgatccaaagaagccctttagcaatgctgcgtgtcatcacagcctgttatttggccagaatataacctctgaaatcagtaactgtgagtacttaccgcctgtactcagggaaaacaatccaacacttgtggaagtcctagaaggagttgtccgcctcccggagaccgtacatacggctgtgcgatacaccagcattgaattggttggagagatgagtgaagtcgttgatcgaaatcctcagttccttgaccctgtgttgggctatttgatgaaaggcctgtgtgaaaagcccctggcttctgctgcagccaaagccattcataacatttgctctgtctgccgagatcacatggctcagcactttaatggactcctggagattgcccgctccctcgattccttcctgttgtctccagaagctgctgtgggcttgctaaaagggacagcacttgtcctagcccgattacctttggataagattaccgaatgtcttagtgaactatgttctgttcaggttatggcattgaaaaagctgttgtctcaagagcccagcaatggcatatcctcagatcccacagtgttcttagatcgccttgcagtgatatttaggcataccaatcccattgtggaaaatggacagactcatccgtgtcagaaagtcatacaggaaatatggccagttttatccgagactctaaataagcaccgagctgataatcggattgtagagcgttgttgcaggtgcctgcgctttgctgttcgctgtgtaggcaaaggatctgcagcactgctgcagccactagtcacacagatggtgaatgtgtaccacgtacatcagcattcctgcttcctgtaccttggcagtatccttgtggatgaatatggcatggaagaaggctgtcggcagggactgctagacatgctccaggcactgtgcatccccacctttcagctcctagaacagcagaatggtctccagaatcaccctgacactgtagatgacctgttccggctagccaccaggtttattcagcgtagccctgtcaccttgctgcggagccaagtggtcatccctatcttacagtgggccattgcctctactaccctggaccaccgggatgccaattgtagtgtcatgaggtttctacgagacctcattcatacaggggtagccaatgatcatgaagaagactttgaattacggaaagaactgattggacaggtgatgaaccagcttggacagcagcttgtcagccagctgctgcacacctgctgcttttgcctccccccctataccctaccagatgtggctgaagtgctctgggagatcatgcaggttgacagaccgactttttgtcgatggttagaaaattccttaaaaggtttgccaaaggaaacaaccgtgggagccgtcacagtgacacacaaacaacttacagacttccacaagcaagtcactagtgctgaggaatgtaaacaagtttgctgggccttgcgagacttcacccaggttgtttcgatagctcacactccctgcacttgtgccctgtcacccaggaatgtcttttttaattag

SEQ ID NO: 29356 - DNA, 1467 bp, Homo sapiens
  SIMILAR (1054)..(1464): 881254mologous to Mus musculus TPI,accession number AC002397,Smith-Waterman Score=624.
aatacagtttggggttggatttggcggtatgaagacaaaacggaaaagcacggcccaagaagcaacggcaaagggagaacttaaacaagattagattgatgccacaatcgaagagtataagacctacaaatcagattctgccgggtggggaaagggccagttcgcgaccgatcaggtgcgactagtttcccaaaagcggcaaagatgtagcttcgcagccccaccccacgacagcagctcctccccaaggaggacctcacgaggtcaactgccgggctcaggttctcccccggagcctatgttcccgcccgccccggccgtgcggcacagaactgcctctctgggccccttaccgaacgctggagcttcccaagccaaaaagagacgcgctcctttccgctgggatctgggtcgtggtaaagcgcctgcactgcctggtacacgagctgcaatgtcggctttgctccttccatggtggtggcggtagtggcggtagcgacggctctgattcttctccggaggattcctcggttgctccgccttcgcgcttcatcactgtctgggccacggccgctccctgactggcgccatctcctcctctttggccgttaccagggcagaaggctctccgtggaagttgccccctcggaaacagctattagattctggcgctcccgtcttcagtcgctgacttgccctcagaagcctatcttgggaggccacacaccagtgtacctaaggttcgtttacccggaccggaagcgacagcaccgatacctttggcacacttccgcctggaagttcttcgtggggaggaactggaagatgaacgggcggaagaaatgtctgggggagctcatcggcactcagaacgcggccactgtgcctgccgacaccaaggtgatttgtgctctcgccactgcgtataacgagttggcccggcagaagctagctcccaagattgctgtggctccgcagaactgctacaaagtgactaatggggcctttactggggagatcagccctggcatggtcaaagacttaggagtcacaaaagtggcccatgctctggcagagagactcggagtaatcgcctgcattggggagaagctagatgaaagggaagctggcatcactgagaaggttgtttttgagcagacaaaggtcatcgcagataatgtgaaggactggagcaaggtcatcttggcctatgatcccgtgtgggccactggtactggcaagactgcaacaccccaacaggcccaggaggtacacaagaagctccgaggatggcttaagtccaacatctctgatgcagtggctcagagcactggtatcatttatggaggctctgtgaccaaggcaacctgcaaggagctggccagccagcctgacgtggctgccttcctcatgagtggtgtttccctcaagcccgaattcgtagacatcatcaatgccaaacaatga

SEQ ID NO: 29357 - DNA, 1245 bp, Homo sapiens
  SIMILAR (280)..(930): 461254mologous to Pan troglodytes triose-phosphate isomerase,accession number M57946,Smith-Waterman Score=380.
  misc_feature (1)...(1245): n = a,t,c or g
ggaattcccgggtcgaggaaattggagccccagctgttaaaagagcagagggcagggtgtttgtcttggcctctcaggggtatctggaaggctcttcgagttgagtgcagacccagcctgggctggaaaatggacaaaggtcatcttgctggggtgaaaagggggagagcagaaccaagaagaagagggtgagggctggggggctccagggcactggttaggaattgtggggaatgaaggctttctttagtctcatcccactgcggtaccatcttgtcctcagaggtggtttgtgctccccctactgcctatatcgacttcgcccggcagaagctagatcccaagattgctgtggctgcgcagaactgctacaaagtgactaatgtggcttttactggggagatcagccctggcatgatcaaagactgcggaccacgtgggtggtcctggggcactcagagagaaggcatgtctttggggagtcagatgagctgattgggcagaaagtggcccatgctctggcagagggacttcgggagtaattcgcctgcattgggggagaagctagatgaaaggggaagctggcattcactgaggaaggttgtttttcgagcagacaaaggtcatcgcagataacgtgaaggacctggagcaaggtcgtccttggcctatgagcctttgttggccattggtacttgcaagacttcaacaccccaacaggcccaggaagtacacgagaagcttccgaggatggctgaagtccaacgtctctgatgcggtggctcagagcacccgtatcatttatggagggctctgtgactggggcaacctgcaaggagctggccagccagccttgatgtggatggctttccttgtgggtggtgcttccctcaagcccgaattcgtgggacattcatcaatgccaaacaatgagccccatccatctttcccttaccctttcctggccaagccagggaattaagcagcccagaagccccagtaacttgccctttccctgcatatgcttctgatggtgtcatctgctccttcctgtggcctcatccaaactgtatcttcctttactgtttatatcttcaccctgtaatggttgggaccagggncaatcccttctccacttactataatggttggaactaaacgtcaccaaggtggcttctccttggctgagagatggaaggcgtggtgggatttgctcctgggttccctaggccctagtgagggcag

SEQ ID NO: 29358 - DNA, 1040 bp, Homo sapiens
  SIMILAR (691)..(933): 931254mologous to Homo sapiens Human secreted protein nf87_1,accession number Y06407,Smith-Waterman Score=354.
atggccacccttgatgttaatgagcagggttgtcttccagggattgcatcaggaggccacctgacctctgacttcctgttggcttcagctaagaaggaaggaggaacactgagaggggacaggaggaggcaggagcatgctgtcagggagaagtgtcaccctgctgcagtaggagaaggagaatgtggaatggagaggagagggggcagagggcaaagggctgagcggcagggagccccttcccagtggtgtgaagggaatgggtcagagaagacaatggagaagatcagggagagatcagcgcttcccccgtcagccctgctcacccccaccacaacccttcctcagtcaccgaagcttcttggcatggaccctcaagtcagctgtgggccaaaggcagctgagaagtggagagccctgcttggttgtcagatatccaaagtggcaccaggaggcctggagggtcttcggcctgccccaggctgcagagtatcccctgtaaacccaggactgagatcaggcagagtaggcgcgtccctactggatggagggggaagtaacaccccaagaacgctgtcatttcctgggccaagttgggacccggacggcctcaccatgatgaaacggcgagctgctgctgcagtgggaggagccctggcagtgggggctgtgcccgtggtgctcagtgccatgggcttcactggggcaggaatcgccgcgtcctccatagcagccaagatgatgtccgcagcagccattgccaacgggggtggtgtttctgcggggagcctggtggctactctgcagtccgtgggggcagctggactctccacatcatccaacatcctcctggcctctgttgggtcagtgttgggggcctgcttggggaattcaccttcttcttctctcccagctgaaccccgaggctaagaaaaatgaggcaagagaaaatgtaccccaaggtgaacctccaaaacccccactcaagtcagagaaacatgaggaataaaggtcacatgcagatgcatcaaaaaaaaaaa

SEQ ID NO: 29359 - DNA, 627 bp, Homo sapiens
  SIMILAR (36)..(620): 681254mologous to Homo sapiens keratin associated protein 4.7,accession number AJ406939,Smith-Waterman Score=884.
tgggaacccacccagaacctccaccctctgacgccatggtcagctcctgctgtggctctgtctgctctgaccagagctgtggtcaaggtctcggccaggagagctgctgccgccccagctgctgccagaccacctgctgcaggaccacctgctgccgccccagctgctgcatttccagttgctgcaggccttcctgctgtatctccagctgctgcaaacccagctgctgcaggaccacctgctgccgccccagctgctgcatttccagttgcttcaggccttcctgctgtatctccagctgctgcaaacccagctgctgcaggaccacctgctgccgccccagctgctgcatttctagttgctgcaggccttcctgctgtatctctagctgttgcaaacccagctgctgccagaccacctgctgccgccccagctgctgtatctccagctgctacaggccccagtgctgccagccctcctgctgccgcccggcttgctgcatttctagttgctgtcatcccagctgctgtgtgtccagctgccgctgccctttcagctgcccgaccacctgctgtagaacaacctgcttccaccccatctgctgcggcagttcttgctgctgagtga

SEQ ID NO: 29360 - DNA, 410 bp, Homo sapiens
  SIMILAR (9)..(203): 821254mologous to Homo sapiens 15-SEP-1992 Human Growth hormone releasing hormone receptor cDNA,accession number Q45311_cd1,Smith-Waterman Score=312.
atcatcttaacttcctgccagacaatgctggcctgggcatccgcctccccctggagctgggactgggttccttccaggtgaggactgagatctcacggaagtggcatggccatgaccctgagcttctgccagcctggaggacccgtgctaagtggaccacgccttcccgctcggcggcaaaggtgctgacatctatgtgctaggctgcctcatcacgccactggagtccacacttgaatttgggcagctaccacgggtctgccatgctctggaggagcaagggggccacatccccaccccagctgttaaccagcccggggcaggggcaggccttccttcctgtgtctgcatctgactctcttttggaggcccctggatggcaacctctgacttttgggggaccctttgga

SEQ ID NO: 29361 - DNA, 1607 bp, Homo sapiens
  SIMILAR (1)..(1008): 961254mologous to Homo sapiens growth hormone-releasing gormone receptor,accession number L09237,Smith-Waterman Score=1740.
atggaccgccggatgtggggggcccacgtcttctgcgtgttgagcccgttaccgacccaggtattgggccacatgcacccagaatgtgacttcatcacccagctgagagaggatgagagtgcctgtctacaagcagcagaggagatgcccaacaccaccctgggctgccctgcgacctgggatgggctgctgtgctggccaacggcaggctctggcgagtgggtcaccctcccctgcccggatttcttctctcacttcagctcagagtcaggggctgtgaaacgggattgtactatcactggctggtctgagccctttccaccttaccctgtggcctgccctgtgcctctggagctgctggctgaggaggaatcttacttctccacagtgaagattatctacaccgtgggccatagcatctctattgtagccctcttcgtggccatcaccatcctggttgctctcaggaggctccactgcccccggaactacgtccacacccagctgttcaccacttttatcctcaaggcgggagctgtgttcctgaaggatgctgcccttttccacagcgacgacactgaccactgcagcttctccactgtaatggccatgggtgaaggggctgggcaggttctatgcaaggtctctgtggccgcctcccatttcgccaccatgaccaacttcagctggctgttggcagaagccgtctacctgaactgcctcctggcctccacctcccccagctcaaggagagccttctggtggctggttctcgctggctgggggctgcccgtgctcttcactggcacgtgggtgagctgcaaactggccttcgaggacatcgcgtgctgggacctggacgacacctccccctactggtggatcatcaaagggcccattgtcctctcggtcggggtgaactttgggctttttctcaatattatccgcatcctggtgaggaaactggagccagctcagggcagcctccatacccagtctcagtattggtactgtgtgtttgtgtctggggatactgggaaagggtaactggagggggattcaatgtgtctgtctcatccaataagcactcatgacctcagccccatactctttcttccctatgttcccagagacagaatagacctggccccttccttctaggggatcacaatattggaaggatgaggactccaaacagccagctcccatgccaaatagaacgatgagtgctgggatcaatttctatgggagcctggggagagggatcctttctagttgaagggtggtgtggtcaaggaagacttcctggaggaagtggttttgatccacactttgaaagatgcatagactttgggataaactgtggcaataacagttggtaggggaatcagcaggatccagcgcccagaaataaaaaagcccagagtgattgtggggaggtggcgtttcccaaggtggctgttccacagagtggatatagggaggtggtaggaagtgagaggagatgaagtgcacacgacagtttctaatcccagtcttgggagcctaggatttgtctttcctgcaggcgtctctccaagtcgacacttttcctgatcccactcttt

SEQ ID NO: 29362 - DNA, 1605 bp, Homo sapiens
  SIMILAR (52)..(1320): 1001254mologous to Homo sapiens growth hormone-releasing hormone receptor,accession number L01406,Smith-Waterman Score=2298.
agcagccaaggcttactgaggctggtggagggagccactgctgggctcaccatggaccgccggatgtggggggcccacgtcttctgcgtgttgagcccgttaccgaccgtattgggccacatgcacccagaatgtgacttcatcacccagctgagagaggatgagagtgcctgtctacaagcagcagaggagatgcccaacaccaccctgggctgccctgcgacctgggatgggctgctgtgctggccaacggcaggctctggcgagtgggtcaccctcccctgcccggatttcttctctcacttcagctcagagtcaggggctgtgaaacgggattgtactatcactggctggtctgagccctttccaccttaccctgtggcctgccctgtgcctctggagctgctggctgaggaggaatcttacttctccacagtgaagattatctacaccgtgggccatagcatctctattgtagccctcttcgtggccatcaccatcctggttgctctcaggaggctccactgcccccggaactacgtccacacccagctgttcaccacttttatcctcaaggcgggacgtgtgttcctgaaggatgctgcccttttccacagcgacgacactgaccactgcagcttctccactgttctatgcaaggtctctgtggccgcctcccatttcgccaccatgaccaacttcagctggctgttggcagaagccgtctacctgaactgcctcctggcctccacctcccccagctcaaggagagccttctggtggctggttctcgctggctgggggctgcccgtgctcttcactggcacgtgggtgagctgcaaactggccttcgaggacatcgcgtgctgggacctggacgacacctccccctactggtggatcatcaaagggcccattgtcctctcggtcggggtgaactttgggctttttctcaatattatccgcatcctggtgaggaaactggagccagctcagggcagcctccatacccagtctcagtattggcgtctctccaagtcgacacttttcctgatcccactctttggaattcactacatcatcttcaacttcctgccagacaatgctggcctgggcatccgcctccccctggagctgggactgggttccttccagggcttcattgttgccatcctctactgcttcctcaaccaagaggtgaggactgagatctcacggaagtggcatggccatgaccctgagcttctgccagcctggaggacccgtgctaagtggaccacgccttcccgctcggcggcaaaggtgctgacatctatgtgctaggctgcctcatcacgccactggagtccacacttgaatttgggcagctaccacgggtctgccatgctctggaggagcaagggggccacatccccaccccagctgttacccagcccggggcaggtgcagcccttcctccctgtctctgcatctgactctcttttgaggtccctgtatgtctacctctgacttctgtggtccctctgtgtctgctctcatccattcctcttactggggcctggggctctagcccaaggctcagaggagccaataaacctgtaaatg

SEQ ID NO: 29363 - DNA, 1355 bp, Homo sapiens
  SIMILAR (82)..(585): 911254mologous to Homo sapiens interleukin 17E,accession number AF305200,Smith-Waterman Score=825.
atgcctggcacatgtaagtgcacaggagctgaggccagcaggatatggaagggagaggacgtctgcgagtactgggggcagagggtggttgcattcttggcaatggtcatgggaacccacacctacagccactggcccagctgctgccccagcaaagggcaggacacctctgaggagctgctgaggtggagcactgtgcctgtgcctcccctagagcctgctaggcccaaccgccacccagagtcctgtagggccagtgaagatggacccctcaacagcagggccatctccccctggagatatgagcctgacaagtgccgcccccacaggttggacagagacttgaaccggctcccccaggacctgtaccacgcccgttgcctgtgcccgcactgcgtcagcctacagacaggctcccacatggacccccggggcaactcggagctgctctaccacaaccagactgtcttctaccggcggccatgccatggcgagaagggcacccacaagggctactgcctggagcgcaggctgtaccgtgtttccttagcttgtggggctgtgttggtgggccctacgaagatgctcagtgctcgagatcgccgggaccggcaccctgaggagggggtagttgcagagctccagggcttcgcggtggacaaggccttcctcacctcccacaagggcatcctgctggaaaccgagctggccctgaccctcatcatcttcatctgcttcacggcctccatctctgcctacatggccgcggcgctactggagttcttcatcacacttgccttcctcttcctctatgccacccagtactaccagcgcttcgaccgaattaactggccctgtctggacttcctgcgctgtgtcagtgccatcatcatcttcctggtggtctcctttgcagctgtgacctcccgggacggagctgccattgctgcttttgtttttggcatcatcctggtttccatctttgcctatgatgccttcaagatctaccggactgagatggcacccggggccagccagggggaccagcagtgactctggggctacctggctcctaggcccagccagccagagaggacagtggagcccagacacgtctcccttgggattcactagcccccagcccgccaaaccccaccccagccctacacagcagtctggcctgagacgtcactggggacttatctgtggagcctggtgctccaggatgtggcttctcatgaagctctggccagaggaggggaacttattgggggagggggggtggaggggaggaatctggacctctaagtcattcccaaattaaaatattcaaattctaaaaaaaaaaaaaaaaa

SEQ ID NO: 29364 - DNA, 1442 bp, Homo sapiens
  SIMILAR (701)..(489): 731254mologous to synthetic construct lac repressor,accession number AJ223813,Smith-Waterman Score=230.
ctaatggatcactgcacttcttcctgttaagcctggattgaacctcagaatccttctcaacccagtggcacagccagagccatctgagttggaatgtgtaagatgcaagctattgtagccatccccgatgggtcgatgcccagatttaaagatgacaaaactggggaccagcaacaggaaggaaattgtgccagtcacagagcccatcagcagcagagacatggcaagaagcccacgtccctcttctgaaatggaggctgtggtggttttcatcagggaagttttaggggactcttcacagttagtgttgcaggccctggggcagcccttgtacattccttcaatgccggccctggaggaccatatcccaggcttgagtgcatcaaaaggacccactcttccatccccgtggcggctccagggaccagcaggggcagcagggcagagctgaccttcatacacagttccctgcacacactcggctaatgcccgctttccagtcgggaaacctgtcgtgccagctgcattaatgaatcggccaacgcgcggggagaggcggtttgcgtattgggcgccagggtggtttttcttttcaccagtgagacgggcacagctgattgccttcaccgcctggcctgagagagttgcagcaagcggtccacgctggttgcccagcaggcgaaaatcctgtttgatggtgggttcgaaatcggcaaaatcccctggttgcactacctgccctcccatcccactccgactcatttctctccctaacaccagattctctgcagcccaggctccttgaggttgggagcgttcatttaaagtccacgggagaaaaaggaaaaagaaatcatggatgttcccagttccagccttgagtctctctctcaggatgccttttgttgccaagaatgatgaaacagatgtcttggcaatagcttcaaatgtttcctgtgcatcctccaggtggggagggctcatgctttcttgctctgcagtgacttcatgccgtgtgaggctgtgtgcagcagcatcatatacagtttcataccagtcaccaagacccagggtgcagccccccataccagaggcccacagcctcacacctgatcccaagcccagctgctgctgctgctgctgccccaggccaggggaggatccaggacacatgtgcgttgtctggccttggcagccctcagtcatatatgcaaagtactggacatatgagcatgcacagtggtgaggagctattaatgttatgtcagctgctggctgcagccgcctcctccccagcagtcctggctccaaccacccaatcgcctctgaggggattgctccaaactttgctaacgcttgtcctgtaactataacagctattcctttttccagttcttcaatacctttcttataccattccacagcttgctccttctgtcctg

SEQ ID NO: 29365 - DNA, 533 bp, Homo sapiens
  SIMILAR (276)..(377): 701254mologous to Mus musculus HS1 binding protein 3,accession number AJ132192,Smith-Waterman Score=112.
  misc_feature (1)...(533): n = a,t,c or g
cccgtccagagcctgaagggcgaggatgctgaggaatccttggaggaggaggaggcgctggaccctctgggcattatgcgctccaagaagcccaagaaacatcccaaagtggccgtgaaagccaagcccntcccccggctcaccatctttgacgaggaggtggaccctgatgaggggctctttggcccgggcaggaagctgtctccacaggacccctcggaggacgtgtcatccatggaccccctgaagctatttgatgatcctgacctcggcgggccatccccctgggtgactccctcctgctgccggccgcctgtgagagtggagggcccacacccagcctcagccacagggacgcctccaaggaactgttcagacaaattcaaaaagagccgtaacactgggattagcttcttgagagcaggaaccacattcattctttgtgtatgccctgtgactatccagggagtagttggacttcctcataataaagaatgttctgatagccattcattcaaaaaaaaaaaaaaaaa

SEQ ID NO: 29366 - DNA, 3598 bp, Homo sapiens
  SIMILAR (1144)..(1374): 971254mologous to Homo sapiens Human bone morphogenetic protein (BMP)-12,accession number R78734,Smith-Waterman Score=379.
gatatagcgggacagcagcagcccagagagccggagccctgctggagcctgcgcagtgagatggatgtagagtcagggctggaactggaatgtgctgcctcacaggccaaggcttccatggaaaaagaacagccatcattcatggctgagcgctccaagctagctaccacatacgcattgcttctgcccacagggagctgccacatttcccctgactcccccagcgggcccagctcaggggcagaggccgagcaacacaagctgatcaggccaccatcactgttggcttctgtgcccagggggtccctgcagccaccatcaggaaagctcccaccctggggacagtctctcctgcctcctgttcttcctggggtcaaagacgtgctcctgctcaagggtgagcaggtgggaactcttcgagataagcactatgtcttatggttctccatcctgtccccaacacagggcctggcctatcacggcgccgggggacttcccggagccacggagcccgcgccgcccgaccgctcggcccacggagcccatggacctgagcgccgcgccgcgctgtgcctttggctgctgagcgcctgccgccccgcgacgggctggaagcggcccgtgctgcgagcggcgggggctgggccggtccggagcccagggggcggcggcggcggcggcggcggcgggcggactcttgcccaggctgcgggtcgcggctgtcccggccgccgcgggaacggctcggtggtgccgcaccacttcatgatgtcgctttaccggagcctggccgggagggctccggccggggcagccgctgtctccgcctcgggccatggtcgcgcggacacgatcaccggcttcacagaccaggcgacccaaggtacttacgcctcttctgtgcccgcccatcccgtcaggtcctgggctgagaccagccccggagccgtgccgcagctccgttacatttggagccgcggccccatgcggcccaccctcaggccggctggtcccctcgaggaggcaggcggaggccaagattcgcttcttggggaatggtctggagtggcctcggagccctcagagaagaaaggagggcaagagctgtgttcccgggagtcacggcgagagggactgcacggtgacgaatcggcagccgaaacaggccagagcttcctgttcgacgtgtccagccttaacgacgcagacgaggtggtgggtgccgagctgcgcgtgctgcgccggggatctccagagtcgggcccaggcagctggacttctccgccgttgctgctgctgtccacgtgcccgggcgccgcccgagcgccacgcctgctgtactcgcgggcagctgagcccctagtcgaggaaagagagcttattccgggagatccgcgcccaggcccgcgcgctcggggccgctctggcctcagagccgctgcccgacccaggaaccggcaccgcgtcgccaagggcagtcattggcggccgcagacggaggaggacggcgttggccgggacgcggacagcgcagggcagcggcgggggcgcgggccggggccacgggcgcaggggccggagccgctgcagccgcaagccgttgcacgtggacttcaaggagctcggctgggacgactggatcatcgcgccgctggactacgaggcgtaccactgcgagggcctttgcgacttccctttgcgttcgcacctcgagcccaccaaccatgccatcattcagacgctgctcaactccatggcaccagacgcggcgccggcctcctgctgtgtgccagcgcgcctcagccccatcagcatcctctacatcgacgccgccaacaacgttgtctacaagcaatacgaggacatggtggtggaggcctgcggctgcaggtcagaaatgccactcggcccctcgtaactgcaaagggactgaaaggtgtggtctcccagaggtccaggaaggaaagaagccctgggaagtttcccacaaggcccagcttcttctcaaggagactgtggataaggaaagaaggcaggcaaggctgctgtgctggaaagaaggatccttattgtatgaccctatcaggaagtgcttccctccgtgtctccacattggagaccaagtcaatactccaatgccatgtggggccaaacccatcgtgatcaggaggccctggtcccgggtccttcagctacgaggactcacagcagaaattcagctcattagaaaggggagtgctgggccatgggctgaagagaaggctctcagctccaagaagcccaagaaacatcccaaagtggccgtgaaagccaagccctcgccccggctcaccatctttgacgaggaggtggaccctgatgaggggctctttggcccgggcaggaagctgtctccacaggacccctcggaggacgtgtcatccgtggaccccctgaagctatttgatgatcctgacctcggcggggccatccccctgggtgactccctcctgctgccagccgcctgtgagagtggagggcccacacccagcctcagccacagggacgcctccaaggaactgttcagagttgaagaggacttggaccagattctgaacgctgtgagctgagcccaaacccaagccacagcttattccctagccaccagtggcagctaagccggtgatacccacagaaccagctgttccccccaaaaccggccccgcttgaagctgtggctgggcagcagaagccgcaggagcagatccaagccatggacgagatggacatcttgcagtcattggccaaacagactggcgccatcggttggaaaaacagcgtgcctcggatgcctggtattggtcctcctgagaagaagggacagcagcagagagagatcttcccactgctcactccctccagcctcctggacctgctggggcccacatcctggcccatgggtttgtgcctcaaggcccggcattccttatccacgggcctggcccatgtgcctgggctcttccacacgggggcctggcagcaacgcctctgtctccttggttccaccccccccccccccttcaggctaccccagcaagggaggacaggagcagctgggaaattaatttacaatttagccgagtgtgtgcagggaactgtgtatgaaggtcaggcctgccctgctgcccctgctggtccctggagccgccacggggatggaagagtgggtccttttgatgcactcaagcctgggatatggtcctccagggccggcattgaaggaatgtacaagggctgccccagggcctgcaacactaactgtgaagagtcccctaaaacttccctgatgaaaaccaccacagcctccatttcagaagagggacgtgggcttcttgccatgtctctgctgctgatgggctctgtgactggcacaatttccttcctgttgctggtccccagttttgtcatctttaaatctgggcatcgacccatcggggatggctacaatagcttgcatcttacacattccaactcagatggctctggctgtgccactgggttgagaaggattctgaggttcaatccaggcttaacaggaagaagtgcagtgatccattag

SEQ ID NO: 29367 - DNA, 522 bp, Homo sapiens
  SIMILAR (92)..(355): 411254mologous to Homo sapiens S100P calcium-binding protein,accession number X65614,Smith-Waterman Score=74.
gccctgccagcccccaggaggaaggtgggtctgaatctagcaccagtgacggaacctagagaccagccatgggccatgatcatagacgtcttttccccgatattcgggcagccgagggcagcacgtcagacccctgacccaagggggagcctcaaggtgctgatggataaggagctacccaggctttccctgcagagtggaaaagacaaggatgccgtggataaattgcctcaaggaccctggacgcccaatgggagatgcccagggtgggactttcagtgaagttcatccgtgttccgtggctgcaatcaccgtctgccttgtcacaagtacttttgagaaggcaggactcaaattgatgccctgggagatgttcacagatttcctggggcagagcattgggtcccaggggtttcccaaaatgttttgtttgggcatttatttcccctaaggctggagcctgctcatgttacctctggattaataaatgctttatgaaataaaaaaagtcgacgcggccgc

SEQ ID NO: 29368 - DNA, 648 bp, Homo sapiens
  SIMILAR (374)..(309): 631254mologous to Homo sapiens Human secreted protein, SEQ ID NO: 7305,accession number G03224,Smith-Waterman Score=67.
tcataaacctgcagaaaaccctaaatcaggcagacgagtggaagtggcttggttgtcactgactatgtatgtcttaagaccaagtcggcttgctccttcatcagaagcacagccctggaaagtgcgtttcactaaaaatagggcagttggaggcatgactgcaccagcagatagttttcgcagcagcttttggggcaggctgactgataaagctttctgctctgggtgctccagattactcacagctgtttccagaccaaagcgccctggggaggctggcatcacgccacgcgtcaggtgcttgttatcaaacatgaaggatatcttggttgcttctaagttttggcaattatgaataaagctgctatgaacatctgtgcaggtttttgtgcggacataaatttgcaattcatctggatgaataacaagaagcgtgattgcaggcttggagcctgggtcactttctgtttggaagtgaggcagccacaaggcccctcttgttccctctgggacacctgccctgaatatagtgcattcagatggaccccgtgacctgtcctgaggtttcacgtccacactcagtctcctggctatggaattgtaatcgccgatgctgggggtggggtctggtggaagcgattgtatcat

SEQ ID NO: 29369 - DNA, 1213 bp, Homo sapiens
  SIMILAR (857)..(1195): 1001254mologous to Escherichia coli K12 orf, hypothetical protein,accession number AE000317,Smith-Waterman Score=570.
cccaagatttcccggcaggcctatccacccctcggagaagcccccgggcaaaaacctcaaaaggtggtcaaggacacggcccctaagacatctggaggaagatcttcccagccagttagaggctactgacgctgggaacatgcctatgtgtttgaggacacaagggagacaaatgcagctagagatgagtccacaggtgaaagtaataggaaatgagaccaaggaggaaatgagagcaggtcatggaagaccttagctgccattgaaggacgtaggcttttattctgagaagagcagggaagtgaaatgaaggggttttgaagcagaggagtgacatggccttgtcactcctctgtgacaagaggagagacatggcttgacttggcttgtcttttaataagatttttctgcctttgtgttacaacagactgcagggagcaagtgcagacaccgggagacctgtgggaagctgctggagtgaccccggaaaaccacgctcgcgggttctgaagaggcaggggcagtggagatagctccctatctctgcgatatgtttgataacaagcacctgacgcgtggcgtgatgccagcctccccagggcgctttggtctggaaacagctgtgagtaatctggagcacccagagcagaaagctttatcagtcagcctgccccaaaagctgctgcgaaaactatctgctggtgcagtcatgcctccaactgccctatttttagtgaaacgcactttccagggctgtgcttctgatgaaggagcaagccgacttggtcttaagacatacatagtcagtgacaaccaagccacttccactcgtctgcctgatttagggttttctgcaggcacctctgcttttgatcccgcgaagaatgatccgctgagtcgtgccgtgcttggtgaacacagcctcgaagatggcatagatggcttccttggattgacctggaatcaggagttagccgcgacaatcgaccgactggaatcactggatcgaaatgaactgcgtaaacagttttccattaagcgactcaatgaaatggagatttatccgggagtgaccttttcagaagagttagaggggcaactctttgcctcgatcatgcttgatatggaaaagctgattagcgcgtatcgacgtatgctgcgacaagggaatcatgcgctgacggttattgttgggtgatatagcttgatgcct

SEQ ID NO: 29370 - DNA, 950 bp, Homo sapiens
  SIMILAR (409)..(173): 361254mologous to Bothrops jararaca bradykinin-potentiating peptides and C-type natriuretic peptide precursor,accession number D85843,Smith-Waterman Score=93.
  misc_feature (1)...(950): n = a,t,c or g
ctagtgccggcttcgcggtcgcagcacccggcgtttccgttggctctttcgccagcggcgcgaagcggcgagttttgctgtcacagcacttgctgcacggagtttctcggtagccgaacttctctttttttctcagagtcgacggtttcttggtgacggcaccgctggttgcgccaaaacaaatgttgtccttgacaaccccgccggctgcattccctttcaggctcctggcaccgccatttcggcgagccgtggtctcttgttcacagctctgtgcctccatttctcggtggcggcagccctcaggccgcggatctgagagatttaaagtcgcagctgcccccgttgcgccgagtctggcgttgccggatgggtgctgcagggctgggcggggggagcccgacgctccttggagccggtgacaggggagctgcaggggcacagtctcttcccagcgccgccgcacgggttccggctcggcctccagaacgcagtcctgtggcggcgccggcgtctctgtcgcaggaccccacggtttcgcgcgtcgttggcttcttagtcctagcaagtttcgatttcgcggtgcctgggatttccaccctccgtttccccatgggaaggcgaagttaccctgtgactcgttggtcaccagctccgggtttcccgtggcctcggatttttaatcataaccaccctgggggcagcctagccccaagttttttagtcctagcaaggttcgggttcccactggtaaaacctgctttaagtgggcaggaaaagtttaactcctggggaaatttggggaccaaccaatgcnnnnnnnnnnnnnnaaaggtttagcgatgaccagtttagcagtgttgggagctcttataccaagtttggtttcgcaatatcgagtcctgtcttagctatgcttgtgtgtttttaaaactcccgtggaagtcagg

SEQ ID NO: 29371 - DNA, 390 bp, Homo sapiens
  SIMILAR (223)..(2): 971254mologous to Homo sapiens Human secreted protein, SEQ ID NO: 5522,accession number G01441,Smith-Waterman Score=364.
cctcgcttctttttctgttattgttcttcttttttcctgtcatattccattcttttagaacttgaattgcactgccatccacaaaggcttgcacggctttatccacattaaaatcaaactgttggagcaccaggactatttcattattgcttttgttgggaacaactgatctaactgcatagatcttttccttgacattcacatgagtattgagttcagccatcttgcttctagtggaataggcctttttaaggtttcctcgtgctccaaatcagggctctcagtccagtttccagcgactggctttctcaggaggcacataagctctgttcccccactggccacctttatcaacttgcttttactgtgaccagtaagcggacgcgtggg

SEQ ID NO: 29372 - DNA, 430 bp, Homo sapiens; identical to SEQ ID NO: 26
  SIMILAR (333)..(286): 431254mologous to Mus musculus HERC2,accession number AF071177,Smith-Waterman Score=39.
  misc_feature (1)...(430): n = a,t,c or g

SEQ ID NO: 29373 - DNA, 1281 bp, Homo sapiens; identical to SEQ ID NO: 2314
  SIMILAR (1)..(624): 911254mologous to Homo sapiens putative p150,accession number U93565,Smith-Waterman Score=1024.

SEQ ID NO: 29374 - DNA, 529 bp, Homo sapiens
  SIMILAR (88)..(2): 1001254mologous to Homo sapiens Human secreted protein, SEQ ID NO: 7341,accession number G03260,Smith-Waterman Score=170.
tcagcccttggaaacccgaccaacccggggtgttccgccgcctcctctgcgctgcgggtctgcacactgggctccaaacgtgtgtgtaataaccaagttacacatgggcatcgtgggcttcagccgtgggtttctgcctgtgtctgcttgttgaacacccacagttgttatctgaacacccacaattgttatctgacatgggtttccgatccattctatgcagaagtggtattgtagtaatggatttgcttctgccagtgcagctgttttaaaagcatggaacacaaatgacctggtcacagtaaaagcaagttgataaaggtggccagtgggggaacagagcttatgtgcctcctgagaaagccagtcgctggaaactggactgagagcccttcccatttcatttcctttttttccaaagggaatttttcttaaaagcaagacagttttttccaaatgtgcactgtcagtgcataaggaaaccaaatgcaccaaaagagggtggatcagcacaaatttctcatcaaag

SEQ ID NO: 29375 - DNA, 1353 bp, Homo sapiens
  SIMILAR (345)..(410): 451254mologous to Drosophila melanogaster Mst84Dd,accession number X67703,Smith-Waterman Score=49.
atggttgcgtggctacgacatctcttttgtttcccctctttgcccttcacccgcctgctgtctgtccccctcaatgccagagccactgtggcactgctgtggagaccgcctgtggaaaaacttggcccttctggaaaaatcgtggtttctggaatggaaggagaagctgtgcaaaagacacagttagggggtctcaccccagacatagcctctgggctggacctggattattttgagcactccactttggagcccactggtctagaatttcagtactgtagaagttcagaagagaaggacttagaagtctggagtagtccagacagactcagctggactggaagggccctggttcacagccgtgcactccttgccacatgctgtagatgggaccatgtgatgggtccttgccagtggagtgtaagcagaagtgatacgcatcacttccaggcagaagtggttaaggagcaagtgagtcttctcgctctcttcttctcttgctattgcctccatgcagacgaacttactgaccttgggaactctgtgttggaaatggtgaagccagaagatggaactagcctggtgcttcagacgctgcttggagaacagcctctgcccttcaggaacacctattttggtgttcatatgagcaagaatgttggagcagtaacagtggacttcagctcatggcttcgtctccgggaacgtattgtgggggggaaaacccaaatagtcactggatccattcttgagagcataatctggggcctgtctgaaaatttaatagctagaaagggagctgcacttctctctcaaagccagacagctgtctcccaaatgtgcactgtcagtcgcataggaaaccagatgaccaaaagagggtggatcagcacaaatttctcatcaaagctgaaagaaagaaagagaaagaacctcaaagccaatgccctgctgactgtggcatggcttcgtctccgggaacgtattgtgggggggaaaacccaaatagtcactggatccattcttgagagcataatctggggcctgtctgaaaatttaatagctagaaagggaggtttcctcgtgctccaaatcagggctctcagtccagtttccagcgactggctttctcaggaggcacataagctctgttcccccactggccacctttatcaacttgcttttactgtgaccactgcctgcacagggcttctggattgcccattggaagaaagctggcacatctctgaggctttgctaagcttcatccaaactcttgtgtggatgcgaatccttttcaatgacttgacgcttgtacccctcattccacacacagatggtgttgggtcttga

SEQ ID NO: 29376 - DNA, 918 bp, Homo sapiens
  SIMILAR (118)..(315): 1001254mologous to Homo sapiens dJ493F7.1 (similar to murine BET3),accession number AL121953,Smith-Waterman Score=347.
atgagtacagctgtggtcgtgaaggttgtgctttgtacagtagcacctggcaggggctctgctccttccttaagctcgtgtcttgactggaaggtcaatggagcagaggggagccataataaagatctctttgtccttacctatggagctctggttgcccagctgtgtaaggattatgagaaggatgaagatgtgaaccaatatttagataaaatgggttacggcattggaacgcggcttgtggaagactttttggctcgatcctgcgtgggaagatgccatagttattcagaaattatagacataattgcccaggacatggagagggggttctgtgctctccacatagacactgaaggcagatacgaatggtggacaacttccactcagctccaatctactttacctcgagcagcacagtgctctgtctaccaaaagcagcctgacaggaaatccctaactgtaggccaaaagattgaagtaggaaacccaggtattggaacggaacagagtccccagggtctagtgagatttgcaacccaggcattccttaccacgcacagagctgaagggttgcagcaaagccaagtgaaaggctcagttattcacctgaagagtcaggacaaatgtggagaacacaggttcacaacaaaccaggtagaaacaggagacccggtcagagagagcagttctcagcacagtgtaggcaggggaggacccaaggatattcaaatccagggtgccaatgtcccagttcggcagtgtaacctcctctggaggatcacccttgggccactggagactcctcacctggagttttctggggaatgctctctcttggctgcaatggaagccccagagcacacttgggatcaggagaaatctgacattccagagcccccccataggtcaagctga

SEQ ID NO: 29377 - DNA, 828 bp, Homo sapiens
  SIMILAR (305)..(493): 681254mologous to Homo sapiens Human secreted protein encoded by gene 26 clone HSAAO94,accession number B12326,Smith-Waterman Score=215.
gtaagatagggagagcaaattggtgtctgctcttgagtatcttgagggaatgggtatctagaggcagcaggatgaactggctttgatagcagagactttaaaatgtgtggaccattagttgtctttggatgtgctccctagaggctgcgcctgacacagggagctgtgtatacatgatttattaaaaggaaatcctcttaggagaaacatattagcaggataaacacaagaaagaatgcagttacaagtggagtctcaatcaatcccagaggaaattctgggacttcagcctcagcttggacctatgggggggctctggaatgtcagatttctcctgatcccaactgtgctctggggcttccattgcagccaagagagagcattccccagaaaacttcaagttaagagttttccagtggcccaagggtgatcctcccagaggaggtttacaatgccgaactggggacattgggcaccctgggatttgaatatctagagaggggcacccaatggttcatactaatgttttgccataacagtctcttctaggtctagacttgaagcatatggaagggtccttgggctagagccaacccaagcccaggctgactcccttttaatacttctaattttccctgaagatctggtcttctccctaccaccactaccctattacataagaggaaaggattggagaatgttcttgaaaagaatgtgatgctttcccatacaaggaatatactcaaggaaaaatttcatggcacaaaatgctgattctgtccaatttatcccgatgaataaattgtgtacacatatatatatgaaaaa

SEQ ID NO: 29378 - DNA, 381 bp, Homo sapiens
  SIMILAR (157)..(246): 361254mologous to Homo sapiens 36/8-8 fusion protein with epitope for anti-lectin antibody,accession number X58236,Smith- Waterman Score=58.
tcatcttgccacggctcttctaggcctcttcagggttaaggcatactcccttctgagaatttctggtctaaccggttgtctagcttcacatcctgtttctacggattgtttgtaaccagcttttgctgcaactgttactgttgattgatatcttgccccaccctcactaaacttaataataaatgctggtatatccagtgcattggcagcaccatgggaccagaaagtggtgacccccctggacccagttttcactatcttgtgtgtgtctattatttctcgacctgctgatctgcctggcggcaggcaagagagaatgagagccaagccaaaggagaaaccgcttatgaaaccatcacatcttgtgagaaccgctcccat

SEQ ID NO: 29379 - DNA, 1358 bp, Homo sapiens
  SIMILAR (274)..(567): 561254mologous to Human endogenous retrovirus K pol- env,accession number AF023261,Smith-Waterman Score=294.
atgaaggttgagaacaactgccaagttgcaagattacttcctgagggtcagttgtatgcaaagcaaatacaaggagagcctatgaatggacgtgcagtcagggaggtttcacatcaccaagattcctatcctagaaaggcagatgttcatagctctaggaatggaatgcgacccttgtggagagcctataaacggatgcatggggatcctgaagatgcatgcaacaacgagacagagaaatttgctgaaaaagcaccacagcaggaaacaactaacacatccaatcatcaaaaagaagaaaagaccacgctaactcctttacaacagacaatccagacagccatcctgaacaacttgtctccagcgatccagactgttaaaaactatacatattgggcctatattccttttcctcctcttattcgagccgtgacatggatggatgctcctatcgaggtctatgttaatgatagtatttggatgcctggttctctagatgatcgttgtcctgcacaaccttcagaagaaggaacccctttcaatatcactttaggttttagagagcctatgaatggacgtgcagtcagggaggtttcacatcaccaagattcctatcccagaaaagcagatgttcatagctctgggaatggaatgtgacccttgtggagagcctataaacggacgcatgaggggggtgcctatccatatggataagatagggctataaacgccctcatcttgccacggctcttgtaggcctctttagggttaagacatactcccttctgagaatttctggtctaaccggttgtctggcttcacgtcctgtttctatgggattgtttgtaaccagcttttgctgcaactgttactgatgattaatgtcttggtaatcataggtcatggaaagactgtgtttctgttttaaggctctgttagatactacttatgcacacactatatcataaattcttatccgtgtatactgtacttgtgcatccagatggtatgttaaagaattgcttcatccccatgtgtccatctcacctcataatcaaatgaccctaaatccctcactaaccttcgcctgccctctcgccaaacttaataataaatgctggtatatccagtgcattgttggcaccgcgggaccagaaggtggtgacccccgtggacccagctttcactatcttgtgtgtgtctattatttcccaacctgctgatctgcctgggaacaaagagagagccccattgcattgtgggctgctgaccagatcctgaagatgcatgcaacaacgagacagagaaatttgctgaaaaagcaccacagcaggaaacaactaacacatccaatcatc

SEQ ID NO: 29380 - DNA, 1334 bp, Homo sapiens; identical to SEQ ID NO: 13786
  SIMILAR (146)..(1264): 1001254mologous to Homo sapiens hydroxyindole-O- methyltransferase,accession number M83779,Smith-Waterman Score= 1939.

SEQ ID NO: 29381 - DNA, 1418 bp, Homo sapiens
  SIMILAR (2)..(67): 861254mologous to Homo sapiens PRO1847,accession number AF119855,Smith-Waterman Score=108.
gttcaaacaattctcctacctcagcctcccgagtagctgggattacaggtgtacgccattgtgtccggaattggtgggttcttggtctcactgacttcaagaatgaagccgtggaccctcgcgcctggacaacaaagagcaaaaccccacctcaaaacaaaacaaaacaagaaaacaagaatgaagatgtagggagagatcagagggtggagtggcttgtcacagaggaggtctctgagttgagccttaaaggagagaaattacactggaaggagaaggaagtacagagcacaggcaaagaaacagatgcacggagcagcatgaggaattatttgatgttgctgggacctgaagtgcaagaaaaagagccagtgaagagaagactagcaagggggaaggcttttgttgaattagcagaacctaccagagctcctggaaattctgggtttccggtctctgggggcgtcttcactccaagcctcggtgcccttacttggatttgcaagtttagagttaaatcgtgggccatactcaattcccaactgctgcttgacaccatgaagaaagggattgtatataagaatggagacagaatccagggcaacaggtcagcagacaatcgtaataatggtgtgcctctcactggggctcgggacatgcagcccgccatgcctgagcctcccacccactccatgggctcctgtgcagcccgagcctccccgaggagcaccaccccctgctccacggtgcccagtcccatcgaccacccaagggctgaggaatgtaagcgcacggcacaggactggcaggcagctccacctgcagccccgctcagggattgtaaatacaccaatcagcaccctgtgtttagctcaaggtttgtgagtgcaccaatcgacactctgtatctagctgctctgatgaggacgtctgtatctgctctctgtgcctgggacagtgagggcctggtgcatttgatgcaggatttttcttggccccttcaacagactcatagaaggggcaccccacctattcggtctgccatgctcaaccccttgcaggagggagcacgtgagcaagcaagtgcaagatccggctggctgctccggctgctgacacaggagcaacttctgtgcagggcctgcatccagaccaggagagacagggaaggaaaaacacggcaccgaaaaggcactccggaaattggaaaggggagagcattttggaagaagagcctgaaaatcatcctaatcctatttaactgcctgcgatactggaatgcctacatggaaatatgggtgccagcccttaccggtattcctcctaatgtcacagttaactatgccacatctagctctaaggattcacgcactgatggcagggttgacttactgatggcagttacagatggcatgtga

SEQ ID NO: 29382 - DNA, 711 bp, Homo sapiens
  SIMILAR (252)..(10): 871254mologous to Homo sapiens dJ470B24.1.1 (myeloid/lymphoid or mixed-lineage leukemia (trithorax (Drosophila) homolog); translocated to, 4 (AF-6) (isoform 1)),accession number AL049698,Smith-Waterman Score=353.
tcacctgccaatggcagcacagcctctctggcacagagggtctaaaaattcttgtaaaccatttggaatgtttctgacaacatcacaagaataaccatcttctggcaaaagaaacggcagctgcagatcaggatcctcctccaactgcacttcccttccatcactgcgggccagctcatcggcagtgttttcagccacagtcactacattttctataagatcctcgcccttgcaaagtgctgggattatggggatgagctgccacacttggctcccaattatattttgtttttcctcagcaagttcatccaatgtaaatttctcaagccaggagggccgctccatggggtcctgtgcagcccgagccttcccgatgagcgccgcctcctgcttcagggcacccagtcccatcgaccacccaaaggctgaggagtgcgggcgcacggcgcgggactggcgggcagctccacctgcagccccggtgcggggatccactgggtgaaaccagctgggctcctgagtcgcgaaggtctgcagcttcactcctgaagccagcgagaccacgagcccactgggaggaacaaacaactccagacgcgctgctttaagagctgtaacactcatcgcgaaggtctgcagcttcactcctggcagagacaacttcttaatgagttctgcttctggtccacttccactccattcattcttcat

SEQ ID NO: 29383 - DNA, 732 bp, Homo sapiens
  SIMILAR (103)..(522): 311254mologous to Plasmodium falciparum merozoite surface antigen 2,accession number U91654,Smith-Waterman Score=127.
ctagacataaagactctccacgtccccaccagactcaggagcccagctggcttcacctagtggatcctgcaccgggactgcaggtagagctgcctgccagtcctgcgccgtgcactcgcattcctcagcccttgggtggtcgatgggactgggcgccgtggagcagcgggtggtggtcgttggggaggctcgggccgcacaggagcccatggagtgggtgggaggctcaggcatggtgggctgcaggtcccgagccctgccctgcaggaaggcagctaaggctcggtgcgaaatcgagcgcagcgccggtgggctggcactgctgggggacccagtacaccctctgcagccactggcccgggtgctaagtccctcattgcccggggccagcagggctggccagctgctccgagtgtggggcccaccaagcccacgcccacccgtaactccagctggcccccaagtgctgcacacagccccggttcctgctcgtgcctctccctccacacctcccttgaaagttgtagatgtcctagcatcaacaccagcttgcacaaacatgcgtgaagttcttattgacagctgtgtgctgtaagggtggttgccattgtacaaaataaggaagattctttctttacctctatctgtggttttatatttcctcttcttctccactaattgtacttttgtcatgtcatcaatgacctctatattggcaaattttataatcat

SEQ ID NO: 29384 - DNA, 543 bp, Homo sapiens
  SIMILAR (298)..(203): 661254mologous to Homo sapiens Human secreted protein, SEQ ID NO: 6536,accession number G02455,Smith-Waterman Score=104.
ctagatataaagactctccacgtccccaccagactcaggagcccagctggcttcacctagtggatcccgcaccgagactgcaggtggagctgcctgccagtcccgcgctgtgcgctcgcattcctcagcccttgggtggtcgatgggactgggcgccgtggacagggggcggcgctcgtcggggaggctcgggctggcctgccctccctcccttcctttttcttttccttccttctttccttcctttctttcttccttccttcctttcctcttttcttttctcttttctttcctttctgtccagtgaactgtggtgaacagtgtcccataggtaagatgtagaagggagagcaggccccctgggaagcccctcccgtcgggcagcgccgccttataagcgggttcccttcccgggggcggcagcggctggtcggcggcagctctgctggtgcgggggcggcgagcccgggatcgagctaccgcggccgagcgcgccggccaccgcctgcaccgcccttccgcccgccctccggacggccgcat

SEQ ID NO: 29385 - DNA, 1083 bp, Homo sapiens
  SIMILAR (558)..(788): 371254mologous to Mus musculus alpha-1 type II collagen,accession number M63709,Smith-Waterman Score=87.
ctagatataaagactctccacgtccccaccagactcaggagcccagctggcttcacctagtggatcccgcactggggctgcaggtggagctgcctgccagtgctgtgccttgcgctcgcattcctcagcccttgggtggtcgatgggactgggcgccgtggagcagggggcggcattcgtaggggagcctcgggcaatgggaaggtgtggaagtattaacattttgttgctgcttttgagaaccttccctaggagatagcggggatgggtctttggcctcttcatgactttctctttcttgctgcatttctgctctgccagcttaggtgatgaggatacaggtcctactttattatctccgttttgctgaccaagggaccgggttccatttggtactgtgtttaaggcacacagctggtgtgcagtagagctgggattcataatcaggtctaactccagagcttgtgctctagatggttcccacgtcctgctgcttctcccaggggctctcctggcatcccaagtagatgggagcagatcagaggagctcagagtcctctcccggaccacagcctggagggccacgtgcagaggggcctcaccacatccaggaagcaccaagatccgcctgagcccaaggagcaggcgcagaggcagccaggttgggggccggccaggcctcaggctgtcagagcaccaggagaccagcaggcagcaggagggagccaggcgtttccctggacggcggccatcgggctgttgttgggatccagtttcaagctccttcgaggagagccgcatggggtcatcccctccacgacgccccaggaaggagactgatgagcagacagttgttaacgccgcgccgccgccgccaccgtggtgattaaggccgcagtaattggcctcgcagccaggcaggggccgggcctgacagccggcagccgccagggtctggtcatcccataggaagctcttactggtagggactgtctttcccatattcccagtcgtgcctggtacagggttgcatgtttcataacaccctgcaatgcacatcgatgcatgcacacattttggcat

SEQ ID NO: 29386 - DNA, 972 bp, Homo sapiens
  SIMILAR (373)..(453): 1001254mologous to Mus musculus JNK3,accession number AB005665,Smith-Waterman Score=136.
atggataggcctgaaacctgggtacacaagggcagacctgacgcctatgtctgcaaatatttgcctacatctgtagaggctggccttatccttgggtccacagggggctacttggctctgggattggctttgagtctgagtctgcaggaaatagtcagttactgggatggatctgatgtccaggattataggggacagcccagtgctggagaagttccagaggctgggctgctaaggggtcctggacaaggtcgcttggatagcggcctaaccacagcattatacatgctcaggaagaggcaaagccggaaatttaccacttggcaaagcgtctttacaaaaccagagtttggctttgtggtagcttccttagaacttatctacaaggaagtaatgaattcagaagaaaagactaaaaatggtgtagtaaaaggacagccttctccttcagcttgcagggaggtgtggagggagaggcacgagcgggaacccgggctgcgtgcggcgcttgcgggccagctggagttgcaggtaggcgtgggcttggcgggcccccgcactcgggacagccagccagccctgctggccccgggcagtgagggacttagcacccgggccagtggctgcggaaggtgtactgggtcccccagcagtgccggcccaccggcgctgtgctcgatttctcgccgggctgtagctgccttcctgcggggcaaggctcaggacctgcagcccgccatgcctgagcctcccacccactccatgggctcctgtgcggcccgagcctccccgacgagcaccaccccctgctccatggcgcccagtcccagcgaccacccaagggctgaggaatgcgagcgcacagcgcaggactggcaggcagctccacctgcagccctggtgcgggatccactaggtgaagccagctgggctcctgagtctggtgaggacgtggagagtctttatgtctag

SEQ ID NO: 29387 - DNA, 2718 bp, Homo sapiens
  SIMILAR (766)..(1386): 1001254mologous to Homo sapiens sperm protein 10,accession number M82968,Smith-Waterman Score=1093.
gatatagctgacctggcatttgaggtatcagggaggaagcctcacccattccctagtgtcagcaaaataattgctgacatgctcttcaaccttttgctgcaggctcttttcctcattcagggaatgtttgtgagtctctttcccatccatcttgtcggtcagctggttagtctcctgcatatgtcccttctctactcactgtactgctttgaatatcgttggttcaataaagtggtgggttccgttcatgggagaataggaaactgcgtgagtggtagaggcaacaagttcgaagagctgcgggacgttcccactctctctggtgtagccttggctcaccgaggcgcgcagggagtggaagtgcctgaggataaagctctgctgcataaaatcttagttgagaatccatcagcaagaattaccattccagacatcaaaaaagatagatggtacaacaaacccctcaagaaagataacctcaaaatctcagactttggcttggcaacagtatttcggtataataatcgtgagcgtttgttgaacaagatgtgtggtactttaccatatgttgctccagaacttctgaagagaagagaatttcatgcagaaccagttgatgtttggtcctgtggaatagtacttactgcaatgctcgctggagaattgccatgggaccaacccagtgacagctgtcaggagtattctgactggaaagaaaaaaaaacatacctcaacccttggaaaaaaatcgattctgctcctctaggaacatcaagtcagcctaatgagctttctggctccatagatcatcaaacttcagttcagcaacttccaggtgagttcttttcacttgaaaacccttctgatgctgaggctttatatgagacttcttcaggcctgaacactttaagtgagcatggttccagtgagcatggttcaagcaagcacactgtggccgagcacacttctggagaacatgctgagagtgagcatgcttcaggtgagcccgctgcgactgaacatgctgaaggtgagcatactgtaggtgagcagccttcaggagaacagccttcaggtgaacacctctccggagaacagcctttgagtgagcttgagtcaggtgaacagccttcagatgaacagccttcaggtgaacatggctccggtgaacagccttctggtgagcaggcctcgggtgaacagccttcaggtgagcacgcttcaggggaacaggcttcaggtgcaccaatttcaagcacatctacaggcacaatattaaattgctacacatgtgcttatatgaatgatcaaggaaaatgtcttcgtggagagggaacctgcatcactcagaattcccagcagtgcatgttaaagaagatctttgaagaaatgtcattttcctatttctacatgcagacattcatccaccatcactcggaaaacattaatgacacataccatgaactacagaaagatgactcaaatataaactgtgtacaaagagattatgttataattcggctctcagcagctgctgctggtttctcggctccagcaccacgagtaccgcactctgaggtttacaaagcactctgcttcaccgactgtgatcctcacagtcctgtccggtggcctcacgcaggtggcggtgcagcctttcaggcccagagcggccaggagcgaagcccgcagccccgcctgatctctccccgactgcaaagcagccctgggcgggagcggcaacatctccacgtcacccttttggagccgccgacattcagaggggcaggacacgggaacgcgcgctgtcttgctttacggcgcgggtgcgcgagtttgcggcagcgtgacgccctcaagttttggcgggaaaagcgctgcatttggattcctgcagtggtgggcaaaggacagtccgccgaggtgctcggtggagtcatggcagtgccctttgtggaagactgggacttggtgcaaaccctgggagaaggtgcctatggagaagttcaacttgctgtgaatagagtaactgaagaagcagtcgcagtgaagattgtagatatgaagcgtgccgtagactgtccagaaaatattaagaaagagatctgtatcaataaaatgctaaatcatgaaaatgtagtaaaattctatggtcacaggagagaaggcaatatccaatatttatttctggagtactgtagtggaggagagctttttgacagaatagagccagacataggcatgcctgaaccagatgctcagagattcttccatcaactcatggcaggggtggtttatctgcatggtattggaataactcacagggatattaaaccagaaaatcttctgttggatgaaagggctgatcgtcgtgtgttgccacccattcatgtcaagatgactaagtttggatttttgcgattgtcctatgagaagcaggacacacttttgaagcttctcattctgtcaatggctgctgtattataccctctgaatgagcaaatattgatgttagataatcaaggaatgcaagagcatctgctttgtcgtcaagagctgttagggaccataagggacttgacacttccttttgcagaggaggaaactgattcccagagtggtgaatgcagtccagacctattcctactaacttatacttcctctctcactctgcctctcctactggtagctaaaggacacaattctgacacatactga

SEQ ID NO: 29388 - DNA, 644 bp, Homo sapiens
  SIMILAR (20)..(100): 771254mologous to Homo sapiens Human secreted protein encoded by gene 63 clone HBJFV28,accession number Y02712,Smith-Waterman Score=103.
gtaagatgcctgcttcccctttgccttctgccatgaatggaagcttactgaggcctccccagaagcagaagctgctacacttcctgtacagcctgcagaaaggtatatctcctaatgctatccctccccactccccccaccccacaacagctccagtctacagctcccagtgtgagcgacgcagaagacaggtgatttctgcatttccaactgagactgaagtctacattccaactgagaatgacagggaggtgtggagggagaggcgcctgcgggcacctgggctgtgcgcggcgcttgagggccagctggagttccgggtgggcgtgggcttggcgggctccgcactcgaagcagctggccagccctgctggccccgggcaggcagggctcgggacctgcagcccgccatgcctgagcctcccccagcctccgtgggctcctgtgcagcccgagcctccctgaggagcgccgccccctgctccacggcgcccagtcccatcggccacccaagggctgaggagtgcgagcgcacggcgcaggactggcaggcagctccacctgcagcccccgtgcgggatccacttggtgaagccagctgggctcctgagtctggtggggacgtggagagtctttatgtctag

SEQ ID NO: 29389 - DNA, 1515 bp, Homo sapiens
  SIMILAR (1009)..(1182): 391254mologous to Homo sapiens salivary proline-rich protein 1,accession number K02576,Smith-Waterman Score=65.
atggggcagcctctgctcctggtgagggactcaggaggtttacaattatggcagaaagtgaagggggagccagtgcaacaacacgaaaggaggataataccccccgccagagaagagaaggtgaagaggtccccagcagggccaccccccagcggtgggttagattctagccggcataagatcccttcccatgagcaggcttgggagtgcagcctgcatgcagaacaaatcaccagcctcgtgggatctggtgcagcccgagcctcccggacgagaagtgccccttgctccacagcgcccagtcccatcgatcacccaagggctgaggagtgcgagcacatggcgtgggactggcaggcagctccacttgcagccccagtgcgggatccaatgggtgaagccagctgggctcttgagtctgaaacaagggaagatgaatctacccacgaacagggcgctgcggagagtaatgagagcgacacacatgagaggagacgctggagagaagtgcgaggagaggatgcgagaggcgtaagattcgaggagaaaagaacgcgctttgagaatcggagagactcaactaagacgcacaaggtggaagatgtcgacaccgacgtacggcgggagagaaatagggggttctgcaggcaaacagagacccccaggattcgatacccggttacccgcgagaaggtgggttcccgaattcaagaaggttcccttatatataccggggaagacctgtgcattccagtatggtcctcagtggcatatgtgcccattcatgttgaaataaatgaaaaaattcataacctcctcacaagagccatgctagaagttcccagtcgccaaaagtctactcttaagagagcatctccattctcccagaatcacctgggaagcagctgctgtgagtctggcccaggttctgttctctgcacccacctaactcagtgcatttgcatcaaggctggaatctcaggttctcagattggagggtgctccctgggtcggatgacacagggaatccttcctctgggattcctacgtgtgccccagcatcctggagtcgctattcgggcgcaaaaattgtcctctgtgtccggttctccgggtttcctttctccccaaaactctccccagatccgtggcaactcgtggaggggtcccccctcctctgcctggagcttgggcccctcctccataaatcgcattttgcaagggacccctctatactgggaccgtgttcccccttcagaatccttgtattttggagcacctcaggctatccccagtaagaagcatcccagactgtgcatttccaaccctgctgaaaagcaggacaaggagaaagggctgactctgcctcagctgcagatgaggctgtgcagtctgcagacaattgtgggttcattactgacagtagaaatggcactggaaattgtcgggatcagagcaaaggggcttctgagtgaactaggaacaccagcactgacagcaaaaccacccagctaa

SEQ ID NO: 29390 - DNA, 2211 bp, Homo sapiens; identical to SEQ ID NO: 3541
  SIMILAR (649)..(2208): 1001254mologous to Homo sapiens leukotriene B4 omega- hydroxylase,accession number D26480,Smith-Waterman Score=2791.

SEQ ID NO: 29391 - DNA, 1902 bp, Homo sapiens
  SIMILAR (1255)..(1707): 641254mologous to Mus musculus reverse transcriptase,accession number U15647,Smith-Waterman Score=525.
atgagccctggggaaaaaaatcagaaggaagctgaattactaaagaaggcagatgtaaaaaatagatattggaggtcaagtagtagtgtgtccagaattggtgggtttttgggtctcactgacttcaagaatgaagccgcggaccctcacggagtgaagctgcagaccttcacggtgagtgttacagctcttaaggtagcgcgtctggagttgttcgttcctcccggtgggctcgtggtctcgctggcttcaggagtgaagctgcagatcttcacagtgagtgttacagctcataaaagcagtgtggacccaaagactgagcagaagcaagatttattgcaaagagcgaaggaacaaagcttccacagtgcggaaggggaccccactagatacaaaggttctccacgtccccaccagactcaggagcccagctggcttcacctagtggatcccgcaccagagctgcaggtggagctgcctgccagtcctggtgccgtgcgcctgcactcctcagcccttgggtggtcgatgggactgggcgccgtggagcagggggtggcggtcgtcgggaacctccggccgcacaggagcccatggagcgggtgggaggctcaggcttggcgggctgcaggtccccagccctgccccgcgggaaggcagctaaggcccgagacgttaaagcaaaatattatactgtccttaatccagtgtataggcgcctcgctggtgcccacaggaactgctgaattagagccaagcccttcattacagctcaggggcacaactgatgccgcacaagccattaaaaatgagtttgcgagagtacaaaaaagaaacctttgtagacgagggccaatttgtttcgaaggcgatgcactgagctggttttttgaaaagatcaacaaaattgatagacgtctagcaagacgaataaagaagaaaagagagaagaatcaaatagaagcaataaaaaatgataaaggggatatcaccaccgatcccacagaaatacaaactaccatcagagaatactataaacacctctatgcaaataaactagaaaatctggaagaaatggataaattcctcgacccatacactctcccaagaataagccaggaagaagttgaatctctgaatagaccaataacaggctctgaaattgaggcaataattaatagcttaccaaccaaaaaaagtccagcaccagacggattcacagccgaattctaccagaggtacaaggagaagctgatagtgttggaagttctggccagggcaatcaggcaggagaaagaaataaagggtattcaattaggaaaagaggaactcaaattgtccctgtttgcagatgacatgattgtatatctagaaaaccccatcgtctcagcccaaaatctcctcaagctgataagcaacttcagcaaagtctcaggatacaaaatcaatgtgcaaaaatcacaagcattcttatacagtaataacagacaaacagagagccaaatcatgagtgaactcccattcacaattgcttcaaagagaataaaatacctaggaatccaacttacaagggatgtgaaggacctcttcaaggagaactacaaaccactgctcaatgaagttaaagaggatacaaacaaatggaagaacattccatgctcatggataggaagaatcaatattgtgaaaatggccatactgcccaagattgagaaacaaacctggaacaactcacagactctccagtgccaaccattctgcgagagtgatgtctgcacttccacgctccagattcaggagagatttgaagtagctcctcttcacaaaaaggcactaagctctgaggagataacaatcgataagactgacccctcgccagccattgaggagctcacagtctaa

SEQ ID NO: 29392 - DNA, 1542 bp, Homo sapiens; identical to SEQ ID NO: 19332
  SIMILAR (1078)..(1395): 1001254mologous to Homo sapiens similar to mouse adseverin(D5); similar to PID:g2218019,accession number AC005281,Smith-Waterman Score=556.

SEQ ID NO: 29393 - DNA, 807 bp, Homo sapiens; identical to SEQ ID NO: 14479
  SIMILAR (470)..(348): 441254mologous to Homo sapiens Human bcl2 proto-oncogene mutant protein fragment 14,accession number Y21166,Smith-Waterman Score=79.

SEQ ID NO: 29394 - DNA, 780 bp, Homo sapiens; identical to SEQ ID NO: 11446
  SIMILAR (145)..(612): 261254mologous to Arabidopsis thaliana contains similarity to phytocyanin/early nodulin-like protein~gene_id:K19P17.3,accession number AB007644,Smith-Waterman Score=122.

SEQ ID NO: 29395 - DNA, 1323 bp, Homo sapiens; identical to SEQ ID NO: 13521
  SIMILAR (1)..(327): 451254mologous to Mus musculus Gag polyprotein,accession number Y12713,Smith-Waterman Score=268.

SEQ ID NO: 29396 - DNA, 2453 bp, Homo sapiens
  SIMILAR (82)..(753): 511254mologous to Homo sapiens KIAA0544 protein,accession number AB011116,Smith-Waterman Score=520.
atgaaagagctgcagccaggctgccacggcagaggctatgacctcacagcagctcaggcccttgaatggtctccatcaaatgtagacggggtcagctacctccttcaggagatctatggaattgaaaacaagtacaacacacaagattctaaggtggctgaagacgaagtgagtgataacagtgccgagtgtgtggtgtgtctctcggatgtccgggacaccttgattctgccctgtcgccacctctgcctctgtaacacctgtgcagacacgctgcgctaccaggccaacaactgccccatctgccgactgcgtaagccccagagcggcagggggactgccttccgggcactgcttcagatccgagccatgaggaaaaaattgggccccttgtccccaaccagctttaaccccatcatctcatcccagacatctgactctgaagagcatccatcctcagagaatattccaccaggctatgaagtagtatctcttctggaggccctcaacgggcccctcaccccgtccccagcagttcctccacttcacgtgcttggagatggccacctctcaggaatgctcccttcatatggcagtgatggccacctgccccccgtcaggacgatctcgcctcttgaccgcctgtctgacagcagcagtcagggactcaaactcaaaaagagtctctccaaatccacttcccaaaactcttccgtgctgcatgaagaggaagatgagcattcctgcagcgagtcggagacacagctctctcagagaccgtcggttcagcatctcggagaggaatgtggtgtgactccagaaagtgagaatctcaccctgtcgtcatctggagctattgaccagtcgtcttgcacagggacgcctctgtcatccactatttcctccccagaaggccctgccagcagcagcttggcccagtctgtcatgtccatggcatcctcccagatcagcactgacaccgtctcctccatgtctggctcctacatcgcccctggcactgaagaggagggagaggctctctcttccccccagcctgccagcagggccccctcagaagaaggagaggggctgccagcggagtctccagacagcaactttgctggcctcccagctggagagcaggatgcagaggctgcactcagctcacactaccagcctatatcccacgcctccaagggagactgcaagtcaggcatggagcagcaaggggtgtgtgagcgagagtggggtccggccactgtgcagtcagacacgccagctgccgctgtggggctggcagccccagggcggcaagctgtggaggggctgtctgtctgctccctgcgacccccctgcagcagccgttgtgatggcagcggctgctctggacagcccaccactgtcatcaatatttccttacgccgccccacctccccaagaacccgtgaagactctgagaagcctggtcaatatccgaaaggacacactgaggctcgtcaaatgccaggacaaaaggacaaggtggccaagagaagtagaaaggtgttgagaggagaaggagaatgggaaagggccaataagaagacaatgaaaacaagcagcgccaaggcagctgggccaggctggactcacacactccctgaaggctcgggtccaggaggcactggtggccagctggagttctgggtgggcgtgggcttggcgggctccgcaccaatggcagggctcattgccctgccggcccggggcaatgaggggcttagcacccgggccagcggctgcggagggtgtactgggtcccccagcagtgccagcccaccggctctgcgctcaatttctcgccgggccttagctgccttcccgcggggcagggctcgcgacctgcagcccgccatgcctgagcctcccaccccctccgtgggctcctgtgcagccccagcctccccgatgagcgccgccccctgctccacagcccccagtcccatcgaccacccaagggctgaggagtgcgggcacacggcgcgggactggcaggcagctccacctgcagccccagtgcgggatccactgggtgaagctagctgggctcctgagtctggtggggacgtggagaacctttatgtccagctcagggattgtaaatacaccaatcagcaccctgtgtttagctcaaggtttgtgagtgcaccaatcgacactctgtatctagctgctctgatgaggacgtctgtatctgctctctgtgcctgggacagtgagggcctggtgcatttgatgcaggatttttcttggccccttcaacagactcatagaaggggcaccccacctattcggtctgccatgctcaaccccttgcaggagggagcacgtgagcaagcaagtgcaagatccggctggctgctccggctgctgacacaggagcaacttctgtgcagggcctgcatccagaccag

SEQ ID NO: 29397 - DNA, 1370 bp, Homo sapiens
  SIMILAR (182)..(1300): 1001254mologous to Homo sapiens hydroxyindole-O- methyltransferase,accession number M83779,Smith-Waterman Score= 1939.
tcaggaactggagcagcaaagagaagaacaaaagcgcagagagaaggaagcggaggagaggcagcgagcggaggaaagcagctgtgagcgggtggctcttccccaccttgccagcaggctctgtgctccttgaagcaagcgctccagaggctccggaagccacggctggattggagacaagatgggatcctcagaggaccaggcctatcgcctccttaatgactacgccaacggcttcatggtgtcccaggttctcttcgccgcctgcgagctgggcgtgtttgaccttctcgccgaggccccagggcccctggacgtggcggcagtggctgcaggtgtgagggccagcgcccatgggacagagctcctgctggacatctgtgtgtccctgaagctgctgaaagtggagacgaggggaggaaaagctttctatcgaaacacagagctgtccagcgactacctgaccacggtcagcccgacgtcacaatgcagcatgctgaagtacatgggcaggaccagctaccggtgctggggccacctggcagacgccgtgagagaaggaaggaaccagtacctggagacgtttggcgttcccgctgaagagctttttacggccatctacaggtccgagggcgagcggctacagttcatgcaagctctgcaggaggtctggagcgtcaacgggagaagcgtgctgaccgcctttgacctgtcagtgttcccacttatgtgtgaccttggtgggacacggataaagctggaaaccatcattctcagcaaactatcgcaaggacagaaaaccaaacaccgcgtgttctcactcataggtggggctggagctctggctaaggaatgcatgtctctgtaccctggatgtaagatcaccgtttttgacatcccagaagtggtgtggacggcaaagcagcacttctcattccaggaggaagaacagattgacttccaggaaggggatttcttcaaagaccctcttccggaagctgatctgtacatcctggccagggtcctccatgactgggcagacggaaagtgctcacacctgctggagaggatctaccacacttgcaagccaggtggtggcattctggtaattgaaagcctcctggatgaagacaggcgaggtcctctgctcacgcagctctactctctgaacatgcttgtgcagacggaagggcaggagaggacccccacccactaccacatgctcctctcttctgctggcttcagagacttccagtttaagaaaacaggagccatttatgatgccattttagccaggaaataactgtttcttgtgacctggaactaacgtcaaagcacacaagacataataataaagacatgtacctcca

SEQ ID NO: 29398 - DNA, 703 bp, Homo sapiens
  SIMILAR (293)..(568): 891254mologous to Homo sapiens cell recognition molecule Caspr2,accession number AF193613,Smith-Waterman Score=435.
cctgcgatcacaatcacgagggggtagatctggatttccattggtggttttcttttcggctgcaatttccttttcggcgctgtgctctgtttctcgctgggccttagctgccttcccgtggagcaaggttcgggacctgcagcccgccatgcctgagcctcccacccactccatgggctcctgtgcggccggagcctccctgacgagcaccgccccctgctccacggcgcccagtcccatcgaccacctaagggctaaggaatgcgagcgcacggcgcaggactggcaggcagctccacctgcagccctggtgcgggatccactagaaacagggaaaattgaccaagagattcacaaatacaacaccccaggattcactggttgcctctccagagtccagttcaaccagatcgcccctctcaaggccgccttgaggcagacaaacgcctcggctcacgtccacatccagggcgagctggtggagtccaactgcggggcctcgccgctgaccctctcccccatgtcgtccgccaccgacccctggcacctggatcacctggattcagcggtgtttgcagaacagcggtttttcgtgaactgcgaatgctgccatctgatcgttcctctggaagttttgtctcagaggagtacccggccgtgtgaagtgtcagtctgcccctactggggggtgcctcccagttag

SEQ ID NO: 29399 - DNA, 991 bp, Homo sapiens
  SIMILAR (441)..(629): 551254mologous to Homo sapiens Human secreted protein, SEQ ID NO: 7083,accession number G03002,Smith-Waterman Score=148.
caaaatgtggctggaatcaggagaccggagagaccaatgaggggaacaggacgattgtatttaggtggccaccagctcagcagattaatacccagaggctgagcaatgagcaaagaaagggcttgacttttattcatgtgaccaaagggtgttggccgggccttagctgccttcccgcaggacagggctccgggacctgcagcccgccatgcctgagcctcccacccactccatgagctcctgtgcggccagagcctccctgacaagcgccaccccctgctccagggcgcccagtcccatcgaccacccaagggctgaggagtgcaggcgcagggcaccgggactggcaggcagctccacctgcagccctggtgcgggatccactgggtgaagccagctgggctcctgagttctttgggtccacgctgcttttacaagctgtaacactcaccacaaaggtctgcagcttcattcctgaagccagcgagaccatgagcccaccgggaggagcgaacaactccagacgcgctgtcttaagagctgtaacagtcacctcgaaggtctgcagcttcactccgcgagcgtctgcggcttcattcttgaagtcagtgagaccaagaacccaccaattctggacacaataggatttaaaaaccacaatctggatgcttattgtgttaattactgctgagttgtcattccttttagaccacccaaggtatgggaggcctccattccatttagagagctcctggtgcttcctggtggctggtgatgattcatttttattcccttgaatcttccccacggccagatcattgttgtccatatccttccctgcaatcaatccagctgttctgtgcgtcacttccggtttctgtaggtcatttccctttttttgtctataaatcttcttccaccacgtggttgtgctggagtctctgtgaatctgctgtgactctgggtgctgccccattcgcaaattgttcat

SEQ ID NO: 29400 - DNA, 2464 bp, Homo sapiens
  SIMILAR (578)..(2350): 471254mologous to Homo sapiens junctophilin type3,accession number AB042636,Smith-Waterman Score=1225.
atgactttgtgcgtccttgaagaacagcaaagaggtcagagtggatggtgtggagtgggcaagaagatgacatataggatctggggtagaagagacaaccagcccatggctcgggacctgaagcccgccatgcctgagtctcccactcactccatgggctcctgtgtggcccgagcctccccgacgagcaccaccccctgctccacggcacccagtcccatcgaccacccaagggctgaggaacgcgagcgcacggcgcaggactggcaggcagctccacctgcagccccggtgcgggatccactgggtgaagccagctgggctcctgagtctgagcctcccctgggccccatcccccgaaaaaccccccgaaaaaccccccgaaaaaccgtctgcctaccttggtccgatctccccgctacatattctaccccccacccccatccctttgccagagacgccgaagaaccggggcagaggggtcctgacagcagccagggaaacgggcccccagcaggctctccagtcccaggatgcgctgagccgccggggggctgaggccgcgccaactacatgcatgtcccccgggggcaagttcgactttgacgacgggggctgctacgtggggggctgggaggcggggcgggcacatggctacggcgtgtgcacgggccccggcgcccagggcgagtacagcggctgctgggcacacggcttcgagtcactgggcgtcttcacggggcccggcggacacagctaccagggccactggcagcagggcaagcgcgaagggctgggcgtggagcgcaagagccgctggacgtaccgcggcgagtggctgggcgggctgaaggggcgcagcggcgtgtgggaaagcgtgtccggcctgcgctacgccgggctctggaaggacggtttccaggacggctacggcactgagacctactccgacggaggcacctaccagggccagtggcaggccgggaagcgccacggctacggggtacgccagagtgtgccctaccatcaggcggcgctgctgcgctcgccccgccgcacctccctggattccggccacagcgaccccccgacgccacccccgcccctgcccttgccgggcgacgagggaggcagccccgcctcgggctcccggggcggcttcgtgctggccgggcccggggacgccgacggcgcgtcgtcccgaaagcgcactccggcggccggcggattctttcgccgttcgctgctgctcagcgggctccgagcgggcggacgtcgcagctccctgggcagcaagcgaggctccctgcgcagcgaggtgagcagcgaggtgggcagcaccggaccgcccggctcggaggccagcgggcccccggccgcagcgccgcccgccctcatcgagggctcggccacagaggtgtacgcgggcgagtggcgcgcagatcggcgcagcggcttcggcgtcagccagcgctccaacgggctgcgctacgagggcgagtggctgggcaaccggcggcacggctacgggcgcaccacccgccccgacggctcccgcgaggagggcaagtacaagcgcaaccggctggtgcacggcgggcgcgtccgcagtctcctgcctctggcccttcggcggggcaaggttaaggagaaggtggacagggctgtcgagggcgcccgtcgagccgtgagtgctgcccgtcagcgccaggagatcgccgctgccagggcagcagacgccctcctaaaggcagtggcagccagcagtgtcgctgagaaggccgtggaggcagctcgaatggccaaactgatagcccaggacctgcagcccatgctagaggccccaggccgcagacccaggcaggactcagaaggttccgacacggagcccctggatgaggacagccctggggtatatgagaacggactgaccccctcagagggatcccctgaactgcccagcagtcctgcctcctcccgccaaccctggcgaccccctgcctgccggagcccactgcctcctggaggggaccagggtcccttctccagccccaaagcttggcctgaggagtgggggggggcaggcgcacaggcagaggaactagctggctatgaggctgaggatgaggctgggatgcaagggccagggcccagagacggttccccactcctcggaggctgcagcgacagttcaggaagtcttcgagaggaggagggggaggatgaagagcccctgcccccgctgagggccccagcaggcacggagcctgagcccatcgccatgctggtcctgaggggctcgtcctcgaggggtcctgatgctgggtgcctgacagaagagctcggggagcccgctgcaaccgagaggcctgcccagccgggagctgccaaccccctggtggtgggagccgtggccctcctggacctcagcctggcattcctgttctcccagctcctcacctga

SEQ ID NO: 29401 - DNA, 1560 bp, Homo sapiens; identical to SEQ ID NO: 19243
  SIMILAR (439)..(564): 881254mologous to Homo sapiens Human secreted protein, SEQ ID NO: 7217,accession number G03136,Smith-Waterman Score=187.

SEQ ID NO: 29402 - DNA, 2598 bp, Homo sapiens
  SIMILAR (2290)..(2358): 431254mologous to Homo sapiens R kappa B,accession number X80878,Smith-Waterman Score=43.
atgaagcccctgctcctggccatcagcctcagcctcattgctgccctgcaggcccaccacctcctggcctcagacgaggagattcaggatgtgtcagggacgtggtatctgaaggccatgacggtggacagggagctccctgagatgaatctggaatcggtgacacccatgaccctcacaatcctggaagggggcaacctggaagctaaggccaccatgctgataagtggccagtgccaggaggtgaaggtcgtcctggagaaaactgacgagccgggaaaatacacggccaacaggggcaagcacgtggcatacatcatcaggtcgcacgtgaaggaccactacatcttttactgtgagggtgagctgcacgggaagccgatccgaggggcgaagctcgtgggcagagaccccgagaacaacctggaagccttggaggactttgagaaagctgcaggagcccgtggactcagcacggagagcatcctcatccccaggcagagcgggacatggatgaagctggaaaccatcattctcagcaaactatcacaaggacaaaaaaccaaacaccgcatgttctcactcataggttctattattgtcaaggtcccatcttcacttcaagctcatttacagttatcagggaaagaggttgatgtgaactcagaagtccatgttcaggaaatggctgaagctcgtaaagatgatgttgtaacagtgactgatgcagaaaaagcattagacaaaatccagcatctctttatggttaaaactctcagcaaaatcggcatacaagggacatacctcaagcctgagatcttctttgatgttgtcagcctctcaacatggcaggaagtgttaagtgattctcaacgtgaacacctccagcagtttctgccccagtttcctgaagacagtgctgagcagcagaatgaactcatcttagccttgttcagtggggagaacttccgctttggaaaccctctgcacattgcccagaagcttttccgagacggacactttaaccccgaggtggtcaagtaccggcagttatgcttcaagtcacagtacaagcgctacctcaactcccagcagcagtatttccatcggctgctgaagcaaattcttgcttcccggagtgatctgctggagatggcccggcggagtggccccgcccttcccttccggcagaaacgcccttcaccatcccgcacacctgaggagcgggagtggcggacccagcagcgctacttgaaggtcttaagggaagtgaaagaggagtgtgccacgttggatttacaagaacaattttcttttgaagatctcagctcatggcttccgagctctccagcacgttctcctagtcctgcggtgcccctgcgggtggtgcccacactttcaaccacggatatgaaaaccgcaggtgagaaccaagctgccgctgtcaccattctgggacattgcggtggagacctgaaaactcctttagagggagataaagtagaactgggggacagtgacctgaagataatgttaaagaagcaccacgagaagcggaaacatcagccagagcagctggcgaggctagctagcatcaacgatgtgaggcacggtggctttgacttcgcagggcctgctgaatgtagtgtctgccttaattgttacagtgacactgtcgagtataggaatcgtctccacctcagcagtgctcaagaggatcacccggaccttttgacaggggacctgactctcaatgacatcatgactcgagtaaatgctggcaggaagggctctctggcagccttatatgacttggctgtccttaaaaaaaaggttaaggaaaaagaggaaaagaagaagaagaaaataaaaacgatcaaatcagaggcagaggacctggccgagccgctaagcagtactgaaggggtcgcacctctctcacaggccccctctccgctggcaattcctgctatcaaggaagagccccttgaagacctcaagccttgccttggaatcaatgaaatatcttccagcttcttctctcttctattagagatcttgctgctggagagtcaggctagccttcctatgctagaggagcgagttttggattggcagtcatcgccagccagctccctcaacagctggttctctgcggcccccaactgggctgagttggtactaccagccctgcagtatcttgctggagaaagtcgagctgttccttccagtttctctccatttgttgaattcaaagagaaaacccagcagtggaagttgcttgcccaagcctccccgacgagcgccgcccctggctctacggcacccagtcccatcgaccacccaagggctgaggaatgcgagcgcacggcacgggactggcaggcagctccacctgcagccccggtgcgggatccactgggtgaagccagctgggctcctgagtctggtggggacgtggagagtctttatgtctacctcagggattgtaaacacaccaatcagcaccctatgtctagctcagggtttgtgagtgcacccaatcgacactctgtatctagctgctctggtggggccttggagaacctttatgtctag

SEQ ID NO: 29403 - DNA, 2031 bp, Homo sapiens; identical to SEQ ID NO: 11361
  SIMILAR (436)..(819): 1001254mologous to Homo sapiens sperm protein 10,accession number M82968,Smith-Waterman Score=685.
